United States Patent Application Publication US 2004/0214272 A1 - sequence listing, part 24

SEQ ID NO: 98978 - DNA, 3174 bp, Zea mays
  Clone ID: MRT4577_21780C.1
atgccgccgcgcacaagaaaaaccgtgcgcaagtctaccggacccattggcgtacctcgcaatcaactagctccaaggcatggggacattagtagtggtagcaatgatccaattggagatctagaagctcaagtagaacaacttcgatcggagctccgtcacaggaacgaagtatgggttgaggatgaccaacttgctgaacgagatttagcgctcgattgggttgttaactcacgttcacttgcttgggccaaggaagccaaagctcgagcccgcgtggaggagcttagcacagccgtggacaacttgcagatgtcgtcctggactcgtggacaggatggtgcgggaacctcccgtgggagggaagctactcctaacccgccaccagtacccccagccttggctgaggctatcactgccttagtcaatgcaacaactgataacacccgctttctgcgagaaatggcgggacaacaaatgcaacagcaaggcgggcgagcgtatccgcaaggaccccgcgaaacttcatatttggacttctcggagacacatccctcgttatttgtcaaggctgaagatcctcttgaagcagatgagtggatccgagttatcgaacaaaagttcgggcttctccgatgcatggagactcaaaagcccttatttgcagcgcaacagttgcgaggccttgccagcacatggtggggaaattatgtggctatccagcctactggtcatcaaattaccagggacgaattcaaactggctttccgggagcactatattccttatggagtgctccatatgaaacaggaagaatttatgaagctcagacagggtggagataatgccacccagtatctcaataagttcaaccacttgtcccaatatgccatcaatcaggtaaacactgatctgaagaagaaaaattgttttatgagaggcctcaatgtccggttgcagcggaaaatggccacgtgcctcgacctcacttacagcagggctgtcagcacggtgctggcagttgaagccaaatatgctggcccaggaaaatcaaagggctatggaggcgacaggcccaaccaggggcctgagaagagacaaagttattctttttattctggcgcttcacatacattcataagcaagaagtttgtggagcaacattgcattccatacaatgaatcaagggaagggtttataattcattcgcctgggggacaaatattcactaaagaggtggctttccatgtgcctataacattagctgaacgggactttcctacaaacatgattgttctaaaaggccaagatatagatgtaattctaggcatgaattggttagcccaacataaagttatcctcaacactgatctgagaatcatctggttgagttatggccaagaagagattgacctcaggtcgggttaccatcagatccgtatccgacccgaagatatacccaagaccgcattcactatgttgtatggattatttgaatatttggttatgtctttcggactaacaaatgctcctgcccacttcacatatcttatgaactcggtatacatgcccgagttggataaattcatggtggtattcattgatgatatcttaatgtattccaagaatgaagaggagcatgctcggcatttgcggatcgtattaacgcgcttaagggagcaccaattatatgctaagtttagtaagtgcgcgttctggctggaggagatccaatttctaggacatgtattatctgccaaggggattgcggtggatcccagcaaagtcaaggatattttggagtggaaacccccaaccactgtacatgaagtccgaagtttccttggactggctggaagtggtctagattgtgttctaatgcaagaaggacgagtgatagcttatgcttcaaggcagttgcgtcggcatgaggaacattatccaactcatgacctagagttagctgttgtggttcatgccctaaaaatctggtgtcattatctactggggaatatctatcatatttatacaaatcataaaagtttgaagtacatctttacccagtcagagcttaatatgagacaaaggagatggctcgagctgataaaggattatgaattagatattcactatcacccaggcaaagctaatgtagtggcagatgcgttaagtcacaaggcttcctgccattgtctgacgatgaagacttctgacattatgttatgccaagaaatggagaagatgaacctagaaatgattcaacatggaacatcaaatcacttgaagcttgagtcagtcctcctgcaaagaataattgatgcacaaagaaataatgagggaatgaaacacattcatgagaaaatggagatgaagattgagattgcacgctatgtggcaagatgtgacacttgcagacatgtcaaggccatacacatgaaagctgctggtccattacaatctttacctataccaacatggaaatgggaggatattagtatggacttcattgtggggttacccaggacagcaaaggggtatgattccatctgggttattgttgatcgacttacaaagatcgcccacttccttcctgtcaggaaatgggatgattgtttaccattagcggagttctcgtacaataatagctatcaagagagtatcaaaatggcaccttttgaagccttgtatggacgacggtgtcgtactccgctaaactggtctgaaccaggtgaaagaagtttcttcaggcctgatatggtaaaggagacagaagagaaggttcaacgaataattcataatttgacagaagcccaagctcgtcagaagagttatgcagacaagagacgaaaacccttatactttctagttggagattatgtctacctcaaagtctcgccgatgaagggtatatcatgtttcggggtaaaagggaagcttgcaccccggtacatttgtcctttccctgttcttgaacgatgtggaccagtagcataccggctccaattacccgaaaccttgtctgctatacataatgtgttccacgtgtctcaattgaagaaatgtcttcgggttcctgatcgaaccattgaagtaatagatgttgccttagaaccagacttgacatattatgaacatcctattcgagtcttggatcaaaaggacatgattacctga

SEQ ID NO: 98979 - DNA, 411 bp, Zea mays
  Clone ID: MRT4577_21781C.1
gcactattaaagtggaaaagaggatcaatgagattgtgaaccgcttgaataagacaaaggtggaacggaaacctgatttaaagggtatgtcacatttatttgaaagcatttctgtcgtcatttttatgtcagcaactcagcattctataatgaacatggttaagtatttttctttttgtttttgggattcataatgtgagtatttatctcacaaagaaagtgaggatgtaatgtctaggctctgtttggtggagctgtagcttttccaaaagcacctcctgaagaagctttcgggaaaagcttgggaagctgctccttgaaagcttctctgcttttagtacaacaaagtgctgcttttatcagcttgaagaaactgcttgcctgtttgggggagcctctagctttttgagc

SEQ ID NO: 98980 - DNA, 716 bp, Zea mays
  Clone ID: MRT4577_21782C.1
cattgggtccctcgaggccggccgggaaaattcctcctccctcccttggtgatgccgttagccacgaattcttgtctctatgacttccctctcctccgctgtggcttgccgtcttcctgccgggcccggccggttcggggccttcggagggcacgcatggtggtgtattctttcggatgagacgagcccgaagctgtcataatggtgattactagcactggatgagatggaaggtgactccgacatgggtgcccctgctgatgacatggccaaggagcagtgagagacgtagctattctaatggaaaatgtactgctgatagacctgcggatgagccatccccctatgcttggtgaccaaattcaacctgtcgctcgaacttgtggaccgtacggtgagaaaaattaaaattatttcgccgtccatacttcaccgtcgacatcagaacgcacgctcgctctctcacgagtgcactctaacatgtgtcagaagaagatgtgctcgactgctacctccgctagcaaaggacagaatggactatgagtacgtactaaatactctcttcctaaggtacaatattctacattatccgattcgatcttacgtatggcattactacaactatgacatctacctagtatcggattactcaaataatcattcgtccgcattgaacgctgtcgatactgaacttatcaacgtactatgacacgtgc

SEQ ID NO: 98981 - DNA, 642 bp, Zea mays
  Clone ID: MRT4577_21783C.1
ccacgcgtccgctccctcttctcggcggccgtggcggcgccggaggactatgcgcggcctccaccgctgcccgcaccagctcctcctggtctctccaccgccgcggtccgcccccgcgtgccgccagtcggccaccgcctcatcgcggggcctcaggagctccctcgccgtcttctccgcacccggggctcgggtagcggcggcggcgcgcgagcagaagtggggccacgtggagggtgatgaagacggtggagaggagggcctaggggaggcgctccacaggacgcgggagctcgtggagtgcgccatgttcgcggccgtcgctgggctcgcctacttcctcagcaattccctcgccattgagaattatttcagttgctttttcccattgccgatagtcatttcctcattaagatggggactagaagccagcaggaaaaccgtggtggctactgttttactgctattcacattatctggccctgtaaaagcgtcaacttatctgctaatgcatggagtagttggtctcatcatgggtactgtttggagattggagaccaactggattgtctccatcatcctctgctccattataactgttaacattcatgcttcgttgacatacatcctgacggcagctgg

SEQ ID NO: 98982 - DNA, 496 bp, Zea mays
  Clone ID: MRT4577_21784C.1
actaggttcacatcacttttaacatgccatttaacattttaggagccaaaagggaaagaggaaattaggctggagcacataatttccacaggttctaaacacgaacatactccagcagtacgctagtcaagtgactaattgctaacccttatggggagacttggctgccttctttgggaactgggcggccttcttaggggacaaaatatccttgctgtcgtcgttggacgccttcttccccaactttttgggcaagaaaaccgggcccatgctggggaggacaccgtcgtgccctataaaaacttccgacagaatcttgccgagctcaaaatttttacaaatcgccaggaccaagagaagggggactatacccgaatttttgaagttcttcgtcgcttaaaaaatagcttcaggaacttggcggccatgtactaaagcacagccgttaaatatacgggggcttctgtaaccactcgctgaactttccggcccttat

SEQ ID NO: 98983 - DNA, 1162 bp, Zea mays
  Clone ID: MRT4577_21785C.1
ccgtatctccctccctcttctcggcggccgtggcggcgcggaggagtatccaaggcctccccacgcgtccgctctcctctccacctcatccgtatctccctccctcttctcggcggccgtggcggcgccggaggactatgcgcggcctccaccgctgcccgcaccagctcctcctggtctctccaccgccgcggtccgcccccgcgtgccgccagtcggccaccgcctcatcgcggggcctcaggagctccctcgccgtcttctccgcacccggggctcgggtagcggcggcggcgcgcgagcagaagtggggccacgtggagggtgatgaagacggtggagaggagggcctaggggaggcgctccacaggacgcgggagctcgtggagtgcgccatgttcgcggccgtcgctgggctcgcctacttcctcagcaattccctcgccattgagaattatttcagttgctttttcccattgccgatagtcatttcctcattaagatggggactagaagccagcaggaaaaccgtggtggctactgttttactgctattcacattatctggccctgtaaaagcgtcaacttatctgctaatgcatggagtagttggtctcatcatgggtactgtttggagattggagaccaactggattgtctccatcatcctctgctccattgtccgtgccctgggagcttgtggttacgtgctagtgtcatcgtttctgataagagaaaatattctcgcgctgataactgttaacattcatgcttcgttgacatacatcctgacggcagctggcgtgaacacaattccttccatgggcacaatatatctactctttgggacactgcttctacttaattgtgggttcttcgtcttcctcctgcatgtgatgtatacggtattcctggcgaagcttgggataaagccgtcgctgaggtcaccaagatggctggacagagtgatgtgaaaaatttaggagtagggcatcgtacgtagtgactgttatgctgttttagccttgctgtttgtcgcccctacctatactgggaactgtaaccatggggtgcatctgtgcatgcaaacgcgacaagcaaaattcgggattatcaatcatctgtgctactcgtgctctgttgatgatcttcttgttaaggc

SEQ ID NO: 98984 - DNA, 368 bp, Zea mays
  unsure (1)..(368): unsure at all n locations
  Clone ID: MRT4577_21786C.1
caaggagcaagcagcgggaggcacacacaaagaggggagacacgacggaaccacccacaacaagggcacgagggccagagagcgcaggaacgagcaccancatgcgacaggaggacacgccaaccgagagcacgaggaagaaagacacagagagacaccgcaaggacggagaccgaagacgggaggncaacaagcagcagaaggcacgaaggcacgacaaacaaaaggacaggagccgcgccangagagacgacgcagcgaaagacgcgaaaccagagagccgcgggaggagaaaggaccaaaacaacaagcgaaggaggaggacgggcagcgcacacgacaggcacgaggggacaaacaagagcagc

SEQ ID NO: 98985 - DNA, 409 bp, Zea mays
  Clone ID: MRT4577_21787C.1
taagaagttaaagaacggagaaacagtcgatgccagcgcttacattgatgccgtcgtggagacaattgagaccactaacattgttgcccagaccgcagaaggggatcccaacaactgcgtcatgctgggtggtcatagtgacagtgttgcagagggccctggcatcaacgatgatggatctggttctcttactctccttgaagtcgctactcaactcacacactaccacgtcaacaattgcgttcgttttgcttggtgggcaagcgaggaggaaggactcctcgggtcggactactatgtctctgtcctttcccccgaagaaaatctgaaggtccgtctcttcatagactacgacatgcttgcgtgcgccaactttgcttaccaagtttacaacgccaccaatgcattg

SEQ ID NO: 98986 - DNA, 697 bp, Zea mays
  Clone ID: MRT4577_21788C.1
gtccaccggaccggcggcagctgaagcctgagagcgccacgacgatgatggccgcagcgagaatggccttcgcatcaagctgtcgcgtccacctcctcctcccttcctcaccttcaacccccatcctcgccaggccccgagttggcttcaggggcatagccaaatccatctcgttcttggcaccgttatcggctgctagatccgccgccctcttctgctcttgctcctcgccttcctccgacgccgtcgtcgcaccggcacctacgaaggcggccgtagaggagaagaagccggcgcccgcagttggggaggaggagaaaggcgaggttccggtgggcgagctcgctggcctcctggacatccgggtggggcgggtcgtcaaggcgtggctgcacccggaggcggatactctgtgcgtggaggaggtcgacgtcggcgaggagcagccgcgcaccatctgcagcggcctcgtcaagtacttacccctcgaccaactccaggacagcaatgtcattgttcttgctaacctgaaaccaagaaacatgcgcggcatcaagtctagtggcatgcttatgtgtgcctctgatgcttctcacgagactgttgagttgcttacccctccagaaggttctgttcccggtgaaagggtatggtttggatctgaagatgaaaagagtattcaatcagaacctgcaac

SEQ ID NO: 98987 - DNA, 284 bp, Zea mays
  Clone ID: MRT4577_21789C.1
cccacgcgtctgtcctgctgtacagccagacatacggacatgtagccaggatgcggcggcgaaaactcgatcagagtctgatgccaacacccggattgcagcggctggcttcttgccacgacgcttggtatacttcaagatcatactaacctaagaacgcaatgtccctttcaaagtgttcagcgtgcccgatgcggcaccctttaccgcggtgttaaaggactgccgggtaggtatcattgatcccgtgtcaatatccctgccatcattacctactatggata

SEQ ID NO: 98988 - DNA, 1203 bp, Zea mays
  Clone ID: MRT4577_2178C.1
atggatcctaagggaaaggggatgatggtcaatgacaaagagaaggagtccatcttcaatgagccaagagataacaagcccactgactctggctcgagtcacaagaagaaggacgggaagaagaagaggcgcatcaagaagatcatttactacgacagcgacgcctcctcttcttcaccaagagacgacgacgacgatgactcgtcgaaaaagaaactggtgagcggcttagacaacgccaggcaaatctgggacaccctcaagatatctcatgagggaaacggcatcaccatgatcaccaaaatggagttggtggaaggcgagctagggagatttgcgatgatcaggggagaggagccaacacaaacctacaacgggctcaagaccctggtcaacaagattagaagctatggaagcacaagatggacggaccacgacgtcgtccgacttatgctaaggtcattcacggtaattgacccccatcttgtaaacctcattcgtgaaaatcccaggtacaccaaaatgacacccgaggagatactcagaaaattcgtgggcgggcgtatgatggtaaaggaagcacgatatgtggatgatgctcttaatggccctctacccgtctacgagcctcaacccgttgctctcaaagcaacaagcagcagggaggcgctaccaagcaaggtggcaaaagttgaggctgccgggctaaacgaagatgagatggccctaatcatcaagcacttcaagaccgcactaaaaggacgcaaggagtaccccaacaagaacaaagcaaggggaaagcgctcctgtttcaaatacggactggcagccttggccttgaacaagttttcgctcttccccaatgaacgccacacttgcctcatggccaaggagaagaaggatagacttttagaaaagcaagaggatattttgtatgaagagcatgataaatttgttagcgttcaaaaatctcttgctctagaaattaagagaaatgaaatgttatcctctgaattgtctgtgtgccatgaatcaatctctagtttaaagattttgaatgatgatttaaatgctaagctagaggaagctaatactactagatcttgtgtagaacatgtagttatttgcaatagatgcaaagattttgatattgatgcttgtgatgatcatcttgcgtccatttctaaattaaatgatgaggtg

SEQ ID NO: 98989 - DNA, 372 bp, Zea mays
  Clone ID: MRT4577_21790C.1
gggccaggattgcacaaaacccgtttttgggggggggaagcaaaacggggggaaagacgtttcggcaggaaagggtaaaagggggggggcggggcgggacacgtggagggagaaaacactttcactggggggaatttaaaacccgcaggggttgcaagaacccaagcattttggggagggcggggggcacaaaccccttggccacatggggggggcgaaaacggtccctccacccgggcaaaaaaggggttcgggccggggaaaaaagccccctccccaaaattctggcgaggggcccaaaacaaccgagggaccccccgaaaaaggggtccacaaaacccattttttcccccccaaaaaaaggcccccccc

SEQ ID NO: 98990 - DNA, 236 bp, Zea mays
  Clone ID: MRT4577_21791C.1
agaacagctgaacctttttttttaagattttaagtaaggcgctcgatgccggaattaaagggacatcttccccgtttttttagctttcaaactatttacacgaaaactggattactgaccttttaccttcgccactaaagtctgctggtccacctttttgttgcctggggaactatgcccatctggacctgttctgaactgccttcctccgactcagttttttggttgccaaactg

SEQ ID NO: 98991 - DNA, 271 bp, Zea mays
  Clone ID: MRT4577_21792C.1
catttcaaccttcttaagcactgcgacacggccatgaaaggggttcgctatgatttcaagacgaccagaccaaggatccctgacatccccacctactttatacaatcataacccttataaacaaaacgtccacatccaatttaaaggtcaacgtaaaaaaaaaaacactttaaatatcaaccattgccgcaagaccaatacaaacctagcccagtattctacctcctaagaatgtgctgcagctcatgctacattaatgttgactggagca

SEQ ID NO: 98992 - DNA, 232 bp, Zea mays
  Clone ID: MRT4577_21793C.1
gggacatcccgatggtgcagccgctattaaaggttcgtttgttcaacgattaaagtcctacgtgatctgagttcagaccggagtaatccaggtcggtttctatctacttcaaattcctccctgtacgaaaggacaagagaaataaggcctacttcacaaagcgccttcccccgtaaatgatatcatctcaacttagtattatacccacacccacccaagaacagggtttaaa

SEQ ID NO: 98993 - DNA, 971 bp, Zea mays
  Clone ID: MRT4577_21794C.1
aggcgtcccgaaaccaaagttattggtggtcgtcccacactcccgcccctaccaacgctctgcgccaacgaacgcgtccgcaagtcaaaccaggcccggagccaccagcaaccaaccgagcgcatggaggccgcggcggcgaccgcgctcccgttcgcggcggctaccgcgctcccgttcgcggcggccgtccccactgcctggagggtgcgcgcgagcccgcggacgcggcggcgctccgtggcggcgaagctggagcgcgggctcggcaagggggttcccaccaccaactacgtggtgccgctcgacaaggccaccgggatgacgcgcccgctcgtcgagatcctgcgggacctcaacaagcgcgtccccgacaagatcatcgaccccgacactaacaccgtcaactggtaccatgccaacagaatgcttagcttttacgcaccaggttggtgtggagaagttcgtgatgttatctattctgagaatggaactgtaaccgtggtatatcgagtgatacttaaaggaactgatggagaggcatacagagatgccacgggcacagcacagttacatgaggggcgcagggaagatgctgttgcagccgcagaggaagctgcattctgcaaagcctgcgcacggttcggttttggcctgtacctgtaccaccaggatgattctcattacgacgaccacttccattgaggctcagtctgcatcagagttgatcataagctgcaacatgcgtcggatatgcccctggaaaaacttcgcatccagaatcaatttttgctctttgtgtagtatcatactcataacacagagaagtgaacctatgtagatactattcgaaaccttctttttattaatattagaattcttattaatattattgtataattattttttaatgtatatgtgttggacacaatctattgattgatctatattctggcagtctactaagaata

SEQ ID NO: 98994 - DNA, 280 bp, Zea mays
  Clone ID: MRT4577_21795C.1
ccggccgtatgccgggaaagaaaaagctgcctcgcctccactttcgggcttaacgcatatcgggcgcagccactactattgcttccctctcaggcagcgcctgcaattctgacagagcgattcatgaaacatgcgcggacatagacaaccctgagatgcgcgatcagctgtctgcccagccacaggggaaggaccccgcctagacaaataagcagccggcatttcgcgctccaagtgcaggccagtgccccccattatgccagataccatgcggacctca

SEQ ID NO: 98995 - DNA, 375 bp, Zea mays
  Clone ID: MRT4577_21796C.1
aagaaaaacaccgcctttacggggcatctaaagaaaacaaaaacaggggggggggtatatccaaaaaaaacaaacgggatacaggggggggacaaaccccatcaccacaggtaaaaacttttaaaacacctatataaccaaccccccgggaggggaaaacacaaaggaaaaaaccgccggggcccccattggggggaaaaggtaaaattaaaaaacattggcccctggggggtctggaaaaaacgaccaaaaagcttggaaaagggcactgggtaaggggacaacattcaagaaacccgaaaatggggacaaaccccatccccacaggtaaaaacttttaaaacacctaaaaaaccaaccccccggacccggggg

SEQ ID NO: 98996 - DNA, 681 bp, Zea mays
  Clone ID: MRT4577_21797C.1
gtttcttttccaactccccccggcatcccacactcatatcagacgcgcgccgccgactcgctggtccgccgccgactggctggtatgccgcttccctcctcctgctgtcgtcgtcgcgcaggctcatcatggtccacaatagactccgccgcgcagtatgctgcctctctctcacggtctcgcttgcatcgtcgtagaagacggctcgtgcctagtctggggcacggcgctcccacgctgtctgatctggcgccgcctctctccatgactcgtgggattcaagctaggcacctacaagatgtgatggttcaagccgggcgccttcaagctggtggccttcaagaactcatttcatagtgtttttttcagagattgtatagagtagtccctgaagctatttcaacatggaagtgattgtgtgagtgaatgatttatgtgtacagatttcaaattcctggcatgtgtgtactacctaattgttgaagtgatgttttagtgaattgtgtgagtgaataatttatgtgtacagattttagattactagtatgtgtgtactacctaacttccacaggtcggctactacctgattgctgaagggatgcatcagtgaatgggttgtaaccagaaaatatatcaacgagtggcttgttttcaggaaatgaaaagagaaagaggtggggg

SEQ ID NO: 98997 - DNA, 169 bp, Zea mays
  Clone ID: MRT4577_21798C.1
gtgtcactaagacgcattatatggggtgcatcgagggatcacacatcgaacataggggaatgacttaatgggacatattcattctaaacaacttactgatttcgcggataacttaggctttacctaggcgcgcatgctaaattagcgatctatcaaaatgtcacgggaa

SEQ ID NO: 98998 - DNA, 258 bp, Zea mays
  Clone ID: MRT4577_21799C.1
gtttccagctattacctgactaatgcagatgagctgcagataaaaatggctcagggtgccaagcctggtgaaggtggtgaacttccaggccacaaggttattggtgacattgctgtcacaagacactccacagctggtgtaggactgatcagtccacctccgcatcatgatatttattcgattgaggatcttgcgcactgtatacatgaccttaagaattcaaatcctggagcccgcatcagtgtcaaactagtttct

SEQ ID NO: 98999 - DNA, 386 bp, Zea mays
  Clone ID: MRT4577_2179C.1
tagcttacaagaacaagaaacaaactgagggtgatggcagttgtgctacagaattggaaaaagaaaaagaagaaagtcgaagcagaagaagctgacatgaacaagaaacaaactgaggctgatggcagtggtgctacagaattggaaaaagaaaaagaagaaagtcgaagcagaagaagctgacaagaacaagaaacaaactgaggctgatggcagtggtgctacagaattggaaaaagaaaaagaagaaagtcgaagcagaagaagctgacaagaacaagaaacaaactgaggctgatggcagttgtgctacaaaattggaaaaagaaaaagaagaaagtcgaagcataagaagctgtctagaacaagaaacatactgaggctga

SEQ ID NO: 99000 - DNA, 346 bp, Zea mays
  Clone ID: MRT4577_217C.1
aaacaataacgccaaacttaataacccagtagcaaagcgggggaataaagtcttacaacgtaagttgtaaaccacacaacgactgattgataagaaccgacagaaacataacacgataggagccactcagggtagatcacaggatagtagtggcacacaagcccgactacgccgtgccagtagagcgtctagtactcgtcacccttgtcgccgtcctcaccctcgtcaaacttagtaccgaccttcttgtagtcctttttaagcgccgtcagatccttacgagccttggagaactcggtctccttcatacccttaccgatgtaccagagcactaaggcgcgcttgg

SEQ ID NO: 99001 - DNA, 268 bp, Zea mays
  Clone ID: MRT4577_21800C.1
ccgaaccggactgcccgggtcgacggacgcgtacattgacgcttgggcggacgcatgtgtatacgtttgggcggacgcgtgggcgtggggccgccggggacgcatcagcgggagactcgccaaggagagcccgcaaggaggcgactatgagggccaagtggaagaagaagcgcatgatgaggctgaagaggaagcgttgaatgatgaggcagatatccaagtaggctgatggggattgtggatggtggtgtctgcatagttgttttac

SEQ ID NO: 99002 - DNA, 267 bp, Zea mays
  Clone ID: MRT4577_21801C.1
gatagaagcgaacattctcgcgtatgcgacctcaggaatccgctcattcgtaacccagatgcacttcacggggcctcgatgaacacagacgtcaacggcgcgacgttggggccagttaagttaaaccgtgtgaagtctatcatggtttcgacatctcgaggactcgggcttaagtacgaaatgttcgcgctgccaagcgattgcacagactagtcgacgctcgggacactctcctgtagcggaacgctatgcccagcgggtatcgcg

SEQ ID NO: 99003 - DNA, 1708 bp, Zea mays
  Clone ID: MRT4577_21802C.1
tctctcatggccatggagaacactgcgccatgcggtgacttcgggaagatcgtggccgatcttgagtctgagaacttggtggctaacgtctctgccgtgaatcaagcctcggcgttgattgctggaggtaaaatccctgaaccccagcttctgtgccgcctgatcgctggtcttgcttccaatctggagaagcctgaccatgactctgccatcaagaggtgtgtttcctttactctaaaggcaatcagggtggccgtcatcaagaaccgcatgaacatggattcctcagctcgtggtgaggctctccatgccatctggtgttgttttatggatcaaggccttcgccgtattcagcgtgattcaaatatggtgaggctgtggacagtccaggatcaactgtctgcagtcaaaatcatatgtactttcttccgtctctcaccggtaaacatcagtgacacaaggtgtgtcacagccttcgcctcactgatgttgtcaccgtacagcactgtggtgtgtgcatgtgcagatgccctgctctctttgccccctgttgttccaggattttcatttgccattgcaagagcctattgccatatgcttgcaacagtgtcaccacaatcaccacttgaggtaagcagcatggttgcgatgcttggtaggctgaagcaagtaagtacgaccatggtccaccacccagggtttagtgaccttgctgtggatgtcctagcagctttatcaaattgcaatcttgctgttcgaaagaatcttctgaacctgatggtgaggctcctcactccaaggaacatcagtgctgtgctattgctccttgataatgagctgaatagggctgctaacatccatatcgagtaccacaagatgctagaggaggcgatcagagaatgccatgctgcttttccggggtgtattgtagaattcacactagatcccaagtacagtgtgttcattgatagtattctgtacatcatagacatcatgaatcccgaccagtcgttgcgaggcccacttctgaaaggtctactaagggcgctccggcatgtgaagtcaccactggtatgcgccgctgctgtttgggccatctcaatgttctctggatcactggaagaggtcagtgatgccattgttgcactttcatgcttcttcaaggacctgcttgatcgacgtaagattgagaagctgatacttggaggagaagcggagaatcaatacaagctttctactgactattatggtgtcactgccggagatgcaacacagggaaagcaccagcagccatggctgatggagatggaggaactgctgtttgtgcgcatagggctcacacggcaagcaggtgggagctatgccattccttcgagttccaagagcagtgctagttcttcaaacgcgtatcttcctgagccattgggtaatacagacaatctgatcttcctcgtgcattctggagatgccctcttggcagatttcgtggaaatcatgctgtctaacctcaagaagaaggtcaaagagctggagtgatgctgatgagttcatttgatgtaataatttggaggtcaaataactagaaatggagtcgttgaaccttggccaatcgtacctcaatatgcataataatgctgtcttctgtgtgcttattacttctattattactatattatcactgaactttttctattcaaaaaaaaaaaca

SEQ ID NO: 99004 - DNA, 804 bp, Zea mays
  Clone ID: MRT4577_21803C.1
aagcttatgttatagtatatgcactgttgcacatttatacaagatatatcgtacgtattgatacccgacatatgatgtgctacttttttagtgtactcacacatacacacacaactttctgttcagctgtacacattgcaaccacacggatcgttaaagaaacaactaaaccatgcatgtatatatatgctagttagtgtgctgataatgattctttgtgaagtcaaaaacacagaacagcacaagcgccagtgccgctctgaaggccgcttcattaaacaactactactattcaaacattatattcgcgcgtctgcatgtggaccctagctagctgctagctatgttctgccgctctagtgatagcgccatttgagggatgaaatgtgaatatgtgatgaatgggacctagaaaaattgaggggaaactaagagatcgaatataataatggatgatgaaagtctccacacagcaggccgctgcacaagtgagacaataatcatgattacttgttaagcaggatcacaagcatctagaaatttatgtcaatgtgacctcatgcatagcactcaaatcagcatgcagacggtagaagtctgaacatgcatgcatcctgaatatatatgaacaaaaatatcgtatatctatatcgtctgaatatatatgcaaattaaattaactttttttcttgaagtgaaatgatatatgttttctttatatgtacgtatactccctcctaattaacatggatcctacaagtcccttagacctctctcttatatatgccagtaaacaataacaat

SEQ ID NO: 99005 - DNA, 373 bp, Zea mays
  Clone ID: MRT4577_21804C.1
actccttccgaacccgggggccaaccccaaaaatcaaaccggaccctaaaagggacccaactttccaaaaaagaaaactaataaaaacagggccaaaacaagggaaaaaaaaattccccgggaaaaaatgtaatgcaagaaaaattccacacaaaatacaagccggaaacaaaaaagaaaaacccgggggggcctaataagcgaaccaccccaaaataattgcattgccctaacaggccgctttcaaaaggaaaaacctttcagcccacctgaaaaaaaaaaactaccaccccccgggaaaaggccgatcaaacacagggccccaaggagccctttcttttccccaacaaaacgggaaacaagttatggccct

SEQ ID NO: 99006 - DNA, 174 bp, Zea mays
  Clone ID: MRT4577_21805C.1
gcgggaacacgtcgtgaccagactcgattggaaggaaagatatgaagggcacgctcaagggtcgctacgagggtgacaaggccacgggcgccaccagcctcgccgcccgcgccggggaccacgagatcacgtcacatggtggccaccgcgcctcggacttccatggactcgttc

SEQ ID NO: 99007 - DNA, 143 bp, Zea mays
  Clone ID: MRT4577_21806C.1
gcggaaaagatggtttccttggcgaaaacgacttcatctttttttagaagaccaaagacactactggcctctgtgcgtcctttttataataatatcctgaagttctttaactacaagtacttcttttaaaaacacatgcatgc

SEQ ID NO: 99008 - DNA, 215 bp, Zea mays
  Clone ID: MRT4577_21807C.1
acaaaacgaacatactaaacaagtcttatggcaggaagaatccattgacttcggcgcgatattctccgcccatggtggcgcttatcttcaaatggctataaagatagcgacaacgttagattatcgcaagataaccgccgtattactgcggctgctatgggaataccccgacatgacagctatacaacatctatggcatgagctccgctcctcca

SEQ ID NO: 99009 - DNA, 313 bp, Zea mays
  unsure (1)..(313): unsure at all n locations
  Clone ID: MRT4577_21808C.1
cggncgccagggngctggaaaaaaccctttcaaaaaaaatcttttcaattttaaaataaaaataactaaaaaatttattaaataaaaaagaaattttttaaaaaaaattaaaatcccctaaaaagctttgcccttaaccgacctaaaacataccactctaagaacgaatactgcaaatttccatcacactgtcggacagttcgagcatacttctataaggcccaaatcgccctatattgaatcatataccaattcacagaccatcaatttacaacgtaaatactagaaaaaccctaacattacccaaactaaa

SEQ ID NO: 99010 - DNA, 269 bp, Zea mays
  Clone ID: MRT4577_21809C.1
gtatctaccttttggaggggaggtctttcaatatactcaaacctcttttaggtttacaacttttggacaacctgcatggtttcaacccataccattacctgaggaacctcaaaacccaaccacttaggaatgccctacgggcacacaaaaaggaggctcaagctaccaaaaagcggatataaaaaacaactaaaggcgccccccctaaagagtagcccgctgaaaaacccagacttatgctcgaccaacatggagctgttacacaccct

SEQ ID NO: 99011 - DNA, 5124 bp, Zea mays
  Clone ID: MRT4577_2180C.1
tcaatccaagttccgcgaatctaagatattgagctcactacgcagcctgcaaaaggtcttctcatctagaggcttggtaaagatatcggctagctggttctcggtgctaacatgaaacactttgatatcccccttttgctggtggtctctcaaaaagtgatgccggatgtcaatgtgctttgtgcggctgtgctcaacaggattttccgctattcggatagcactctcattatcacataggagtgggactttgctcagattgtagccaaagtcccggagggtttgcctcatccaaagtagttgcgcgcaacactgtcctgcggcaacgtactcggcctcagcggtggatagggcaacggaagtttgtttcttagaattccatgacaccagggaccttcctaagaattggcacgtccccgatgtactcttcctatcgaccttacatccagcatagtcggaatctgagtacccaatcaagtcaaagttagacccctttggataccagatcccgaagcaaggcgtagcgactcctttgttgaggtcggtgtgtctgtcagttcccatcggcgtctttgcgggcttggcatccttcatcccaaaccgctttagaaagtcttgcgtgtacttcgtttgggagatgaaagtgtcgtccttgagttgcttcacttggaacccaaggaagtagttcaactcgcccatcatcgacatctcgaatttctgcgtcatcaccctgctaaactcttcacaagacttttgattagtagaaccaaatattatgtcatcgacataaacttggcatacaaaaagatcaccatcgcaagtcttagtaaaaagagttggatcggctttcccgaccttgaaagcattagcaattaaaaagtctctaaggcattcataccatgctcttggggcttgcttaagtccatagagcgccttagagagcttacacacgtggtcggggtaccgttcatcctcgaagccagggggttgctccacgtacacctcctctgcgacttgggcataaccttttgccacaagccgagccttgttccttgtcaccaccccgtgctcgtcttgtttgttgcggaacacccacttggttcccacaacattttgcttggggcgaggcaccagtgtccaaacttcattgtgcttgaaattgttgagttcctcctgcatggccaacacccagtccagatctagcaaggcctcttctaccctaaaaggctcaatagaagagacaaaagagtaatgctcacaaaaattaactaatcttgaacgagtagttactcccttgctaatatcacccagtatttggtcgacgtgatgatccctttggatcgtcgctcgaacttgggttggaggtgcctgaggtgcttcttcctcttcaacttgaacatcctgtgctcccccttgatcatgtgcctccacttgaggtacctgtttgtcatcttgggttgggggatgcaccatagttgaggaagacggttgatcttgctccaaatgttcctgaggccgtacatctccaatcgccatggtgcgtattgcggctgttggaacgtcttcttcatctacatcatcaagatcaacaacttgctctcttggagagccattagtctcatcaaatacaacgtcgctagaaacttcaaccaaacccgatgatttgttgaagaccctatacgcctttgtatttgaatcataacctaatagaaacccttctacagctttgggagcaaatttggaattcctacccttcttcacagtcagcagctcatatgaagtcttcttgaggaggcggtgaaggtagaccctgttgatggtgtggcaagccgtgttcacggcttccgaccaaaagcactcgggggtcttgaactctccaagcatagtcctcgccatatctatgagtgtcctgttcttcctctctaccacaccattttgctgaggtgtgtagggagcggagaactcgtgcttgatcccctcctcctcaaggaactcctccacttgaagattcttgaattcggacccgttgtcgctccttatcttctttaccttgagctcaaactcattttgagctctcctgaggaagcgcttgagggtcccttgggtttcagacttatcctgcaaaaagaacacccaagtgaagcgggaaaagtcatcaacaataactagaccatacttacttcctcctatgctcagataggcgacgggtccgaagaggtccatatgcagcagctccagaggtcttgacgtggtcatcacattcttgctgtgatgtgctcctctcacttgtttacctgcttgacaagctgcacaaggtctatctttttcgaaatgaacattggttagacctatcacgtgttctccctttagaagcttgtggaggttcttcatccccacatgtgctaagcggcgatgccacaaccagcccatgcaagtcttagccattaagcatgcatctagaccgacctcttcttttgcaaaatcaactaagtaaagtttgccatctagtacacccttaaaagctaatgaaccatcacatcttctaaagacagacacatctacatttgtaaataaacagttatatcccatattacataattgactaacagatagtaaattatatccaagactctccactaaaaacacattagagatagaatgctcatttgatattgcaatcttgcctaaacctttcaccttgccttggttcccatcaccgaatatgattgaatcttgggaatccttattcttgacgtaggaggtgaacatcttcttctcccccgtcatatggtttgtgcatccgctgtcgataatccagcttgaacccccggatgcataaacccaactcttgttgggtcctacaaggttagtcacaatttccttagggacccaaatgcaagttttatcacccttgcattttgcccctaatttcctagcaactatcttcctatcctttctacaaatagcaaaggaagcattcaaggcatgataaattgtagagggaccattcataactttcctaggagcatgagcaaaattctttctaggcacatgatgaatatttttcctaggcatatctctacaatgcatataggaagaactagaagcatacatagcataagaatcataggcatgtgaatcaagagcattacaactcctatgagactgtcttctattattgtacataaaagcatggttctttttagtactacttgccataggggccttccctttctccttggcggagatgggagccttatggcttgttaagtccttggcttccctcttgaagccaagtccatccttaattgaggggtgtctaccaatcgtgtaggcatcccttgcaaattttagcttatcgaaatcacttttgctagtcttaagttgggcattaagactagctacttcatcatttaatctcgaaattgaaactaggtgtccattacaggcatcaatatcaaaattcttacacctagtgcaaatcataacatgttctacacaagaattagatttatttgctacttctaatttagcatttaaatcattgttaacactttgtaaagtagaaatggtttcatgacacgtagatagttcataagaaagcatttcatttcttttaacttctaaagcatatgatttttgtgcctctacaaatttgtcatgttcatcatacaacaaatcctcttgcttttctaaaagcctatccttttcattcaaggcatcaatcaattcattgattttatcaattttatttctatccaatcccttgaacaagctagagtaatctatttcctcatcactagattcgtcttcacttgaagaagcataagtagagtctcgagtacataccttcttctcccttgccatgaggcatgtgtgacgctcgttggggaagagggatgacttgttgaaggcggtggcggcgagtccttcattgtcggagtcggacgaggagcagtctgaatcccattccttgccaagatgagcctcgccctttgccttcttataattcttcttcttctccctcttgttcccttggtcctgatcactatcattgtcgggacagttagcaataaaatgaccaagcttaccgcatttgaagcatgagcgcttccccttggctttagtcttgcttggttgtcccttgcgacccttaagcgccgtcttgaatcttttgatgatgagggccatctcttcatcattaagtccggctgcctcaatttgtgccaccttactaggtagcgcctccttgcttcttgttgccttgagagcaaggggttgcggctcgttgatcggaccattcaaggcgtcgtccacgtacctcgcctccttgatcatcatccgcccgctaacgaattttccaaggacttcttcgggcgacattttggtgtacctgggattctcacgaatattatttaccaaatgaggatcaagaacggtaaaggaccttagcatcagtcggacgacgtcgtggtccgtccatcgcgtgcttccgtagctccttattttgttgataagggtcttgagtcggttgtatgtttgtgtcggctcctcgccccttatcatcgcgaaccgtccaagctcgccctccaccaactccattttgtggtattcatccctacacaatgaagctagaagaacagtagtagcttgtgcattcttatgaatttgttcattaatgaacatgggactatccgaactatcaaagtgcattccactctctacaatctcccatatactaggatggagagagaacaagtgactacgcattttgtgactccaaaatccgtagtcctctccatcaaaatgaggaggtttaccaagtggaatagataataaatgagcatttgcactttgaggaatacgcgaataatcgaaagaaaagttcgagttaaccgtctttcgtttgtcgtagtcgttgtcgtcgttgtccttgtgggaagaagtggactcatcactatcgtcgtagtagacgatctccttaatgcgccttgtcttcttcttcttcccatcttttcgtctatgacccgagcccgagtcggtaggcttgtcatcctttggctcgttgacgaaagactccttctctttatcgttgatcacgatacccttccccttaggatccat

SEQ ID NO: 99012 - DNA, 340 bp, Zea mays
  unsure (1)..(340): unsure at all n locations
  Clone ID: MRT4577_21810C.1
aaccaacacaaattggacgcaagaaatccgatcagaggcccaccaccggggaattaatggcggcctggagtagcacgagtccatcgccgtattatgctggcaggcgtcgccctgctttaagagattatgggtggcagcatcagcgccgggaccttctgtgtgccggggagggacatgccacacaagccgcttaatagctgcacgcttgaccatgccagccggacctgcnggatgcgccacccctacgagcgacggagctgaaagaagatgctgtcgggcgctggcggacatcccggcgtactgacggggcgcggggcttagaatactcatggacagggcg

SEQ ID NO: 99013 - DNA, 1767 bp, Zea mays
  unsure (1)..(1767): unsure at all n locations
  Clone ID: MRT4577_21811C.1
ggccgcttttttttttttttttttagttgaaggaaggcgattcaaactttctattttcagcaccacactaggtataggaagagaaagaattacctggccaaatttaaggtggaggatcgtatctgagtcagacaattgaaatcgtgaaaatttccgtagctaaactaatttccgtcactttgtattcattcaactacaagtacttcaaggctcaagcgctctttgttatattatatacaaggtcgtgtatcaatccatggagtgtctcagtgtctgtggccccaccttcagttggtgcagagattggacggaaacccaataactcttattcattaggtttacttcaatttgcacgattcttcacattccagaacgacgacatcattcaggatctgaagatgaggctcttgcagcttggagcatttccacaattagtgtcttaacatccttcctgtcttgcgcctgtcttgggaaggggattctcaacttcagaacacttccatcataaccagccttcacattaaaaccaaggctgtccacgtccagcatataagcaaaatccaccttgatatatattaatacatcccctacccaattagggttagggttttcagtcttccaacagttacattcatttgtaaactagtttgcaattttgaatgagtggctggctgttttcccaggcaagaattgcacagttgcacgcagatctagccctggatgatgtatctacttttgcacctgtggattgacaagacttgacagtagtggagtgttgcacaatgagctttgtatcattggcatgatccttgttcatatggcttgtgataggagttgagaattgagatattggatcaacttttgcttccttatactctgcaacattgaattctccagaaccaaggagagcagttgcaacgccagatacatagcgcacagctttaggtttgatgtgcaggaaactgaagtcaccaaagtcaacccagaaagcatcagggtgcctgcgtaggtaagcacttctcactgaatctttttcttcgtcagaaacaggaacagcgtcgccatatacagtgattacagtatcagttctgtcctcaggatctttggcaacaagaagtgagcatttaggatttccagagagattctttgaatggactgctaaactactcactgctaatatggggtaaccatcctgatcacatgcaaaatcaaccattgaaccagatggataaccagcatgatcctgagaatgggtagcaagaacacatctgacacttcggtccataatggtccgtatttcttcaactggagaaagacgaacagcttttgcctggtgaacgcggatcacctcgaacgcgtcagaggagccaccggcggcgtcggcaggcgccgccatctgaggcgaggaggaggaggaggaggccgcgaagaatcggctgcggcggttgcggaggcgagggtataggaggggggaggcggggacgtgaccgtgctggtggttatgccggccattagtaatttgtaggtggagcggaagcagtaggcgcgagagcgttgacggtgagggcaccgcccgagcgcccggcgtgagcaggaagggcatcgttgcgtggcgccacggagcgcggctcggtgtcggagagcctcgctggccgctttgtggtcgcttcgctcggcacggcacggcaagctgcgaccgcgatgctgcgctgcctgtggcccttccttcctgtgcacacggtcggaggggcagaatagtgagtnccg

SEQ ID NO: 99014 - DNA, 1272 bp, Zea mays
  Clone ID: MRT4577_21812C.1
cattgggtacctcgaggccggccggggaaactgccgcgtcccatttttccagccgccgcttcagggcttccttcagacctgcgccgccgcctccatttctccaagccgccgcctcaccaggcttcctcggacctgcaccgccgcctccaatccaagccatcgtctccaggtctctcccaggcctgcgtcgtccccaggtcccccaggcctgcgtcgtccccaggtcccccaggacctgcaccgccgtctcccccaggcctgcgtcgtcctcggacctgcaccgccgccgatctgttgccgtgagccgctggtttccctcgccgtgagtcgttgtctccctgtagccccagcgccgtcccctgtgtcgctctgtgtcgctcccaacatgcgaggaaccgggaaggaagacaaggctgggaaaattgagattagagcagattggaatgaaggaagaacatggttttttgtgagcatcctcaaagagtacaactcaccaagataatctgtccacatagcctgtgcaatctgatttcttttgaaattccctgcacgccttcgttcattgcatgacatcacatcttcaatgtagttttcatctccttctggaatatccactatgtcgccaggattaacttgcatgttatcttcattaagccattgttcacaaccatcattgattttaatgaaattgtgtagtacacaaccagccagtacaatatctctttgagtctctatagaataataagaagcacatttgagaatagggaaacacattttgagcacaccaataatgcgttcaacatggttccgtagttgggcatgtcgtaggttgaacaactcctttgcattgcttggccttagattacttctagcttgctcttgcaaatgatatcgaacattatgatatggagctataaaattaggagtatttgcatatcctgcatcaactaaataaaatttgctattgaagtcacacgccaccattacattctgtgatagaccaccctttctatttcgatatgggtcttgcaagctaggagatatagtaataggaacatgagtaccgtcgatcgctccaatacaatccttaaagtatggcataaacttggggttgctagatataacaactggggtattgattggaggcagttgtatcatccttatgtccttgtaaaagttcttcgacatgtttttccccgaaaggattgaagtgtggataggtgtacgctcatgagaatgatttccttctaaccattggctgataatttccat

SEQ ID NO: 99015 - DNA, 279 bp, Zea mays
  Clone ID: MRT4577_21813C.1
aaaaaaaaaagggtttttaataccaaaggggccgggggatcccacgcccccgtgggcccgggcgttttaacccggtgcctttagggcccctggcccgacccgacccggcaaaaaatttgtcccgcccccttttttttgcaaaaatttttacaaggggggctgttttaaccagggccccttttttccaaaattacaagtctttttggaagacctggcggttttttaaccccggccccacccctttaagggtggggggggggccccgccggggctttttct

SEQ ID NO: 99016 - DNA, 179 bp, Zea mays
  Clone ID: MRT4577_21814C.1
gccatcaagccacattttttagactcaaatgggctcataactcatagatacaatggtaattataccctggagaccctgttacgagcgggtaaatactaatgttttggctcgcacgcacactctctatttcttaaacaccgttctttccaacgggtgaggtttaggccctctgtggccca

SEQ ID NO: 99017 - DNA, 318 bp, Zea mays
  Clone ID: MRT4577_21815C.1
ccgggtgggcggccgtcgctgggctcgggttccgaggcgccgtgcttgggaccatcttcgccgcgcactattttgtccgtcggaggtggttgctccagttccacgtcgtgcagcgacctctattctatggattaaagatgggtctcctaccatctggaaacagggctctaaagttatcaatccatgccttcttgcttttccatttcctagttttctttcttccctggcaattcagaaagggaggttctgttggaagccaaatacttactgaaatcagtattttaatagtgactgctggtgtttccttctgtttggaaa

SEQ ID NO: 99018 - DNA, 180 bp, Zea mays
  Clone ID: MRT4577_21816C.1
acatgcccgaggggcaaccctatcatctgaatgaagttgagacagaaatacctaatgtggagtgacaatagagagacccatctatctacagattctattggttgaatagacctttcttaatgcaaatacaaggtacttagatataatcaggaaactaaagagggactctttttggattgg

SEQ ID NO: 99019 - DNA, 256 bp, Zea mays
  Clone ID: MRT4577_21817C.1
gatgttctccatagagctgtcacacgagcgtgcataggccatagcagccgtcaaaccgaatcaactgacttgttcgcagatgagaggcatccagtccctggaacaaaggctcttggggcgacagtcagctaaagacaccacgtacacctgttctttctgtacgacggaggatagcccagatctttactagcatgtacactgggactgactggaaagtgcatagagctatctctcggtaaagctaggcgggcccaac

SEQ ID NO: 99020 - DNA, 215 bp, Zea mays
  Clone ID: MRT4577_21818C.1
gccactcgttcgctcctgcttctcccccctcctgcctcttcgtgcagattcatggtggcgaaggtacggagacggacaaggctgtgttcctcctaccctgataacacgatggtgtttattgtatccgttgtatacgcgctcactaaatgagccccaccgtccaatgccgattgatgccagaaagtgtcacacgagtacccgcctcatcctttttc

SEQ ID NO: 99021 - DNA, 268 bp, Zea mays
  Clone ID: MRT4577_21819C.1
gcagcctttcacgtcgacatcaaccacggccacgtccagaagcgccaaaaagaggattttcccaaaccgtgattgccacctctgacgaagtcttcggtatcgtgtacagaaggtgactgcgacgtcgtggcatcaccagtactgaggttgtccgcgacgatgagggcgggatcacgatgtttgggatagtatacaccaggaataagggcaagcgatcccaggtcagccctctgctgctcccgcaagatccagaggcccgtgtgacctc

SEQ ID NO: 99022 - DNA, 383 bp, Zea mays
  Clone ID: MRT4577_2181C.1
attcggctcgagggcaggtcacggatgtttttgcccggtaacgtcaccgatgatgaagaacacccttctcacactaatcatcggaggcacacagacaggctccatggctggcctcctgagccattatctgtaactctggatacacgtaaagggattcacaaactcaagaacctgcgcaggcacacatacctgcataccagggcgttgcacctaatgacatgcaccgcttggaccactgaactaaaactcaatgcaaacaaagtagcatctgggtataagcacactatgagaagcaaggagaccacacatgtctagcctaaagcaaaaagactaaagtctggcgagaggtattcagttaccacatccaagagaggaaagctgac

SEQ ID NO: 99023 - DNA, 446 bp, Zea mays
  Clone ID: MRT4577_21820C.1
gtcatgatagttttggaatggcttgatggtttcgtgggtatcactttcctagttatgagtgagacatagtatttatccctttttaggtctttataccattgacatagctacccaagtaataggaggtgcttggtgttccctatatggatataatgttcagaaaaattattgttagttatactaatttcttatgtatgtcacataagcgatctttttatccggtgtcatattatcttaatgattggccagaactatgctgtgtacagaaaagtgtgatgtattgttacaaaagttttgacatcttaaaacttagtgaaatgaggtcgtaactttagcaatctctctttttgtatggactatggagcatagcatcgttccttctagaactaccaattaatatacaaaatacttgtggatcgcaactagatgctggactattctcatgc

SEQ ID NO: 99024 - DNA, 337 bp, Zea mays
  unsure (1)..(337): unsure at all n locations
  Clone ID: MRT4577_21821C.1
ctggngngnnntttttttttgtttaaagccagtttttgagactagaccccggggaatacatttcggtgaaaaggattccttttttacccccctaaactcctgggggaaaggtccagccgggccaacaaaaaaaaaagacttttccgcaggagccgcccggggggggaaccctttttttttttcccacacgttgtccaaagggggggcctcgttttaatccccgtggttccccagggccagtttcttggaaacgtaggggagcccctgttttaacctaaccacctcccccgggttacccggggagaacttggcctttttggggtttgggcccaccggg

SEQ ID NO: 99025 - DNA, 1317 bp, Zea mays
  Clone ID: MRT4577_21822C.1
cccacgcgttcgtccacgcgtccgcttgaaattgacaatgtaggaggatggcggtacatgtttggttttagtgctccgcttgcagctattatggctattggtatgtggactttaccatcttcaccaagatggctacttctcagggcagttcaaggaaaggcttctttggaggataataaaaagaaggcaattcaagcccttagaacattgaggggccgcacagcaagtgaaaaggttttggcagatgatgttgacgatacaattgtctctattaaggctgcctacgcaggacaggaagctgaaggaaacgtttgggatgtatttgaaggagctagcttgaaggccttcactattggcggaggtctggttctgtttcagcagataacaggtcaaccgagtgttctatattatgctgcttcaatacttcaggtgttgcggtatttaaagttgacgatgttggaaggcgcccattattgataggaggtgttggtggaattgctttgtcactcttcctactggcagcttactacaagatcctgaacaacttcccctttgttgctgtcggcgcgttacttctatatgtcggtgcttaccaggtctcatttggtccaattagttggctaatggtatctgagatctttccactcggacaagagggcgtgggatcagcctcgcagtactaacaaatttcggctcgaacgctctggtgacatttgcgttttcacccttgaaggagctcctcgggccagccaatatatttttcctgttcggcgtcatagcagtgctctccctcgtgtttgtgatcctcgtcgttccagaaaccaaaggactgagcctggaggagatcgagtcgaagatcctgaagtaattaaaaaccgttcgtgcgatcataagccccatttggagatattgtaagtagcgatgccattttcaaaacgggcgctcgctcactcgtaggatcggagccaaagctttcagacatgggagtacatatgcaaagggcacgtctcggtgtaaagcttggacatctttctcttttattagcgtagtgaatatttccgaacatacttggtaaattacatttcagttgagtcataatcacgcttctgtagactgtagtccactgtgacctactgtagtagtatgcatgtcactagtaaaagctggtaagctgtgtgatggactgatggtgtagacttgtgcagttgtgctcgcataaggctggccatcagatcgtgtatatagcgacataaaacactattttgcactatagataatactgttataatttacagaatggagtttgaaacatgagat

SEQ ID NO: 99026 - DNA, 743 bp, Zea mays
  unsure (1)..(743): unsure at all n locations
  Clone ID: MRT4577_21823C.1
cttcaccaanaggctacttctcaggcagttcaggnaaggcttctttggaggataataaattcggcacgagggcaattcaagcccttagaacattgaggggccgcacagcaagtgaaaaggttttggcagatgatgttgaagatacaattgtctctattaaggctgcctacgcaggacaggaagctgaaggaaacgtttgggaggtatttgaaggagctagcttgaaggccttcactattggcggaggtctggttctgtttcagcagataacaggccaaccaagtgttctatattatgctgcttcaatacttcagactgctggattctcagctgcatcagatgctgccaaagtagcaatcttgattgggttgttcaagttgctaatgacaggtgttgcggtatttaaagttgacgatgttggaaggcgcccattattgataggaggtgttggtggaattgctttgtcactcttcctactggcagcttactacaagatcctgaacgacttcccctttgttgctgtcggcgcattacttctatatgtcggtgcttaccaggtctcatttggtccaattagttggctaatggtatctgagatctttccactccggacaagagggcgtgggatcagcctcgcagtactaacannnattcgctcgaacgctctggtgacatttgcgttttcacccttgaaggagctnnctcggccagccaatatatttttcctgttcagcgtcatagca

SEQ ID NO: 99027 - DNA, 713 bp, Zea mays
  unsure (1)..(713): unsure at all n locations
  Clone ID: MRT4577_21824C.1
aattcggcacgaggcctagatccattgctgaagatataaggaaagggcacgcagcagcacctcaactgtttttttattcaatatctgatagacttttcaaatttccactttcagatcatttatgtgctagtctttttgatgttcttcttggtggagccagtcctaagcaggttttacagaaacgttcccaatctgatgctttaaaagataggagcatggctcctttttttgtccctcagattctggtttgcatttttaaatatattcaatcttgtcgagatgcttcagtgcgtacaaagattttaagtgatcttcttgatttgctggattcaaatcctgtgaatgttgaatcccttatggagtatggttggagctcttggcttgaaacatctgcgaagcttgatgtacttaggaactacaaatcgaattctgtagccaaggctgacggtttggagaccaatgagctgattcttgtgaggaacatgtattcgttggttctctcctattgcatattctctgtgaaaggtggctggcatcaactggaagatacaacaaatttccttctactgaaaattgagcaggggcagttaccaaattcctccatgctccgagacattttttgaagatctcattggaagccttcttgagacatcttctgaagaaaagtgttttcaattctcagccatgccgngataatatcttggatcttttaa

SEQ ID NO: 99028 - DNA, 349 bp, Zea mays
  Clone ID: MRT4577_21825C.1
acaccggcacaacgaagccgaggagcagccccgcgccaggaggcagccagcccagcgaacaagacgaccagggaggagacagacacagggccaccacggccgcccaggccgaaaggcacgaggagcaggcggaggccacggagagagcggccaagacagcagatgcggaagagcccccggacgaggagcgcaacctacggccagaggcaaacaagacagagaaaggggagcgccgcaccacaaggcgcaccagaaccaaacaccgaacaaaaggaggagcgccgcaagaacgaagagcacgggaaccggaccaaagacaaacgaggcaagaaccaggcagaaccgagca

SEQ ID NO: 99029 - DNA, 616 bp, Zea mays
  Clone ID: MRT4577_21826C.1
gggaaaagaaatcttgcaatccacccctcgaaagaaaacctcaatcaacaccagaagctctcgatcccaccgaggaagaagagaggaatggcgtccgaggaggagggagtcgtgatcgcctgccacaccaaggccgacttcgacgcccacatggccaaggccaaggaggccggcaagctggtgatcattgacttcacggcctcctggtgcggcccctgccgcttcatcgcgccactgttcgtcgagcacgccaagaagttcacccaggctgtgttcctgaaggtggacgtggacgagctgaaggaagttgccgcggcctacgatgtcgaggcgatgccgaccttccacttcgtcaagaacggggtgacggtggagaccgtcgtcggtgccaggaaggagaacctcctggcccagatcgagaagcactgcgccgcggccgtgcctgctgcgtctgcgtagagaggatggaccagcacgtacgtggcggtggtggtggtcttgtcgttttcagtttgggcttgtcagcgctgtggctgggtggtcgattgtgaactggagagcatgcagttctaatactttggaatttggatgtcaaaaaaaaaaaaaaaaagcggcc

SEQ ID NO: 99030 - DNA, 737 bp, Zea mays
  Clone ID: MRT4577_21827C.1
tcgaaagaaaacctcaatcaacaccagaagctctcgatcccaccgaggaagaagagaggaatggcgtccgaggagggagtcgtgatcgcctgccacaccaaggccgacttcgacgcccacatggccaaggccaaggaggccggcaagctggtgatcattgacttcacggcctcctggtgcggcccctgccgcttcatcgcgccactgttcgtcgagcacgccaagaagttcacccaggctgtgttcctgaaggtggacgtggacgagctgaaggaagttgccgcggcctacgatgtcgaggcgatgccgaccttccacttcgtcaagaacggggtgacggtggagaccgtcgtcggtgccaggaaggagaacctcctggcccagatcgagaagcactgcgccgcggccgtgcctgctgcgtagagaggatggagaccagcacagcacgtggcggtggcggttgtcttgtcgttttcagtttgggcttgtcagcgctgtggctgggtggtcgattgttgtgaactggagcatgcagttctaatactttggaatttggatgtctggcttcgttctgttatgatgatgatgatggattgatggtgatggcatggcaacgctgctaatccctgcactagctagagtgctagaccatggtgacagtgggatcacattgcgctgcaaaatgaaaattttaatggctatgtcaactgctggtacatttccatctaattctcttc

SEQ ID NO: 99031 - DNA, 245 bp, Zea mays
  Clone ID: MRT4577_21828C.1
caaaaaagcaacacaggatgcctttgcagtttacagcttttttttacaaaaaccatggggggcattttttccgcttttacagtacaacaccccccattcgatcggggggggggggggcaacctaacaaggggcccgttaatttgggcccaaaccgttcaagggggaggtaaagcgtggtgtcgaacatggggccgccaaaccttgggacgtccccctcccgcttgattgtcccggccgccggggt

SEQ ID NO: 99032 - DNA, 676 bp, Zea mays
  Clone ID: MRT4577_21829C.1
ggccgggaggggccaccaaagcaatcttgcaatccacccctcgaaagaaaacctcaatcaacaccagcagctctcgatcccaccgaggaagaagagagaggaatggcgtccgaggaggaaggagtcgtgatcgcctgccacaccaaggccgacttcgacgcccacatggccaaggccaaggaggccggcaagctggtgatcattgacttcacggcctcctggtgcggcccctgccgcttcatcgcgccactgttcgtcgagcacgccaagaagttcacccaggctgtgttcctgaaggtggacgtggacgagctgaaggaagttgccgcggcctacgatgtcgaggcgatgccgaccttccacttcgtcaagaacggggtgacggtcgagaccgtcgtcggtgccaggaaggagaacctcctggcccagatcgagaagcactgcgccgcggccgtgcctgctgcgtctgcgtagagaggatggaccagcacgtggcggtggcggtggcggttgtcttgtcgttttcagtttgggcttgtcagctgtggctgggtggttgattgtgaactggagcatgcagttttactctgggagcccatcatttggttggctcaggtgtcaataatctgtataccttaatcatggatagttgttgtgagttgtgattggactttag

SEQ ID NO: 99033 - DNA, 251 bp, Zea mays
  Clone ID: MRT4577_2182C.1
gcatgatcgtgccgctaggggtttatcacatgagttcgcagccatactccatgtgtggggaatgctttttgctcttgagcctgtgctacctccagtaactgctacgccataacatgtggagagagcgttaaatgcactttatcaagacgcaacgaacataactaattccacattcaaggtaactttgaacttttatcataatactgccttacaacaatggttatatttatgtttatcacaaaaggtatctt

SEQ ID NO: 99034 - DNA, 684 bp, Zea mays
  Clone ID: MRT4577_21830C.1
ccggccggggccaccgaagcaatcttgcaatccacccctcgaaagaaaacctcaatcaacaccagaagctttcgatcccaccgaggaagaagaagagagaggaatggcgtccgaggaggagggagtcgtgatcgcctgccacaccaaggccgacttcgacgcccacatggccaaggccaaggaggccggcaagctggtgatcattgacttcacggcctcctggtgcggcccctgccgcttcatcgcgccactgttcgtcgagcacgccaagaagttcacccaggctgtgttcctgaaggtggacgtggacgagctgaaggaagttgccgcggcctacgatgtcgaggcgatgccgaccttccacttcgtcaagaacggggtgacggtggagaccgtcgtcggtgccaggaaggagaacctcctggcccagatcgagaagcactgcgccgcggccgtgtctgctgcgtagtagagaggatggtagtcgtcgccaataagggccagcacgtggcggtggtggttgtcttgttgttttcagtttgggcttgtcagctgtggcggggtggtcgattgtgaactggagcatgcagttctactctggacaccttttaagaaatgaagtggttcattttcttcttaaaaaaaaaaaaaaaaaaaaaaaaataataataaaaaaagaaaatt

SEQ ID NO: 99035 - DNA, 400 bp, Zea mays
  Clone ID: MRT4577_21831C.1
ctagttctagatcgcgagcgagctgcccttttattttttttttgctagatctattactcagtaaaaatccaagagttacagaaacaacttgcacttgacagagaagaagcagagaaaatacaggatgatcgcgataatttcttaaatctagcacttcaaggctaccaacgttccattgttgttggtggcaaatatgacctacaagtggtttttctgttggtctcgttgtggtttagtcttttctcaagggatcaagttgtgaaagcaatgttgaaaaccacaaaagaggtccaaacctacaagttcataccactgatttatcaaattgattctagactttgcagctccatagatgctcaggcttcatttaactttcagattgcgttaacttctctttttg

SEQ ID NO: 99036 - DNA, 315 bp, Zea mays
  unsure (1)..(315): unsure at all n locations
  Clone ID: MRT4577_21832C.1
aaaaaactgatcaaccactttaaattacattttttccccaaaataaccttttgggtaacccaaaaaatttttctttttttttaaaaaactttgaaactagtgaccccgaacttaccaccaaaaacttaagtgaactcggaagcaattttctgtttggaaaaccgtttatcgctacactccggtagaaacagaggttaaaaacaatgcacaaggcaagggggaaaggcagcccaanaagnnnntgttggtaatttttcaaaggtttaaaccttctcccgccgcctaagtttttaacccttttggggcagccttttt

SEQ ID NO: 99037 - DNA, 285 bp, Zea mays
  Clone ID: MRT4577_21833C.1
ctgactcgtccggatacgcgtggactgacgcgtgggcaatgactccacgcaggcgcggggtagctgcggcggatcatcagagactatggtccgactgaacaccttgctcttcagctgggcatcagcgaacgaggaacacactgactggctgtgctaccagctttcatatgctgctctgaacgcttgaatgagtgacaaccttgccagctatgttgcttgctagaccatgctgaagaccaacctggccatggtgttgggcgtgaccacaaggaaggtcgatagacc

SEQ ID NO: 99038 - DNA, 306 bp, Zea mays
  Clone ID: MRT4577_21834C.1
aaaacccccaaccccaagaggggcaccattgcattaaaattttaaacccccctttgtgtccggggaatacatgccaaaccaaaattttttttgccccacgttaaaaaaaacgggcgtttttttaagttttggaaagcattactaaacatgttgtagcatttttacacacattggcggccgaataaacacaaaaattacccgtttgcctttggacgggttggtgccaaaccatattcctaggccgactttggaaaaccaacccttaatttgccataatcaaaaacggggtgggaaactcccatgaaa

SEQ ID NO: 99039 - DNA, 337 bp, Zea mays
  unsure (1)..(337): unsure at all n locations
  Clone ID: MRT4577_21835C.1
tagatcgcgagctgcctcccttttttttttttttttagtgaaacattaaacacaggggaaccggggcaacatgagctggtgggggcaacctaattaatcaacagctttcattccaaatggaaagcaaggctacaagctaaacaggtagggatatatcgggagacatcaatgatttggcgcttactttactccagggtgacatgagggcttggtgctaggctcttgccctctttgttctgcaatctgggcattgggatgggttnctgggcgcagctctgcgagcgttgtcttgacacacttcccatgggaccaccggtcccaactatcacaacagatc

SEQ ID NO: 99040 - DNA, 807 bp, Zea mays
  Clone ID: MRT4577_21836C.1
ctcagactcagagcaagctctctcgtaagaggcatttggcggcaagtaacaagataagaatgagaatggcggcggcgagcaacggcgcccccctggtggtgttcgacttcgacaagaccatcgtcgactgcgacagcgacaactgggtcgtcgacgccctcggcgcgacccgccgcttcgacgagctcctgcgccacctcccatggaaccacgccatcgatgcaatgatgggcgagctgcactcggagggcaagacggccgaggacatcagaggcagcctcagaagggcgccgctgtccccgcacgtcgtcgcggccatcaaaaccgcctacgccctcgggtgcgagctgcgcatcctgagcgacgccaacgccttcttcgtcgacaccatcctcgcgcaccacggcctcgccgactacttctccggcttcgaggacctcgccagggttctcctcggcatcgtcgacggcgagatcgcccgcgccgccgcggaagaaggcgctggcgcgggcgtcgttgtcgtcgtgccggcgcgtcaggaggcgctcatgccccaggcggtccgcgtgcccaactgattgatgatcgttctctgatacaggtggatgcgtggaatatggcgcgccaaattactagtattaataactccaggctccatctattgtgctgagtgctgactggatcatgctggaaatctgcctcaaactgagagccaattagttgctggtttcttcgtgatatgtactagtattcctatggatccacccaagatatccattcccttgctgcaataaaaaaaaaaaaaaa

SEQ ID NO: 99041 - DNA, 1228 bp, Zea mays
  Clone ID: MRT4577_21837C.1
ggcaaactttttttgcctttttttctaccaaacagtcccttagtctctcgtttcattatttcctcacagatgaaatgtcaaatgacacaattcttcgttgtccacgaaaaataaatctacacgcacacctcaagtaataacactgcaggattacattcattcaaaactaggagcgtctttcctaccgtgtacaaaaatacacaatcaatggaacacaaaaatacaactcagctcatatagacatatctggcaaagaacccataaggatcacaggactgctatttctcggcctcagaagcttgtccggccttgctttggagagaatatcagagaaaaacccataagatgaagagagaggtggaggctgaatagattccgttgatggcatgcccgtgccatcatgtacagcttgctcaagcgccgcgatcttcctgccattagaagccttaccacaaggacaaacactgatctttctaaagcattgcttgtggaagattgacccacacaagctacactttgtagcttcatcctcctgaaatgggaatataagggacagcgggtcatcacaagcttgtcgagcagcacaaggtacgccaccatcgtagcacacaaggcattgctcagtaatgtgctcaagtatcctgtttgatatggtcagcaccttaactggaagtgctgcaaaagctccttttgagagatcaacgaggtcacgaagcgcaaagaagtcattcccatctagaaggtatcttcgaactcctagtcctttaagtatggaattccggaaaggacattggacacaaggaagcatagctgctattttcttccggacactcatgatgttaagcagagctggtactttcgagaataggaaaggattgactgcacttacacagagcataggctggtcatatatggagtctaaatatgcttttgctaactgggaaattggatacagtgaaaaatcccagtggtgtagaactcttgctggaagaactgcagtatcatttgtgtgacaagaagcacaaaacaattgtccagtgtaagaacaaaaccgaggtttgttccatccaatagtctgtgcaagttcttgcagcaatgttcgaccagcatccaaatgcctatggcaccccgcacagttgtaatgttgtaattccaacaactgtctggtcgacttctgaggcctatcctctacaataagtgatatcccggccgacccggagggtacccc

SEQ ID NO: 99042 - DNA, 280 bp, Zea mays
  Clone ID: MRT4577_21838C.1
ttggtccaacacaccaaatttaagaactgaagacgggtcctttcagtaggggccccaaggctagatactacctccgttttcaaatatttgccgccgattagtttatttttgaactagaacgcgacaaaaaaacgaaggggggggttccatatttttttttttccctttttttctggacaggactatttttatgcatgccatccatatagaaagcatgtaaatgcagcaggggggagggtaattaggtgggtataagcttggagcgaggcttggaaaaccc

SEQ ID NO: 99043 - DNA, 669 bp, Zea mays
  Clone ID: MRT4577_21839C.1
ccttaacgaactgctaatgcatcatggaaccattctccaccccctaataatcaggccccaacactatctgcatctgggaatgctggtgggcaagatttaactgatatggtcatgaatgtttttcatgacccagtgcttgtaaacctggagcatggagttagtatcgaacaggttgcaagccgtcttaacatatcagatgcacttgccaggtcgactgttacacatcttattgatgttggcaacctctatccaactatcgatgacaaccattacaagtctacactgaatggttgatatggctgtgcccacgcgtgcaagcgttaggctcccctggagcgatcgaataatataagcactcttgcaagagttgtttttgcagagtggcttgctggtcctctagacagtcgcaaggagagcaacttaacggctaggttaagttgcatatctaagcacttgcgccttatgtgtaatggatatgagtaggttagatctctaggtgctttcgtttgtgtttgctactgcagtacctcgagaacatccatgcctgtgtgacctgcaattagtttgcgacttgtttgtggttatgactctgccctgcatattgtttctggattcagttaacgtttgccctaaaaatgcatatcatgcatctgattatttctggattcc

SEQ ID NO: 99044 - DNA, 598 bp, Zea mays
  unsure (1)..(598): unsure at all n locations
  Clone ID: MRT4577_2183C.1
ctggccgggaaccgccgtataaatttctacgtgcgaccccaggtcgaagaatttggatctattttccacttatatgtgtggggaacttcactatctaccactgtattacgttcgataggaagtgactacggaagaccaggcacctggtgctggattcagcagggaagcatggcaaaggtcctacatttaataaccttttatcttccactttggggtgccattttgtacaatgggtttacatactatgaagtaaaccgcatgctgaataatgcaacgcagatggctgctggcataagtgatcaatcaaatcagtctgacattagggcaggcaggaagggcacaggatagtctggctctcctttcttgatgttgggttcgctggacttatgggcctattcaattccattgcttatgggctaaactcttctgtgcgccgagctatttcagagagaatcgacacgttcctacctgagagaataaaaaggagcctncctgctttgtcaaggctgaggagtcaacaagaaaatgaactcacttttcttatcgttgaggggaactgatatgaaatggattttccatgccccacgaaccttttttt

SEQ ID NO: 99045 - DNA, 1426 bp, Zea mays
  Clone ID: MRT4577_21840C.1
atcataactcttttcggtgttctttgagttaagattcgagacaagagaaatatccgtctctgccaccattcatgatgtgtgagctaaaacttcttgatttcatatctttttcagtttcccacacaccaactacatgccactcattttcccatgaagaacagacaacaatgcagtgccatgcattcttatattaattacaggcttgcagcatagaagggaaaaaacggcagagttacctgttcatcataacagaaacagatgaaagcactcaagcagcagcaagcaagatcgcatccaccaccaccaccactgcatgtcgccaaccaaccacagcaaacaaggagaggaaaggagggtcacaacacaactcacaagacgaccacaggaaagaaccaaatctgcattcaagtggcagcacacggacacgcggtggacgcatgctggtcgaggagacacaccagcgcaggctcacagtgtcgcactggcccagcgtgctggccggcagtgcccccacacgcgtcacgcgtgccgtgcctggctacgtacgtacggacaccttctccagctacgcctacgcacgcactcctcttcctccccctcccaccagccacggccggccaaccgcaacggatagggggggctaaaaggctgctgattcggtttccgggcccccgtttccttctcgtccttccttcaggcggctatcgccggcggcgccgcccagagctgggcgttcttcaccttggacacgctgctgagcacgcccagcggcgtgacgtcgccgaccaccgtcaccttcttcgccgcgaagtcgatgttgaacgacgtcacgccttccatcttggagaggtgcttcttcactttcccggcgcatgctttgcagtgcagggataccttgagcacaaccacctgctcttgcgcctgctcttgcgcctgcgcgctcttcgcatcagcagcagcttcacctgcttcctcccgcttgggcttgacgtcgacggccggggcagactccacctcctggatctcctcggtggcggcgaagcggccgctcagcaagtagcgggacgagccagccgggctgacgaggccaccggcgtttccgacgacgacagcctttcgctgctgctgctcctcctgctgccgccctttcttaccgtcgtgccggtgtgtcctgggcgcggcagggacgtgagacagggggctggcactggcaatggctttgtgtggccggaccatcggctgccgctccaggctcgggcatatcgccgtggacgccggggacgagcacgacagccccttcatgtccctgaacagcagaggagccatgggaacaggccgagctgctgtgctgctgccgcctctttgggctttggctgtgttgctggtgctgctgaaacggtggagtggaaatcggagcccggccggc

SEQ ID NO: 99046 - DNA, 528 bp, Zea mays
  Clone ID: MRT4577_21841C.1
gcctgcatgtaccgggctgctattacacggtcgaccccagcgtcctggcacgagtgctccgacttcgtctgagaggaaggccacccgcgggcgacaataggcttgacctacaccttggcgctggacacgagcgtcagctagatggcgctggcgtcactggaagggcaaccggtacaacactgtgagatgacatgaagttcttcgccaccccggcgaggcacatctcgttggggaacaaggtggcgaaccacacccttcctgtgcttcaactcccctacaggcgagcctatagatggtcataccgagcagtcagctgaccttgctactcctgccccatggccgggcgggtgcgctgaaactggcgtcgctcaggtgctggcgccggggcgatcaccctgaccgtcgcttctggccgcacggaccttggcagcgccaggcgttgctggtgcagacgtagaacaacaacgcgcggcccgccccaggtccgtgcccgcagcagcgacaccagcggctatggggccgggcccc

SEQ ID NO: 99047 - DNA, 101 bp, Zea mays
  Clone ID: MRT4577_21842C.1
cacacatagtcatacatagcaagtttctactttctgcacgttcatgttagccaccgatttgagaattttaatcagctgttcatgaaccttaaattcatcct

SEQ ID NO: 99048 - DNA, 582 bp, Zea mays
  unsure (1)..(582): unsure at all n locations
  Clone ID: MRT4577_21843C.1
gctaagctgagnacaaanagtcttggcggcgagaccagctacgtgcgtttctcgttctcgccgtcatcctcctcatcaccgcagctacctaccgagccaatgcgcagccggcgcctccagcagacccaacgccagccgctgacacctgcgccgaccccagcgtggaaggggcgtgccgcaacgtcccgaaggcgctgcgcctgaagctgatcgccatcccgacgatcctcgtctccagcgtgatcggcgtgtgcctgccgctcttgtcccgctctgtgcccgcgctccgccccgaccgcaacctcttcgtcatcgtcaaggccttcgcctcaggcgtcatcctcgcgacgggctacatgcacgtgctcccggactccttcagcaacctcacctcgccgtgcctgccgcggaagcccttctacaaccggaggaagggtggcaacacctccggccgacgcactagcggcgcggtcgccgaccacgagagcccggcgcatgagcaccactggcacagccacggccatggacatggacatggacatgctgggggcatcgtggtggctgacaagcccgaggacgatc

SEQ ID NO: 99049 - DNA, 1534 bp, Zea mays
  Clone ID: MRT4577_21844C.1
gccgggaggccggccggggtcagaccatagctaagctgagagcaaagatgtcttggcggcgaaaccagctacgtgcgtttctcgttctcgccgtcatcctcctcatcaccgcagctacctaccgagccaatgcgcagccggcgcctccagcagacccaacgccagccgctgacacctgcgccgaccccagcgtggaaggggcgtgccgcaacgtcccgaaggcgctgcgcctgaagctgatcgccatcccgacgatcctcgtctccagcgtgatcggcgtgtgcctgccgctcttgtcccgctctgtgcccgcgctccgccccgaccgcaacctcttcgtcatcgtcaaggccttcgcctcaggcgtcatcctcgcgacgggctacatgcacgtgctcccggactccttcagcaacctcacctcgccgtgcctgccgcggaagccgtgggccgatttctccttcaccaccttcgtcgccatgctcgccgccctgttcacgctcatggtggactcgctcatgctcagcttctacaaccggaggaagggtggcaacacctccggccgacgcactagcggcgcggtcgccgaccacgagagcccggcgcatgagcaccactggcacagccacggccatggacatggacatggacatgctgggggcatcgtggtggctgacaagcccgaggacgatgaggccagccaggtgcagctccgccggaaccgcgttgtcgttcaggtcctggagatgggcatcgtcgtgcactcggtggtgatcgggctgggcatgggagcgtcgcagaacgtgtgcaccatccggccgctggtgacggcgatgtgcttccaccagctcttcgagggcatgggactcggcggctgcatcctgcaggcggagtacggcgcgaagatgaaggcggggctggtgttcttcttctccacgacgacgccgttcgggatcgcgctggggctggcgctcaccaaggtgtacagggagaacagccccacggcgctcatcgtggtgggcctgctcaacgcggcctcggcggggctgctccactacatggcgctcgtggagctcctggccgccgacttcatggggcccaagctgcagagcagcgtcaggctccagctcctctgcttcctcgccgtcctcctcggcgccggcggcatgtccatcatggccaagtgggcgtgatcgtattcgtatctgagacgacatgacacagtactgttacaccaacactgcctgcagtctatctatctgcaagactgcatcgctgcatgcatgttcctcctatagctggctgttgtatcatttcgcgtgcttcgttgctccgtgcgcttccgtgtcgccatcaggaagctaggtatatattagacgcagatagcgttgttgtcatgactattcaacgtccacggtacaatacaaaagtagtactctatctatgtattaactatgttcttaaatatttgtcgtggtaaataaaaaaacaatataaatagtactctacctaaaaaaaaaaaaaaaaaaaagaa

SEQ ID NO: 99050 - DNA, 806 bp, Zea mays
  unsure (1)..(806): unsure at all n locations
  Clone ID: MRT4577_21845C.1
ctttcctttcatatctcccatattaattagacaggtgaggctcctgattgcttctcacggatgtcaaccgtgttggtgatcttgctccaccaaccgagtaccgaatcgcttgcttgccatttttctggtttcaagttcggttgggccatccaggagggcaggaggctgcaaggcaccagacccttttggtgtatctgcattcagtctcaagatgatgcccggttatatttagatgtctgtctaccgagaggccacattgactatgcggccagctgtgctgcaccagtctgttctaaatccaaatgcaattttggataatgagccagcgtagaatttgcacttgagtagagcccaggtttgccagattgagcagatttccagtgctttggggcagccaatgaattgagcttgatagttgctgatagctggtgttcagttgatctcaaataatactagagctgcattgcaactactgtatttttctgaagtatgaatgttactattcgctttgcacaaatcacatccaaaagagtccttccatttttaactgtgcttttatattgagccgaccaacttgacatgcttgattattcaagctacaccttgaatacttacatttaatttaaaatagaaaaagtgacctacgtataaatggagtatcttctttatattgacagcacaactgctggtacttaaatgcatggaccttggaatatataaagagtatgnnacagttggagtgatctctnataggagcaagaaggtgcaacactgtggntctctgccgaagntttgttgtcctgtct

SEQ ID NO: 99051 - DNA, 1331 bp, Zea mays
  Clone ID: MRT4577_21846C.1
tactccaatcgatcagactcattttaactccaccactccattgtccattctccctggctgcctctcgttgctgttgttgttgctgctcttctctagcttgctttcccccaattggcctctctgcactcttgagcttctttgccttgttggacttggtagctgtggcgttgccgaaatgggcgctccctaccacctccaatcaccaagaaccatcataaccaaggtaatgagcatgaagcagctgccaccggccctgccacagctgccgccgccgccggtggatcagtccgaggtgaccgagcagacaccggtgctgccacggtcgcagccggtggatccacccacgataaccaggcagccacaggcgccccggcagccagcgcgggcgccttccaaggtaatcctgcaaccgcgccagcggacctcgccggcgatgtggtgcgcggccatcgcctgcttcgccttcagcatcctcctcatcgtcgcaggcgtcgtcaccctggtcgtcttcctggcggtgaagccgaggccgccgtccttcgacgccgccaacgccatcctcaacagcgtctacgtggactcgccggccccctacttcaacaacgacatgacgctcgttgccaacgtctccaaccccaaccgggagatcgacttggtgttccggtccgccactgtcgagctcttcttcctggacaggcccatggccgtgcaggcgctgcctccgttcgcgcagcggcgaggccagtcccagctcctgaacatgcacctgctctccagccgggtcctgctgccgccccaggtggcggtaaagatggtggaccaggtgaggagcaacagggtggcgtacacaatcagaggcgccttcaaattcggggccaagttcaggttcggccactactcgtactggatgtacacggtctgtcagctggaactcactgcccctccttctggagttcttgttgcccggagatgcacaacaaaatgactggctctagaaaaattcccctcgttttcttttgttattatatataaaatcttagctattttttatactgatgatggaaatggcccgagaacagcggaacatacctattgttgattcatgtgaattcgaagttggttcttcagctttgtcgatctcttggctgctcagttgttgctgcgtcctagtggctagctgcaacacacagtaggtcagtagcttagatcgtaagcaacctgaacagagttcaacaaagtgtgtaatgtacagcatagaactctttgcttgagtgtaagcggtacagtggattttttttctcgaatttgtattgattgcagattgagatgat

SEQ ID NO: 99052 - DNA, 1411 bp, Zea mays
  Clone ID: MRT4577_21847C.1
gctccaagctggtaaattccatatgctgtaaaaatctggctttctattgaaggcagcaagacatatgggctctcctagattttagcctaatgtaccatttcccccactattttttttttgaagtgaatgtactgtagggagggcctacagtaatttcctccactaataaccacattaaaatttgacagtgtacccaggcttcaagcacgcactgcagcaactgtcccttcatataaaaacccatgcacatccaatccaccggcgtcacctcttcctcccagagacggttttcttgacagcgccaacggagaccaggaactcgtccagagacgagagcgtcttcatgtcatccggagggaagtagctggccgccttccccatgaaggaggcgaggagcagcgagaggccgggagccgcggcggcgcgctcggggaggaactcgtcgaggaaggcaaaggcagccagaaagtctgaccggctcgcgtttattggggctgcgaagtggcaagggattatccgtcggaatcgccagtcggcagcgatcctgtcaacccagtccctcaccttctctggaactttgctgaaaacgagcgtcttgacaataggtgagacgatcaatttttgcgacatttgagcaaaacttgcatttggctcaagtagatttgacggaccaagaaatagtatttgaagtaccattctctcccaccctttctgacggtttagcttattgtcaacaactggttcatcgggaacctccttccctttgctcaatagcttcactgccagtccattcttcgcagatgccaacagagattctttgcttatacactccggtggctgttgaggaacaaagatgacagcatcggtcaccagtagtgtccgtgaaggcttatggtagaacgccacctccacatatggcccaatcccaacttccggagagctgagcaccttctgctcgatttcggcgacccagggcgtggcgtcatcctcatctttgagcggcttggcccggaagatcccgaagaactcgagcggcaggttgattggccagctccactgcctgggcgccacccatatctgagccttggggaacttcctggagaagggcccgacgaagattttgtgctcgtatgcgaaggtcggcagcacgatgtgctccaccggcgcgtccagctccttgagcatctggatgcactccttcgtgggcgcgatgggcgcgtgcacccagagcccaccggacttgagcttgatgaccgtcatgcggatgttggtggagacgctgctgaagcccagcgcctgctcctgctcgaacagccatatgctgcccttcaccgcctcggtgcggatggtgcggcggttgaggaacgggccgagcgggaaggggaacccggtgaagttgaagtagaaccgc

SEQ ID NO: 99053 - DNA, 428 bp, Zea mays
  Clone ID: MRT4577_21848C.1
ttctaattaatggccaatgttgacattctcggtggctgcattggcgatatggcggcattcaatgcaagcctaatcaaagctatcgggagcgggattagaggattattattagcacagactcgagtgactactaggtatgttactggcaaggataactgcgatacaactcacaaatagcagctggaaactgccataaaagcaatgaagataggttgatctaagatattggatgactcttactcattgattgtataaccatgtttacataacatgtctttgatccattcaacctatattgactgatatacacatgaagcactaacactccaatgccatttgcgccgcacgttttaatggattaaaggttacattcacgctcatgcacatgaatacgtgctcattattagcacctatattaatcaacttga

SEQ ID NO: 99054 - DNA, 486 bp, Zea mays
  Clone ID: MRT4577_21849C.1
aacttcaaaactgtattcggaatctaagccgacaccctctttggctgctatacaccacaaaagagctaaaaaacataggaacgggggggggggcagaacaaggaagtggagaattactaactgaaaaaatggcggaagacccacccaaaaaagccctctagagcactcattaggggggctgtagaagagattttagggtgtacaggctcaacatcatccatcaccgttgctccagcccccatactaccctaaggagcgagtatcttgtattctccaaggaaactcctctccaagcactgaacagagcgaaaccgtaagacggaaaagggggaaagctcctgacgaaaagggatgcgaggggagaatccagggcgacaagggcggagaaactgggggaccctgtcctctggaccatggaggctttcctgtccagcttcgcgccagctcctatgtcagctgctctctctgccgcgtacaacgttgaag

SEQ ID NO: 99055 - DNA, 891 bp, Zea mays
  Clone ID: MRT4577_2184C.1
atgactcaaaaatttgagatgtcgatgatgggcgagttaagctacttccttgggttccaagtgaagcaactcaaggacggcaccttcatctcccaaacgaagtacacacaagacttgatcaagcggtttgggatgaaggacgccaagcccgcaaagactccaatgggaactgacggacatgtcgacctcaacaaaggaggtaagtccgttgatcaaaaggcataccggtctatgatagggtctttactttatttatgtgctagtagaccggatattatgctaagcgtttgcatgtgtgctagatttcaatctgacccaagggagtgtcaccttgtggccgttaagcgaattcttagatatttagttgctacgccttgcttcgggatctggtatccaaaggggtctacctttgacttgattggatattcagactctgattatgctggatgcaaggttgataggaagagtacatcggggacgtgccaattcttaggaaggtccctagtgtcttggagttctaagaaacaaacttccgttgccctatccaccgctgaggccgagtatgttgccgcaggacagtgttgcacgcaactactctggatgaggcaaaccctatgggactttggctacaatctgagcaaagtcccactcctatgtgataatgagagtgcaatccgcatggcggataatcctgttgaacacagccgcactaagcacatagacatccgacatcactttttgagagaccaccagcaaaagggagatatcgaagtgttttatgttagcaccgagaaccagctagccgatatctttaccaagcctttagatgagtcaaccttttgcaggctgcgtagtgagctaaatgtcttagattcgcgtaacttggattga

SEQ ID NO: 99056 - DNA, 360 bp, Zea mays
  Clone ID: MRT4577_21850C.1
actggcgggcccggctagtgggtccaaggggggaacccagccgggcggagcgagggccataggggggcccggcgggaaaccggaacgggcgcacaaaggcacacaagtgacgaccggggagaaacggtgcccagccccaggcgccgaaacagagagccaacacacataaaccgcgaagcccgcgcggcccaacgagcaggcgaaaaaccagaagggccaacggcaaaaaggaaccggcccacgcccggaaagaggccggccccaccgcgggcaccaaccccccaacccccggagagaagcggtgggcacgggcgggccgctgccgcgagcgggatcaccgcccccgaaggcggggccgcg

SEQ ID NO: 99057 - DNA, 374 bp, Zea mays
  Clone ID: MRT4577_21851C.1
tattactagtatgaggaatggagtcattccatcaaatttgaggaatgatctcatgatgtaacgcctcatctagtgtgttcgacaagtgttgatgaagctcttatgaaagaagagtttgacaagctgtctgctgccctggtacaaggagcagcaacatgctcacctcccttgccactgacaactattgtagtgcaagatcataaaggggatatcaaatgctgcacctactggatggccactgatcccgctattggtaccaaagggaggatagttggatggcacatcagaagataaaaccaggattcctggtcccattagcaacttaaaggtctttatatcaccaacaggtttttttcagggtaatactcttggtt

SEQ ID NO: 99058 - DNA, 359 bp, Zea mays
  Clone ID: MRT4577_21852C.1
caagaatgctctaagacctatatgttaaccttttggcattgttaaatggattttaggaagtcgtataaaaaaaaaaaaaaaaaaaaaaaaaaaaaaaaaaaaaaaaaaaaaaaaaaaaaaaaaaaaaaaaaaaaaaaaaaaaaaaaaaaaaaaaaaaaaaaaaaaaaaaaaaaaaaaaaaaaaaaaaaaaaaaaaaaaaaaaaaaaaaaaaggggggcccctcaattatgaaacttgaaaccccggaattaaatccggaccggataactgaaggtgaaaaaatttcccctaatgggggcaatttaaaacctggggaaaataagggaaaaagctgttccgggggaaaaatacttttcccc

SEQ ID NO: 99059 - DNA, 481 bp, Zea mays
  Clone ID: MRT4577_21853C.1
cttgttgcctcctatacagccgccccccttttttttatttttttcgttgcaataaaattatcccgggacctttttattaaaaattgggggtaaaaaaaccaccacacccctaccaactcaaattttaatccaaacaaatgtcccacaccccaaaaaacatggtttaccacttattttatgaaaatttaccagactctttataccttctaaattcgttaaactaaactaacaagtcccaaggcctcctttaaatttttaccatccggaccagaattttcttaaagtttaataccaaacaaacaaaattttcggatctaatcaccccccccccagagctcataatctcattcattcctttactcccaattctaccctatgtaattttatgcaaccaaatccctaaccattactaaaaattttctccccagtcacctgaggtttttcatttaataattcccacacccacaaacccttgcccccc

SEQ ID NO: 99060 - DNA, 941 bp, Zea mays
  Clone ID: MRT4577_21854C.1
gagccgaaaccctagatctcgccgccgccctccttggctcccgctgctctgctgctgctccttggctcgctctgggagaagacgaagaggagaaaagaaagctgaccatgaatccagatccaatggaagtgcaagaaccaccaccccataggaacgagaaaaccatctttgagatgtgcagagaagccagaaactttcgtactaatgctaggaggtgtggcactcttcttcagccctacgaatttagctgtccacaaactgcagaacttggatttaaaaatggttatatctattattcaagcaaggcaataaagtttgctgcggatatagaacaaggatttgactcagaggaactgcagaaacgagctgccaccttctgggttctgaatgaagtgccttttggtcagctaaacccattggggctaaatccatccgttgatgtagggattgttaagacctacggcgtggcctataatacccttattggaaaaacaattattgccttggctcgctctcaacaaagtgtgctctcctggatagcaaatccaaataacagtatattcgttcgtgatcagttaagaaatagtattaggtctttgtatgtggcactggagaggttatgggacaaacagtggacagtagataatgtggaagatattggaacttacgctattaatgagaatatgatccaaattatgccattccgagttcgtggaaggactcttgatgatgagatgacacctaggcagggtttgcaactactgatacagaccaatattttgcaacattggccagatgatattgaactggcgcacttcagggcatccttctcccctctttattctctagagattacatttgcttatcaatccctttatctccatgtcactttacattgcctcgtacacttgtatttgcccatatattagtagtctttttga

SEQ ID NO: 99061 - DNA, 384 bp, Zea mays
  Clone ID: MRT4577_21855C.1
aaaaacaaaatcgggttttcatgaaatgtaaaggaaaccgttctgggggtacctaggccggcgggggtgcatagactggtaaaccattgggcaaaacccggcttggttttggaacaactttggagcaaaaaccggtttgggggggaaacaaaaaccctttcacctaaagaactatgcgacgctggtactacccctttcgagctttggaaccctccaaagcattggatcaaagctcactataactttttgcctttgcacccccggatgttttccccttgacggggaaaagctccggggggaaaaacaaattgctccacctggaaactttgggggggaggcttgcttaccataacccatttttggagggttttttaacttcctttt

SEQ ID NO: 99062 - DNA, 688 bp, Zea mays
  Clone ID: MRT4577_21856C.1
agcagtggtaacaacgcagagtactttttttttttttttttttttttttttttggctcattcggcctgccaactgatttctagacttactataatgagatggctaaagtccatttcctaatgggatgtgctgacccaatgccatcaattccagaaacaaaaaggtgagccaatctttacctaactagagctcactaaatcagttaatcaactgctgttaggcactttaactatctgaatataatcgcttgatgatgggtataggtactcatcaacattaattacttggtttaatcattttagatattaagacaacataaccaaggcatactcggactgtcacagatgagttagctgttacccaagctaatggaaacgtcataagaggaaaaccaataggaaaagaccacctcaaatcagggaggtttcaaacattagaaattgaatagcaaggccccaaggaagatagatgaagcagcgaggaattcagtgcacacaggaaatgatgttgaatcaaaacaagatgatatggtaataaaagtggtttgtcctaacgtgggcaataaaaaggaactacatcagatatcacattggacaatttaaatgaacaaaggaagtttataacttaccagctgttgtgcatggtgttaaatcaccacattcttgtgtgatatgaattcatatccctt

SEQ ID NO: 99063 - DNA, 277 bp, Zea mays
  Clone ID: MRT4577_21857C.1
gtcgtagtagccgcttgatcaatctccctggtcgctagcacggccggacacagtacacgaaggtgcagggcagttgcagacatctgcaagaacacccaggtcgcggatctgcttcaccgtgtggacctcctagccctgccagtcgtacatctgtgccgcactcatctaggtacgatcatcaggaccatttcaactatgacgccgcgtgccacgagtacgatcagttctccacttccaactggatgtatagaaaccaaggcaagaccagtgtccgctc

SEQ ID NO: 99064 - DNA, 535 bp, Zea mays
  Clone ID: MRT4577_21858C.1
aaaaaacacaaaaatcattgttcgaaaattccttttaggggcgccaaaaggaaaaatacaagtctcaggagctttactggtagtaaagacaacagacaacaaacccctgaaaaggccgaccctgcgctccccaaacaaacaggaaacccgggggggaacagtccacccaataacagcaacaaccggatacccaattttaggggcaagttatccaggccctggaaaagcaaacccgggatcgcattatttttttttgggggccgccttggccaccttggcgccgggtgggccctttttctccacacttttggggactccaacagcacccgtttgccttatggggggggcgggaaccctacccagggggggatccccggaaaatgtcccccccaccatagggtgggggggaataattttccccataccagcatcaccgtttttaaggaacttgggctccttttcgagctccttgccaaatcgcctgtcgattttgggagtggcctcaccaaacttgcccgcgatggggggggggggg

SEQ ID NO: 99065 - DNA, 155 bp, Zea mays
  unsure (1)..(155): unsure at all n locations
  Clone ID: MRT4577_21859C.1
tttttaaaaacattttcggttcaaaccccnaccccctttaccaaaaattattacgtccactctccccgtgggaaatggtaaaccaccccaccccccaaagggcaaagaaggccactgatctatgccactagccttcttgatagctcgtctacccc

SEQ ID NO: 99066 - DNA, 290 bp, Zea mays
  Clone ID: MRT4577_21860C.1
atgtacgacaagctccggcgcagccgccccttggacgcggtgcagagcggctgctccgcgctgtccatcgtcaagcagggggacctcatggtcgtcgccaacgtcggcgactctcggagcccagccaagagtcatcagtactcggtatgtcgcgcgcgttcgacgactactatatcgaggactgtggcgtcatcttggcgccagaggtgacgcaggggaggaccgacaacaatgaccagttcgtcatcctcgccaccgttggggtagcttttgtgtcgacttgcctttaa

SEQ ID NO: 99067 - DNA, 981 bp, Zea mays
  Clone ID: MRT4577_21861C.1
cttcaggcttccagcgatgtgttcctgcgcctgcggcgcctcctccccccgctctgccgccccgccccgcgccccccgccccctcccccctgcccccccgggctgtggatgcgaaggaaggtgctggagctgtcaatgaggacgatggagagttgggggcggaatggagtgcgggtggtacgaggagacggcggcggaggcagatggcgaggcgatcggctctgcttgcgaagcaggtgattagtgtgacctcggcgcggagcctcgggttcgtgtcgcagctctggatcgacaccgcctcggaggcactcgtgttggggtcgctcatcgacgacaagaagaaacttggcgactgccagttcgacctctagaaacagtcctacgtggccgcatgtgccgctatgtacgacaagctccggcgcagccgccgcttggacgcggtgcagagcggctgctccgcgctgtccatcgtcaagcagggggacctcatggtcgtcgccaacgtcggtgactctcgggttgttctgggcaccgcattcgacgacgccatcacgtcgtccagctcatcgtccacctgaagcccaacctgccacaggagtagcgcatctggtggtgcaacggccaggggtactaccttgctgatgagcccagggtgcacttgttttacagcccaaccaagagtcatcagtactcggtatgtcgcgcgcgttcgacgactactatatcgaggaccgtggcgtcatcttgacacaggaggtgacgcagaggaggactgacaacaatgacaagttcgtcatcctcgccattgttggggtcgcttttgtgccgacttgcctttaattctcttcgcaaacacacacacttgcctttttgtttaagcaaaagcgtatggtggtacgtgtctgatgactaacgataacgatgtacgggggaatttcttcctgcatgtgtggaacgtgctctccaatgacgagaccatgc

SEQ ID NO: 99068 - DNA, 1285 bp, Zea mays
  Clone ID: MRT4577_21862C.1
gaaataaattctttattacaaaatgattacaagtttatcaagatattattatacctcatcggagtgattacaaaagattacaaaagaaagtgattcaaaagaattacaatttgaaatgttataaagtattcgtaaatttgaaaatatatgctagcttaagtgacaatcctcattaaagaaactatagaagggatatacttatataagaaggccgagcccaccggcacttagcaccatccacaacagaacaaaattacaacctgggataacactacgttagtgttgttaaatgacggccacttagtgagcatctcccatcctagtacttcatcagatcatccattcttcaggtttattcatcagcatcaccttgagattaatccatcctttgtcctccacattacgtgatcaattatcgtacccttacaaagcacacaccacacagacacatatgacaccccaacacccccgtcttttagtaggctataaaactttcctttctctatccagggtcaaaaagagagcgcaagttcttggctccagcagaaacccacaatctcatctcgtctttaaatccatcctctaaggtattaaggcagggtcgagctccttcaaaaacacacctgtttcgctgcttccaaatactccaagccccaaggattatcatactattaaaccccttttttttgctcttaggaatcttggttgaagcctttctccaccattcagcaaaaactgaatctcttctcttaggacccacagaagagagaccaatgggggttaaaatattatgccaaaactgtcttgtgaagacgcaattagatagaatatgctgcacagtttcgtcttcctggtcacatagaacacagaattcaggatgctgaagtcccctttttttaagtctgtccgctgtccaacatttgttatttatggccagccaaacaaaggtcttacacttaggcgctgcccagctcttccaaattcttttccagggctcaaaggattctgctccaatgaataaagctttataggcagatttggaggtgtacagaccatcgttgctaaatatccacacatgctgatcatttgaattttgaagctgaaaagattcaattacctcccataattgtagatattgctcaatctcagctagggagagattcctctggatatcttgaacccagaaatgagaggtgagggcctgctgcacagtccttacttttttaaacttcatcggaactgcagcagcaataaggggagctatatccacaatagaatacccaac

SEQ ID NO: 99069 - DNA, 253 bp, Zea mays
  Clone ID: MRT4577_21863C.1
cttcgattctctccgccggtcccacccccaccagtgccaccactcgccagctcgccacttcctcccgtctcctcccttgcagaggcggcgcgtaaaccccgacggccgcctctctcctccacgccgtcgccgccgccgcctcgctcctgagctcccccccccacccccgttaggatgtcgccgccttacaccccatcgcgtgtgccccatccttaagccccgcccccccctcgaactttaaccatatccaccc

SEQ ID NO: 99070 - DNA, 212 bp, Zea mays
  Clone ID: MRT4577_21864C.1
cacccaaagagaagccataatgcatttggttttcaagttcacgtacgcatgacaaatttaaccgggattttttggcattaaacggccaccatttgccttggattaaatcaaacttaaccaaattaaggcggcagggctaccgaccaaacccgaaggccatttggaaaatttggaacttcaggcggcgccacacaataaattttggggaaaaa

SEQ ID NO: 99071 - DNA, 328 bp, Zea mays
  Clone ID: MRT4577_21865C.1
gcgttttgcgtgctgaagcaaacgtggggcccgacgtccctattgccgaagagagcttcgtcagaccatgccgatgacctccagctaggcgcgagcatgagcggttgtggcggatggagcatgaacgaccacatggtactcctcacgtgtgacatctacctagaccagacttccttcttacaggcggatccaaagaatcttgatgaattattcgacgcgacacccatgggatctgaccggacagcttgcaatgctggtgtggatcccatgaacacggggtatggtgatgactctgctgaactcaggaattccaagcatagtattaggg

SEQ ID NO: 99072 - DNA, 1055 bp, Zea mays
  Clone ID: MRT4577_21866C.1
gtgcggcgctcgggccggcccggccgggagccgcagtccaccagagcgcacgcgcaaacaagaggaggagagaagctgccattgccgacgaccgccaaggaagggattccggaaggagggggaacccacgggaggcccagcgctgggatgttggccgcggacgtcagctccgtcgcgaggctgctccgcggggaggcggtgaagaagggcgggccggagatcgtgacgatggatcttctcggcggttgtggcggcggcgtggcagcggaggacgaggtcgtggacctcgatgtcacggtgcctgccggctgggagcgacggcttgacctcttgtccggcaagacgttcctgacccctcgccaccagagcgtgcaaggcggtcaccaagacctcaaccttcctcctccggcggcaggatccgcgtcggcgccaaacaccaacaactcgtcagcagcggtctgtaccctcgacatggtccgctccgccctcgagcgcgcgactgccggaaggaccgccgcgtcgcctgcaacgtcttccacatcgtccgcgtccacctcgtcgtcctcctccgcgggaaagcgcaaccgccggtcgccgctgcccgcgactcccgcgatgcgcgcagccgcgtgcccgtcctgcctcacttacgtgctcatcgccgaggcggacccacggtgcccgcgttgcgcggccagggttccaccgctccgcggtaaggccgccggcgccgctaccgtaggtagtggcaagaagcctaggattgacctgaatgcggctgctgatgagatggagtgaacggagaaaaagattagaggaaattggaacaggaaatataatcaggaaacgggtttcttttcggcaaaaaaaaaaaaagatagaaccgtctgatcatagtatagggggcctctatgtttatatttattaaagttcgatcatagatagaaaaaaactggtgggttacagagtataggagcagattttatttagtttattccagttttgttggttataacgttgtgcttatgctgctatattaaagcatcaattgcatc

SEQ ID NO: 99073 - DNA, 989 bp, Zea mays
  Clone ID: MRT4577_21867C.1
aattcggcacgaggtccatctcctggtgcttctctcaagccaccgacgctcaggctctctacatcctttagcaggcgccaactccctggagctcgccttcctgctggccgcccccagcaccgacgccccttctttttccccatctccttccttggcgcgctcgcccaggtcacgcgtgtccctgctcgcccaggccgcgacctcgccaaaccgcgcagtccctgctctccttccccagccgcgctcagcccagcccttcctccttcgcccttgtcgagctccctcagctcgcccccaaccacaactgcacgccaacctcgccctaggccatggagcagcaacaaccatggaaccctttcgtgtcgcgccctcgatgtgctcgacgaaagttggttcgatgaacaggttggctaatcgcgatgtgtggaggagacaaatttctaggatctgagggtaagagaagccaagacctagagcgatgatcactaggtgttcggtgaaaaggatgaactggtgattgtggttggtcttgcgaaatccgagttctattttatattggtgttgtgcggtgtgatctccaattccatgttgctgatgtcttgctccatcatgaccttagggaaggatgttttcctctaaattatcgtaataattatgctgggtttatgtgttgttttagcatacattgtgaaagcatttcttgctcagcaggacaaggaggggctttcatgaaataactattgaccacttatgttccttttccaaatataaatcaattagaagtgggtcttggcaataattagctcatgactatttgttgttggccctttggctgcaatttctgaatagtttgatgtgaagggactttgctgagctttgtgtacttgatatttgaatagtttggagaaaggattaaaatctaccctcactaattttttagatgccccttaaaactgattttgaggagttattttctagggagctcttgg

SEQ ID NO: 99074 - DNA, 593 bp, Zea mays
  Clone ID: MRT4577_21868C.1
cttgacggctccgacatgcacatcatcaaacacttgcagcgtcctgtcgctgacagcgaaagggatagtaccttcatgatgatcaagtctgatcgaggccagaggccactcattggtgacacatcacaccgttttgagaagaaacggcttctacctcacaggccttgaatcttgagaacgcggagaagccttgagatgataaggactaccgcgatctcgcctcccagatcttcttccagcgcctacaggactacatcatctctggacctgtggaggacatgctactgagacggcaatagcgacggcacgactggacgaatgatctttgtggtcaccgaccccctggatactgagcacgagaccatccagggtcactatgatgtcatacattgacagaaatgtcattcttggaaatgacactgatgtgtagagggtaatatagagattgtgctgtggttcccctagggccctgatgattggcagagaagccatgacccctggatctaccagaatgaaacatggaaatctctctctctatctgtgagagccagaggaagcatgtcaccatttgtgctttaacaacggtttcgaaa

SEQ ID NO: 99075 - DNA, 4731 bp, Zea mays
  Clone ID: MRT4577_2186C.1
atggatcctaagggaaatgggatcgtgatcaatgataaggagaaggagtccttcgtcaacgagccgaaagacgacaagcctatcgactcgggctcaggccacaaacgaaaagatgggaagaagaagaagacgaggcgcatcaaggagatcatctactacgacgacagcgacgagtcctcttcttcccaaaaggacgactacgactatgagaaacggaaaacggtcaattcgaacttttcttttgattactctcgtattccgcaaagtacaaatgctcatttgctctccattccacttggcaaacctcctcactttgatggggaggactacggattttggagtcataaaatgcgtagtcacttgttctctctccatccaagcatatgggagatagtagagagtggaatgaaatttgatagtactgatagtcccatgttcattaacgagcaaatccacaaaaatgcacaagcgactactgttcttctagcttcattgtgcagggacgaataccataaggtaagcggcttggacaatgccaagcagatctgggacaccctcaagatctctcatgagggaaacaacatcaccatgctcaccaaaatggagttggtggaaggcgaacttgggagattcgcgatgataaggggtgatgagccaacccaaacgtacaaccggctcaagacccttgtcaacaaaataaggagctacggaagcacacgatggacggaccacgacattgtccgcctaatgctaaggtcctttactgtccttgatccacatcttgtgaacaatattcgtgagaatcctaggtacaccaagatgtcgcccgaagaaattcttgggaaatttgtaagcgggcggatgatgatcaaggaagcaagatacgtcgacgatgaactaaatggaccaatccaagagcctcaaactattgctctcaaggcaacgaggagcaaggaggcgctacctagcaaggtggcacaagttgaggcggcagggctcaatgatgaagagatggccctcatcatcaagcgcttcaagacgacgctaaagggtcgcaaggggcaaccaagcaagaccaagacaaaggggaagcgctcatgcttcaaatgtggtaagattggtcattttatcgctaactgtcccgataatgatagtgatcaggaacaagggaacaagagggagaagaagaaggcatacaagaaggctaagggcgagacacaccttggcaacgagtgggactcagattgttcgtcatccgactccgacaatgaagggctcgccgccaccgccttcaccaagtcatccctcttccccaacgagcgtcacacatgcctcatggcgaaggataagaaggtatgtactcgagacaatactacttatgcttcttcaagtgaggatgagtctagtgatgatgatgaaatagattattcttgtttattcaagggtctagatagaaccaaggttgataagattaacgaattaattgatgccttgaatgataagaatagattattagagaagcaagaggatcttttatatgaagaacatgataagtttgtagaggctcaaaaatcccttgctttagaaatcaaaaggaatgaaatgctttcttgtgaattatctacttgccatgagacaatttctagtttaaaagatgttaacaatgatttaaatgctaaactagaagtagcaaatagatctaactcttgtgtagaacatgttgtgatttgcactaggtgtaaagattttaatgttgatgcttgtagtgaacacctagtgtctattgcaaagttaaatgatgaactagctagtcttaatgcccaacttaagactagcaagagtgaatttgataagttaaaatttgcaagggatgcctatacgattggtagacacccctcaattaaggatggacttggcttcaagagggaagccaagaacttaacaagccataaggctcccatctccgccaaggagaaagggaagacccctatggctagtagtgctaaaaaaaccatgctttcatgtatcatgataggagacattctaggaatgcctatagaagttatgatgcttttgattctcatgccatgtttgcttctagttcttcctatatgcatggtttatgcatccgggggctcaagctggattatcgacagcggatgcacaaaccacatgacgggagagaagaggatgttctcttcctacgtcaagaacaaggatccccaagattcaataatattcggtgatgggaaccaaggcaaggtgaaagggttagatgtgtctgtctttagaaggtgtgatggttcactagcttttaagggtgtactagacgacaaactttatttggttgattttgcaaaagaagaggccagtctagatgcatgcttaattgctaagacttgcatgggctggctgtggcatcgccgcttagcacatgtggggatgaagaaccttcacaagcttctaaagggagaacacatagaccttgtgcagcttgtcaagcaggataaatctgaaacccaagggaccctcaagcgcttcctcaggagagctcaaaatgagtttgagcttaaggtgaagaagataaggagcgacaacgggtccgagtttaagaaccttcaagtggaggagttccttgaggaggaagggatcaagcacgaattctccgctccctacacaccacagcaaaatggtgtggtagagaggaagaacaggacactcatcgatatggcgaggactatgcttggagagttcaagacccctgagcgcttttggtcggaagccgtgaacacggcttgccacgccatcaaccggctctaccttcaccgcctcctcaagaagactttgtatgagcttctaaccggtaacaaacccaatgtgtcttactttcgtgtatttgggagcaaatgctatattctagtgaagaagggtaggaattccaaatttgctcccaaagctgtagaagggtttttgttaggttatgactcaaatacaaaggcgtatagagtcttcaacaaatcatcgggtttggttgaagtctctagcgacgttgtatttgatgagactaatggctctccaagagagcaagttgttgatcttgatgatgtagatgaagaagatgttccgacggccgcaatacgcaccatggctattggagatgtgcgaccacaggaacaaacggagcaagatcaaccgtcttcctcaacgatggtgcatcccccaactcaagatgatgaacagcctttcagggtagaagaggccttgctagatctggactgggtgttggccatgcaggaggagctcaacaacttcaagcgtaatgaagtttggacactggtgccttgtcccaagcaaaatgttgtgggaaccaagtgggtgttccgcaacaaacaggacgagcacgaggtggtgataaggaacaaggctcgacttgtggcaaaaggttatgcccaagtcacaggtttggactttgaggagacctttgctcctgtggctaggctagagtccattcgtattttgctagcatatgccgctcaccattctttcaggttgttccaaatggatgtgaagagcgctttcctcaacgggccaatcaaggaggaggtgtacgtggagcaaccccctggcttcgaggatgaacggtaccccgaccacgtgtgtaagctctctaaggcgctctatggacttaagcaagccccaagagcatggtatgaatgcattagagactttttaattgctaatgctttcaaggttgggaaagccgatccaactcttttcactaagacttgcgatggtgatctttttgtgtgccaaatttatgtcgatgacataatatttggttctactaatcaaaagtcttgtgaagagtttagcaggttgaactacttccttgggttccaagtaaagcaactcaaggatggcaccttcatctcccaaacgaagtacacgcaagacttgctaaagcggtttgggatgaaggacaccaagcccgcaaagactccgatgggaaccgacggacacaccgacctcaacaaaggaggtaagtccgttgatcaaaaagcatacctgtcgatgatagggtctttactttatttatgtgctagtagaccggatattatgcttagcgtatgcatgtgtgctagatttcaatccgatccaagggagtgtcacttagtggccgtgaagcgaattcttagatacttagtcgctacgccttgcttcgggatctggtatccaaaggggtctacctttgacttgattggatattcagattccgactatgctggatgtaaggtcgataggaagagtacatcggggacgtgccaattcttaggaaggtccctggtgtcctggaattctaagaaacaaacttccgttgctctatccaccgctgaggccgagtatgttgccgcaggacagtgttgcgcgcaactactttggatgagtcaaaccctctgggactttggctacaatctgagcaaagtcccactcctatgtgacaatgagagtgctatccgcatagcggacaatcctgttgagcacagccgcacaaagcacattgacatccgacatcactttttgagagaccaccagcaaaagggagatatcgaagtgttctatattaacaccgagaaccagctagccgatatctttaccaagcctctagatgagaagaccttttgcaggctgcgtagtgagctaaatgtcttagattcgcggaacttggattga

SEQ ID NO: 99076 - DNA, 489 bp, Zea mays
  Clone ID: MRT4577_21870C.1
cggacgcgtgggcttccataagagtcttagttctaactataaatacacatatctcactctctctgatctccgcttctcttcgccaacaaatgtcgaccgctcctctctccggcttctttctcacttcactttctccttctcaatcttctctccagaaactctctcttcgtacttcttccaccgtcgcttgcctcccacccgcctcttcttcttcctcatcttcctcctcctcgtcttcccgttccgttccaacgcttatccgtaacgagccagtttttgccgctcctgctcctatcattgccccttattggagtgaagagatgggaaccgaagcatacgacgaggctattgaagctctcaagaagcttctcatcgagaaggaagagctaaagacggttgcagcggcaaaggtggagcagatcacagcggctcttcagacaggtacttcatccgacaagaaagctttcgaccccgtcgaaaccattaagc

SEQ ID NO: 99077 - DNA, 581 bp, Zea mays
  Clone ID: MRT4577_21871C.1
tcgtaaaaaaaaaaaaaaaaaaaaaaaaaaaaaaaaaaaaaaaaaaaaaaaaaaaaaaaaaaaaaaaaaaaaaaaaaaaaaaaaaaaaaaaaaaaaaaaaaaaaaaaaaaaaaaaaaaaaaataagggggggccgttttatagattccaggctctggtccccgttctccaacctccttactttttttttggggggccctacttccttaaccggcccgtctttttccccccttgggccggggaaacccttgcggtaccccacttaactctctttcctccccatccccttttcgcctggtgggttaaatgcaaaaggccctggtaccgttcgcctttcccacacttttgccacctttaacacgcaatgggacccccccttttgccggcgccttaaccccggcgcgtgtgggtgttccccctcggttttccggtcccttgccagggtccctagcccccggttctttttcctttctccccttcttttttcccatttttggccgttttccccctggacgcctttaaatcggggctccccttttaggtttccggttttggccctttcccccccccctttacccccct

SEQ ID NO: 99078 - DNA, 126 bp, Zea mays
  Clone ID: MRT4577_21872C.1
gttgattccgttgtcgttgcgttctcatctcgacgctctatggtcgaggtgtcgtgacgtgtactcgagttccgcggaatgagaggtcgatttggagaagaggctgagtgggagggtcctacttcc

SEQ ID NO: 99079 - DNA, 501 bp, Zea mays
  Clone ID: MRT4577_21873C.1
aaaaaaaaccggggggaaaaacctggataaaaaaggggcccattcccttcaagggcctaaccgggcgggccccccccccccttttggtttcccccccgccaacaaaagcgtgccccccccccaaccccccaaaaaaacccccccccccccattaattccatttttgccccccaataatgggaaagccaagggaaaaaattggaaccgacttggctttaccaaaacccacccccctggggccaaagccgctggaatgtttttcccgaggcaagccgtaatagcataaaaccggcccccccgtttcccccccgggggaaacctatatgccgatctttttctcaaacctctgggtctgattcaagaaaatcccgggcatcaggaccgggggggcaatcctgaccccgtcccccgggaaacccggggaaaacttgaaggggccacccctcttggagggtttcacagcccagtccaaaaaccccgggtatgggccccccccccccc

SEQ ID NO: 99080 - DNA, 292 bp, Zea mays
  Clone ID: MRT4577_21874C.1
aatcattataataagtgttatctcaataaaatgatcattgttttacaacttcaaagactgataaaaccataatttcacaccaacataaatactccttaaacctaatgactaatattcaccaactgtcttaatagtgaaataaactacatcaaattgcacttcccaaaatttgcgctttctaaatggtaaatatacgcgccctgctgcgttaaataaagcgccaatattgtgggatatatcgctagcgtgatgcgttaatttgccatttctctatcactgactcgtttagctt

SEQ ID NO: 99081 - DNA, 388 bp, Zea mays
  Clone ID: MRT4577_21875C.1
tcgacccacgccgtgcggtccacaaaccgccacgcctctcaaagattcgattccctcctccctcccactcccacatggccggcgagctgcgccaccgccgcgtgccgtcggaggacggggacgagggcgccgccgcctctcaaggacccgatccagccgccggcaacggcaaggccggcacggcgtctgagggggcggagccgcggcgcggcaagagggacgcgctcgggtggctggagtggggccgcgggtggatggccgtcgtgggggagttcctattccagcgcatcgccgccagccacctcgccaacccgctcgagctgcccccgctcgacggcgtctccgtcgtcgtcaccggcgccaccagcggcattgggctcgagatcgc

SEQ ID NO: 99082 - DNA, 349 bp, Zea mays
  Clone ID: MRT4577_21876C.1
ctcactcggagacggcgagaatcctggagatcatacctctggccgagcactccctgctcttcctggcaaaggacgagggaagttcacatgcagcatggtccttggcctactataggggctcgctgactggaactagacctgaacctagcctttgatctaccactctcccgggaggcgcatgtgaccccagattattctgtgaaagggtcaagtggctgccgacggacctgtggagaatatttttctatgaatcattcgcggagatgatgtgtggggtgcaaagtggggaacgggacaaaaacaagtctatctcaaagaacatgtacatgcactgcatatgttcacatcc

SEQ ID NO: 99083 - DNA, 410 bp, Zea mays
  Clone ID: MRT4577_21877C.1
cccacgcgtccggcatccagctcatcaaagttgtactcgctgtggtctgtgggagctttctccatttgcatccaaattaatgccttgatgttactaccttctacgtttacattacagtactttgggtgctgctgctttgacccatcctcggctttgtatcctcctcctgtcctccatatcgcttttgccgaaatgacgatgacgacggggctatgtgcatacaaaataaacatgttttaagatggggaaaaaagctatagatacctagccttgagggctagtttggcaacaccattttctcaaaggaaataaactaatttcttttaagaaaatgaaaattatttggaaagacgaggatgtcaaagtagccctaaatattagattcctccgctggcactggcaggcagcta

SEQ ID NO: 99084 - DNA, 613 bp, Zea mays
  Clone ID: MRT4577_21878C.1
ccggccgggatgctcctgtcgggctgccctcctgctctcgatcgaacaagaggtgtccgtccaccgacaactcggcacaagaactgtccagatatctccaactagtgttaggttatcttatcgattcagattcgtcttagcttcctgccaaatccgttgatctcagcttaatcagccatcatccagcagggcactgacacttctgcaggacttgaggtctgacggtcaatcaagtcgtctgagtgagccatggcggaggccaaccgcaggacgacgccccggccccgcgcggtgccgccgctgctcgccgaggtggaggtctccaacctgcccggcttcgacgtcaccccaacgccgagcccgcacggccaggacgccaccaccccgagcccgcgcccgcccacgaagccgtcgtcccgccccggggtgccgccgctggaccgcgtgccgtgccgcagcgaggtggtgttcccgccgctggactcgccgttccaggcgccgggctaccgctccgtgcagcccgtctccataagcctcccggcgtcgcccatcggcttcgggttcggcgtgcccgccatccccgcgacggacaacgccgccggactcgcacgac

SEQ ID NO: 99085 - DNA, 764 bp, Zea mays
  Clone ID: MRT4577_21879C.1
atctccggtcgggctgccctcctgctctcgatcgaacaagaggtgtccgtccaccgacaactcggcacaagaactgtccagatatctccaactagtgttaggttatcttatcgattcagattcgtcttagcttcctgccaaatccgttgatctcagcttaatcagccatcatccagcagggcactgacacttttctgagctggtctacctcgctcgctccccagctgcaggacttgaggtctgacggtcaatcaagtcgtctgagtgagccatggcggaggccaaccgcaggacgacgccccggccccgcgcggtgccgccgctgctcgccgaggtggaggtctccaacctgcccggcttcgacgtcaccccaacgccgagcccgcacggccaggacgccaccaccccgagcccgcgcccgcccacgaagccgtcgtcccgccccggggtgccgccgctggaccgcgtgccgtgccgcagcgaggtggtgttcccgccgctggactcgccgttccaggcgccgggctaccgctccgtgcagcccgtctccataagcctcccggcgtcgcccatcggcttcggcttcggcgtgcccgccatccccgcgccggccaacgccgccgactcggacgacgactgactccaggccaacgccgcggccggcgagccacagcaggcgccggcgcatgcgccgacgacgtccgcgcgggagaatggatgaagagggggcgttcggatcatgcaccagacggacaagctggtgt

SEQ ID NO: 99086 - DNA, 528 bp, Zea mays
  Clone ID: MRT4577_2187C.1
atgaaggacgccaagctcgcgaagacaccaatgggaactgatggacatgtcaacctcaacaaaggagactccgattatgccgggtgcaagattgataggaagagtacattagggacgtgccaattcctaggaaggtccttggtatcttggagttcaaagaaacaaacttctgttgccctatccaccgctgaggccgagtatgttgccgcaggacagtgttgcacgcaactactttggatgaggcaaaccctccgggacattggctacaatctgagcaaactcccactcctatgtgacaatgagagtgcaatctgcatggcggataatcctgttgaacacagccgcactaagcacatagacatccggcatcactttttgagagaccaccagcaaaagggggatatcgaagtgttctatattagcaccgagaaccagctagccgatatctttaccaagcctttagatgagaaaaccttttgcaggctgcgtagtgagctaaatgtcttagattcacgtaacttggattga

SEQ ID NO: 99087 - DNA, 346 bp, Zea mays
  Clone ID: MRT4577_21880C.1
caggggtggggttttttttttaatagcgcacatgcaaatccccacctgtacatccaaaaataccaaccttccccataatgagcttgcatgcaaaccttatagaaatatggaattaccctttagcctatgtaaacttattatcctctacccaattaaaacaaaatccaaacaaaaaccataaaaatttatggcggggaaaccaaaaggcaaatccaacccaccttaattgcataaccaatactccaatcttataatagaataaacctctcatttacataaataagaaaaaaacccgccacggacgacaaaataatttattcccaccaagaaacaggtctttttttat

SEQ ID NO: 99088 - DNA, 242 bp, Zea mays
  Clone ID: MRT4577_21881C.1
gacccagcggagcacccgccgcgaggcggacggcattcgctgcaggtgaaaccaccccaccaatctgcagaacacgatgtgcatatccatgaatagcagccgaactaggcactcggcgccacagcgatacacatggcgccgccaggaaactaagacgcgaattggggctcggcgtcaacgaggtgactgcagcccgcaggctgagaaattcgtgtcacccacgccgagagtcgagatcgacc

SEQ ID NO: 99089 - DNA, 291 bp, Zea mays
  unsure (1)..(291): unsure at all n locations
  Clone ID: MRT4577_21882C.1
gacgagtgggttgaccttgaaatttttgaccggttttttttnncgggggattgtttgggtataataancccnatcaaaacnccaaataaatcattcttataactattttctatttaaaattattattctcttacaattacacaaaacttactaccctcaaacatataaaaaaaaaatcctacctttccttaataaanaaactaactaacattaattactttncccttaatacccactttttaatcaaaaaaccttttttnctatcttcattaataaaatcatccaaccacc

SEQ ID NO: 99090 - DNA, 859 bp, Zea mays
  unsure (1)..(859): unsure at all n locations
  Clone ID: MRT4577_21883C.1
cctcgaggccggccggggttactcactcaccggcaccgcgccacggccgcgttcgtctcaacaggagccgatggccactctcgcgccacggccacatatcctcctcggcttgacaaggccgcagcccatagcgcttcgtgcctgcgccgccttctcccgctcccgccacgcgccagtcccaccgcgggccgcgcagccgcggcgcgtcttcctcggccttggcgctgccttcatcgaccaggccacccgcatggcctccggcggcacctcgtcccgctctttcgttgccggagcgcggccgaggcaaggcgtttccccagtcgagcagattctcaagaatgtcgagtggccagatgagttccctttcaagcctgaggacttcagccgcttcgacgaatcatcagatactctgttctactcggttccacgttttgtcactcacattgatgaccaagcaatccaagctctcacagagtactattctgaagttcttcctccaagtaatactcctggggtggccattctggacatgtgcagcagctgggtcagccattatcctcccggttacagacaagagaagatcgtggggatgggtatgaatgaagatgaactgaaaaagaactcggtactgactcagtatgtcgtgcaagacctcaatgtgaacccaaagcttcctttcgaagataacacttttgatgttatcaccaatgtggttagtgtagattaccttacaaagccaatagatgtttttaaggagatgcgacgaatactcaagccaagcggncttgccataatgagctatatctatatggacctcaactggtgatgctgatcatgcatggatagntggtgcttactt

SEQ ID NO: 99091 - DNA, 1574 bp, Zea mays
  Clone ID: MRT4577_21884C.1
ctcgaggggccggccgggaaaaaaaaaaaaaaaaaaaaaaaaaacgaacccaagcccaatccctatcttccgagatttgtctgcgcccctgcggcgcgcatggcgccacgactgaccgtggccttgggcggcgctcgggcatgagtacatggcgctcggtggcctcgcgtcgcgttactcacccaccggcaccgcgccacggccgcgttcgtctcaacaggagccgatggccactctcgcgccacggccacatatcctcctcggcttgacaaggccgcagcccatagcgcttcgtgcctgcgccgccttctcccgctcccgccacgcgccagtcccaccgcgggccgcgcagccgcggcgcgtcttcctcggccttggcgctgccttcatcgaccaggccacccgcatggcctccggcggcacctcgtcccgctctttcgttgccggagcgcggccgaggcaaggcgtttccccagtcgagcagattctcaagaatgtcgagtggccagatgagttccctttcaagcctgaggacttcagccgcttcgacgaatcatcagatactctgttctactcggttccacgttttgtcactcacattgatgaccaagcaatccaagctctcacagagtactattctgaagttcttcctccaagtaatactcctggggtggccattctggacatgtgcagcagctgggtcagccattatcctcccggttacagacaagagaagatcgtggggatgggtatgaatgaagatgaactgaaaaagaactcggtactgactcagtatgtcgtgcaagacctcaatgtgaacccaaagcttcctttcgaagataacacttttgatgttatcaccaatgtggttagtgtagattaccttacaaagccaatagatgtttttaaggagatgcgacgaatactcaagccaagcggccttgccataatgagcttttcaaaccggtgcttttggacaaaagctatatctatatggacctcaactggtgatgctgatcatgcatggatagttggtgcttacttccattatgttggaggttttgaacctccccaggcacttgatatatctcctaatccaggacgaactgacccaatgtatgttgtatgctcgagaaagaaaatagggtaactaaacaatatatttggcaagtgctatcaagaaacaaatagaaggaaaaatacaagaagcaagttgtttggccctgatcgcaggacctattggtgagctgatgtttccgtgagtaatgtaacgacagaaaaaagaagcaactactacataaactatttatagaagcggcagattcacttcataggttgtagcaactgtctttactaaaagtgtgtttggtttgaggaatgaagtgatccatcttcttctcactcctcacttttttatttggtttgtgtaatagaatgagttgatccatcaccactccaaaaaaaaaaaaaaaataattagtatatacatgaggggtgggttgattccaccaaaattgatagaatgaggaaatgatttattaaaaataatagtatttattaaataaaaaaaataa

SEQ ID NO: 99092 - DNA, 347 bp, Zea mays
  Clone ID: MRT4577_21885C.1
ttctgttgttttcccctaggggggttttttttttttttctttccatgatcttttttttgttattttttaaaaaagtgtctttggaaacaacatgcttcaacaggggggggcgcggggcaccctttgttgatttatttctggaaacacccagaaatgtgtggacttttttcccttggggatggttacctggggacaggagccaactttggggccatcgaaacatggggttgggtcagctcttgatacccttgggcgaattttttgggttgggggggggtgacctccaaaatgcccttcgctttttgttgaccccttttccccccctgctggaaaaaagaggtggttgc

SEQ ID NO: 99093 - DNA, 896 bp, Zea mays
  Clone ID: MRT4577_21886C.1
gaggctggccggggaattgaaaactggcggcggggccgggcaggaaaaccagcaccagtttggctcgtctcggcctcggcgcgtgcccccgacccgttgctgaccccgctccccggtgatctgatgtcggcggcggcacgcgcgccaccgccgccgcgcgcactctacgcgccgtcgagaagagtccctttcggtgccgtgatcctatccgcgccgcgacccggggctagggttcgcgcggcgcggcctcgcgaggggaatgttcataaccattgcctgttgacatcgtctagtctgaattcaaattctttgctatgtcctccatgcaattgtgctcaaatggctttggccgacacaagaattgcttaccagcctgaagttgacaagcatgctggagttctggcctatgaactggttcaagggaatcttgttcagtggaattcatttatggacaaatcaatacctgatccaccaacagctgttcttcttcatggcatccttggaagcaggaaaaactggggatcttttgcgaagagattggctcaggaattcccaatgtggcagttcctcttggttgatttgcgctgccatggcgactcaacatcaattaagaagagtggaccacacactgttgcctcaactgctcttgatgttctaaagctgataatgcagctcaggctaacccctcgggtttttggttggtcacagctttggtggaaaagtggccttgagtatggtagaacaagctgcaaaaccacttgctcgtcctgttagagtatgggttcttgatgctactcctggcaaagttcgggccgggggagatggtgaagatcaccctgctgaacttattgaatttctcagaaagatgcctgagcaggtttcttcaaagcaggagg

SEQ ID NO: 99094 - DNA, 439 bp, Zea mays
  Clone ID: MRT4577_21887C.1
gggacctgcattccccttacgtgcactgtatattagccttcctggtgctctggccacgctctttcactctgggcacgccgccgctcagcctaagccacgtgctgaggcttctcgttggtctattcctcggcgacgagcacccagcagtcttgtaaaaatggctgatgatgaggacatccagctctcttgcctgcatacaaatgaactgcaatggacacgggtggatgtgctgaccaatatgcaccaagggcgtgtatgcctagattagttggacgcactcgccacactgatattatggtagcgatgggacacacggactcttatgttggcgatgaggcaccgtccaatagatgtgattctacactcaagtacccgattgagcacagccttgtgagcaacttgcatgacatggatagaatcttgcatcatacttgctaca

SEQ ID NO: 99095 - DNA, 185 bp, Zea mays
  Clone ID: MRT4577_21888C.1
agagacgaggataaaagggctacgatcccatctacgctttcgaagccaggttgatctaattatctaaatacttacccactggtgggccactttaatcttaattccacaacaagaaaatcttaataactctctatgtacctttctgtgaataaattacaacacctccaaattttcattatcaaaaa

SEQ ID NO: 99096 - DNA, 2147 bp, Zea mays
  Clone ID: MRT4577_21889C.1
cgtccgcccacgcgtccgcccacgcgtccgacaagcaccagtttggctcgtctcggcctcggcgcgtgcccccgacccgttgctgaccccgctccccggtgatctgatgtcggcggcggcacgcgcgccaccgccgccgcgcgcactctacgcgccgtcgagaagagtccctttcggtgccgtgatcctatccgcgccgcgacccggggctagggttcgcgcggcgcggcctcgcgaggggaatgttcataaccattgcctgttgacatcgtctagtctgaattcaaattctttgctatgtcctccatgcaattgtgctcaaatggctttggccgacacaagaattgcttaccagcctgaagttgacaagcatgctggagttctggtatggaagctttgatactatttttgcatgggatgagtcctcttctcttgtcctgacaaatgttttgtattcatctgcaggcctatgaactggttcaagggaatcttgttcagtggaattcatttatggacaaatcaatacctgatccaccaacagctgttcttcttcatggcatccttggaagcaggaaaaactggggatcttttgcgaagagattggctcaggaattcccaatgtggcagttcctcttggttgatttgcgctgccatggcgactcaacatcaattaagaagagtggaccacacactgttgcctcaactgctcttgatgttctaaagctgataatgcagctcaggctaacccctcgggttttggttggtcacagctttggtggaaaagtggccttgagtatggtagaacaagctgcaaaaccacttgctcgtcctgttagagtatgggttcttgatgctactcctggcaaagttcgggccgggggagatggtgaagatcaccctgctgaacttacccaatttctcagaagaatgcctgagcaggtttcttcaaaacaggaggttgttgatgctcttgttaaaggacaattttctatggacgttgcacggtgggtggctacaaatctacgtcgaaccagtccattgggtcagcgaccatcttcaagcttctcatggacttttgatctaaatggcatctctgagatgtacaagtcttatgaggatactaacttatggaggattgtagagaatgtaccaagggggttcatattaattttctaaaagctgaacgaagtttgcatagatgggctctcgaagacctccaaagaatttatactgcggaggaattagctgcagatgagggtggaggagttgaaatgcacgtgcttgaagatgctggacactgggttcatgcagacaacccagacggtctctttagaattctttcgtcaacctttcgaatcgaaactactataagaggaatgcaggactgaggatcaaacctttatcgatccaatgacaatagaggggaggcatttctgaatcgattctactgtaagaggaatgcaagaggatcaaaccttaattgacaatctgagaggaggcgctgacactatcagaagatgtgtacattacaagcagggaggtggagccagcatttttctgaatgataggcgtctttgttcatttgttcattctttctttttttttttttacaaaaaaaaagagtatgtaacatgagttatacaactaggctgttcttcgagaaacaacctgtaactgtctgtcatatacttgacgaatgagaagcgttttcgtacctgttttagcctgaacggttcagttgtaagatctcgaattaaactgcctgatttgcagagtctagaaaaaaaaatgttcctgatagttgcctagagagggagggggacggggttgaatagacgacagtacttgattaacttagaacaacatgaacaattgtcgaaatataaaactaagatcttttcttgcagatgtgttgctttcaaataatgcagaataaacttatatgatgtttgaatgcactagagctaatagttggcagttatccaaaaagttatagtaattttcctaatctttccaaaaagttatgaatcactctttttggtggtttaaatcttcggttataggtatttgaagtatggattctgaatctgtctaaatctggacagatgcatctttttcgtgttgattgaccttatagggtattcccg

SEQ ID NO: 99097 - DNA, 718 bp, Zea mays
  Clone ID: MRT4577_2188C.1
taatacaagagatctcttgcttttctaataacctattcttaccattcaaggcatcaattaattcattaattttatcaatattggttctatctaggcccttgaataaacatgaatagtctatttcatcatcgctagattcttcatcacttgaggaagtgtaagtactagtatcacgagtgcttaccttcttttcccttgccatgagacaagtgtgatgctcgtttgggaagagggccgacttgttgaaggcggtggcggcgagtccttagttgtcggagtcggacgacgaacaatccgagtcccactcctttccaaggtgtgcctcgcccttagccttcttgtaagccttcttctttttcctcttgttcccttgttcctggtcactatcattatcgggacaattagcgataaaatgaccaatcttaccacatttgaagcatgaacgcttcccctttgtcttggtcttgttgggatgctccttgcgaccccttagcgctgtcttgaaacgcttaatgatgagggccatctcttcctcattgagtcccgctgcctcaacttgtgccaccttgctaggtagcatttccttgctcctcgttgctttgagagcaacggtttgaggctcgtggattgggccgttcaacgcatcgtcaacacatcttgcctccttgatcatcatccgcccgcttacaaactttccaagtatctcctcgggcgtcat

SEQ ID NO: 99098 - DNA, 459 bp, Zea mays
  Clone ID: MRT4577_21890C.1
gtttccggaacaattgctggatctacatatggcgttgctaagcaggctagcctaatctccgttaaggtcttctctggagatagctccaccacctctattatcctcgacggctataactgggccgtgaacgacattgtctcgcggaaccgtgctagcaaatctgctattaatatgtcgcttggaggacctgcttcatctacctggacgaccgccatcaacgcagcctttaaccagggtgtgcttaccattgtcgccgctggtaatggagactctctaggaaacccccaaccagtctccagcacttctcctgctaaccgacctaacgccatcactgttgcagcactggacatcaattggcgcactgcttccttcaccaactatggtgctggtgctgacgtttttgcccctggtgttaatgttctgtcctcatggattggaactaacactgccacccacaca

SEQ ID NO: 99099 - DNA, 394 bp, Zea mays
  unsure (1)..(394): unsure at all n locations
  Clone ID: MRT4577_21891C.1
gaaataagctactcaatgctaatttattttaacttatttgtagtcacaaaataatattatatcctcctaacattccaccataatccaacttatataatctaaaagaaaacaaatacgtcctaaatatgattatgaagatgggtgggctgttgaagataaccttggctctaggattatcaattgacaactccaaaatcctcctgccactgtgaaaatggctcttgcagctcgttctgccgggggtgttcttggatggccgaacgcagtgcgtgattggggatggtntcacgattcgaaagacttctgtatgtgtctggggatgtgtcatgcccgctgtctggcctgtgtctaagagcgtccgcttcgtnggcggagccttctgctgccttgtggg

SEQ ID NO: 99100 - DNA, 261 bp, Zea mays
  Clone ID: MRT4577_21892C.1
gcatgcagtggtcacaacccagttactcataatatttggattgtatgtgttcgtagatatgcccagaagactagagaattagtgttatataccatatagaacttactgtcagtcaactataaacaggcccaattagaaactgttccattactacgcaaacacatattagaggcctttgctgatgacacattagctggatcttagccaccccagaaagggtttgatttgagctgattgttccagatatgcatattgaatcca

SEQ ID NO: 99101 - DNA, 480 bp, Zea mays
  Clone ID: MRT4577_21893C.1
aaaccccagaccccacctaattacatcccacacctacgagtcgtgaggacacgtcccacctaattacatccgacacctacgagtcgtcaccccatagttatggacacattgtcacatgccctcccccacatccgaacccctgtataccacaggagacgtatcttgctcggcccaacggaacggttgtgtcttggtcttagagtagagtcccaggagcagtagtaggttttctcagggaacgttgctaggaccggggagggtacgactacaaacatcgagacagccggagagtaaaaggtttcgctccttttccatgattacagtccacgcgtgggcccgacattctgggtgggaaactgaaggaaccggcaccgtgaccagggtgcacaattgcgaggtttcgcagttagtagactagggtcgcagcccttgtatcgataaagcacgttgaacacaacacaataatttgctgcccctcac

SEQ ID NO: 99102 - DNA, 193 bp, Zea mays
  unsure (1)..(193): unsure at all n locations
  Clone ID: MRT4577_21894C.1
cggcgtaggagtttttttagggaaggttttnttatataaggggaggagactatgattccaggcaacgtatatacaaagcggtaggaaagtcaggacgagggatacggaatgaagtnnaactgaaaaatcgccacggctggctcatggggacggngaacaaacnnaacagccgggcgggggggggggggggggg

SEQ ID NO: 99103 - DNA, 1673 bp, Zea mays
  Clone ID: MRT4577_21895C.1
cacagctacagggtggaccctgaccaaagcgcccaggtggccgctgccgatggaggcgctcctcaagtgggcggccgagctgggcgtctccgactcgccgtcgcccccttcctcctccccctctggaaacatctcttcgccgtcctgcctcggcggctccctcgtcgtcgccgacttccccgacgccggcgggaggggcctcgcggcggcgcgtgacttgcggcgcggggagctggtgttgcgcctgccccgagccgcgctgctcacaagcgaccgcgtcacggccgacgaccccaggatcgccgcctgcgtcagcgcccacaagccccgcctctcctccgtgcagatactcatagtgtgcttattggccgaagtggggaaagggagcaactctgtctggtacccctacctgtgtcagctacccagctactacactatcttggctaccttcaatgattttgaagtcgaagctctccaagttgatgatgctatttgggttgcacaaaaggctaaaagtgccataaaatcagactgggaagatgcgacaccactaatgaaagaattggaatttaaacctaagcttttgatgtttaaatcctggctctgggcatttgcaacggtatcttctcgcacattacatattgcatgggatgaagctggttgcttatgccctgtgggtgatttgttcaattatgctgctcctgatgatgacactttattggaggacgaggatacagctgaacttacgaattaccagcagaagaatgggatgaccaattcatctgagagattaacagatggtggatacgaagattgtaatgcatactgtctgtatgcaagaaaaaattataaaaagggggagcaggtcctccttgcttatggaacatacacaaacctggaactccttgaacactatggctttcttttgggtgagaaccccaacgagaaaactttcatcgagttggatttggatatttgctcagtgggaacctggccaaaagattcgatgtatattcatccaaacggacacccctcatttgcattgttatgtgcattaaggctttggtcaactcccacaaaccgtagaaaggctgtcagtcatcaggtttactctggatcaatgctttcgactgaaaatgagatggggattatgaaatggttaatcaacaaatgtgaaggaactttgcaacaattacctacgacagtagaatttgatgacagtctgcttgtccttctacgcacaatacagaacagtagcaactgcagagcagatgcgaagcggtcaggttttgagcaggagtttgctgtgttcctccggttccatcgagcggagcaggattgttctggtaacagtctactcccttttcgacttatgagatctgtggaaagatgggaactagctgtccagtggagatgcaactacaagaagacgctgaagaaatgtatttcgtactgtgaaggtttagttcacgagcttcccttgcaactaaaccagcaataataatcaaggtctcaattcatgtactccattttataatagtgtctctgtcttcatgaaccgacagaatgcctttaacacctcgccataggttagaatgatcttggatcaacaatggactgccaaaccccttgatcaggtttacgataaaggtctccgaggagtttagttgtct

SEQ ID NO: 99104 - DNA, 732 bp, Zea mays
  Clone ID: MRT4577_21896C.1
tgggtacctcgaggccggccgggcgacgtaaatcacagctacagggtggaccctgaccaaagcgcccaggtggccgctgccgatggaggcgctcctcaagtgggcggccgagctgggcgtctccgactcgccgtcgcccccttcctcctccccctctggaaacatctcttcgccgtcctgcctcggcggctccctcgtcgtcgccgacttccccgacgccggcgggtgaaaccccacccccatcgctcgcggttcttggtctcccagcgctcgcttcaccgcatttgctttgcttcgatcgcaggaggggcctcgcggcggcgcgtgacttgcggcgcggggagctggtgttgcgcctgccccgagccgcgctgttcacaagcgaccgcgtcacggccgacgaccccaggatcgccgcctgcgtcagcgcccacaagccccgcctctcctccgtgcagatactcatagtgtgcttattggccgaagtggggaaagggagcaactctgtctggtacccctacctgtgtcagctacccagctactacactatcttggctaccttcaatgattttgaagtcgaagctctccaagttgatgatgctatttgggttgcacaaaagggctaaagtgccataaaatcagactgggaagatgcgacaccactaatgaaagaattggaaatttaaacctaagcttttgatgtttaaatcctggctctgggcattggcaacg

SEQ ID NO: 99105 - DNA, 1743 bp, Zea mays
  unsure (1)..(1743): unsure at all n locations
  Clone ID: MRT4577_21897C.1
actagttctagatcgcgagcggccgatcgcgagctctcaccaagaggctgtaccccacaccactaggcactagtccactacctaacgctacctgccttttcaccgcgtcgtgcgccaccgccacgttgagctcgcgtccgtcccagatccgccgtgctcctccatcgctcgcgcaagatgaagatcacggtgcgggggtcggagatggtgtacccggcggcggagacgccgcgccgccggctctggaactcggggcccgacctggtggtgccgcggttccacacgcccagcgtctacttcttccgccgcgaggacgcggacgggaacgacctggcgggcgcggacgggagcttcttcgacggggcgcggatgcggcgcgcgctggccgaggcgctcgtgcccttctacccgatggccggccggctggcgcgcgacgaggacggccgcgtcgagatcgactgcaacgcgggcggggtgctgttccaggaggcggacgcgcccgacgccaccatcgactacttcggcgacttcgcgcccaccatggagctcaagcgcctcatccccaccgtcgacttcacggacgacatctcctccttcccgctgctcgtgctccaggtgacccacttcaagtgcggtggcgtggctatcggcgttggcatgcagcaccacgtagccgacggcttctccggcctgcacttcatcaactcgtgggcggacctctgccgcggcgtcccgatcgccgtcatgcccttcattgaccgctcgctcctccgcgcgcgcgatccgccgaccccggcctacccgcacatcgagtaccagccggcgcccgccatgctatctgagccgccacaggcggccctcacgtccaagccggcgacgccgcccacagccgtggctatcttcaagctctcccgcgccgagctcgtccgcctccgttcgcaggtccccgcgcgcgagggcgcgccgcggttcagcacgtacgctgtgctggcggcgcacgtgtggcggtgcgcgtccctggcgcgcggcctgccggccgaccagcccaccaagctgtactgcgccacggacgggcggcagcggctgcagccgccgcttccggagggctacttcggcaacgtgatcttcacggcgacgccgctggccaacgccggcacggtgacggccggggtggcagagggcgcgtccgtgatccaggccgcgttggaccggatggacgacgggtactgccggtcagcgctggactacctggagctgcagccggacctgtcggcgctggtccgcggggcgcacacgttccggtgccccaacctggggctcaccagctgggtgcgcctgcccatccacgacgcggacttcgggtgggggcggcccgtgttcatgggccccggcggcatcgcctacgaggggctcgcgttcgtgctccccagcgccaaccgcgacggcagcctgtccgtggccatctcgctgcaggcggagcacatggagaagttccggaagctcatctacgacttctgatctccaactcctccccacaagtcatcagtaccagtacgcgcaacccaaagaagcaagagaccgttgggagtaggttgcagcaatattctttgatttcacacatagttcctgcacacttttccgttcctgcctgnnnnntttgggcagggcgcataccttttgtgccgaattatttacgagcccctgcaattgtatgatgaatgaacaatgaatgatacagattaa

SEQ ID NO: 99106 - DNA, 277 bp, Zea mays
  Clone ID: MRT4577_21898C.1
acccacgcgaacgcccgcgcgtccgaccggtcaggttttcttttaacaaaccccagaaagccaagagacaagtgaaggttcaacacaggaccggccatataattagaagacccaccggggcaacacacactatgaaaacccaacccaaggcgctgagggatcatggtagattaaagcgccgcgcacgccgaatattatgccatgaacatagatgaggccaatctgtgcagcttaaatcaaacacttatgaacgatagtttttaacattactggaaca

SEQ ID NO: 99107 - DNA, 263 bp, Zea mays
  Clone ID: MRT4577_21899C.1
gtgatctagaaccttttgagccgcattatgatcaatatgaatatagacataaaaaactagagatagaggtaaaaatgactatggaagaggatcggaggagaatctttgtctcttaagcctgttgcggcgtagaaacacatcacatctgggaacctgtatgaaacaagagatcattaggcaaaactttggaaattcacaggacgcatgtttgcaaaataaactgggaagaaaaaaacaggggcggccgcccttttatgatgata

SEQ ID NO: 99108 - DNA, 654 bp, Zea mays
  Clone ID: MRT4577_2189C.1
cattccactctaataccagagaggacgcatcataatgtacgtggctttctctgcaccgtgcggtgggcgggaggacgtactgcttctactggcaggtacatgtgaaggttgccaacccccatgagtcggccgatcgctactcggaccctcgccgaatgtctccctcgacgcaacttcctgagtgactatgctttgtgacaactggtggtacccaggagatacctgcttatgcacttgatggttactacctgattgctgctgctgctttaaggatcatctacgtgacaccatatatagtcgtggtggtttaccagaagacatatggcgaacgcccgactaatgcatgcgtgccacctcagatctgcaagaggatggctgctcattgtacacttcaagatcctccgatgaatgcatgagatgtccatcgatatgatgtcacatatcatgggtgttacttagcactcagctcccaaacaaggcataatctggagcaggtgtatgtacaggcttgttgtggaagattgaggaaacacatatgtgggatcgatggtgacatgattgattgatgagatgcttacatcctatatgtacttcggatgatgacttttgtgatgagagaactcaacgcatgtctaactatgggtcacactgtga

SEQ ID NO: 99109 - DNA, 1834 bp, Zea mays
  Clone ID: MRT4577_218C.1
gagagagagaggagagttgccgccggagggaggaggtcgccgcggaggggaggggctcgccggtaggggacatcgcccatggggacctcaatgagaagataaaagggggtggtccgctcccagcctccgtccgaccgtcctcgacctcccgtcccgccgcctcccacagtcgcaaccctagtcccacccgccgtcctcccgccctcccgcttcccattttcagtcgccgagccgcgtacagcgcacgcactgcacgcgcatcggcacttccagcgacgcgtcgtgagctcctcccttcgacccttcctgtggcgcgtcgtaagctctgtgcaggcgacggcggcgcgctaccagtgacggggggatacggcggcatcgtccccctcggcccctcctccatcccggtgcggcggcgccagcctacagggcaggagtaccaccaagcgagcgcgatggtgagctccgcactgaggcgctgtctcccctgccatgcctctctctgtcatgccttccctccccatccgctgctggccgctgccggcgtcttccgtcgttcattccagtccggggatggtgagactatggacgaattcgaagaacggttgtttgggggcaaggacacagacaaaggatcactctacgagaagctcgatagggctgagaacactggtaggagatacaatatgggctctgggatgggtggtttgactgggttaagtgacaagagcagatctgggttgtccaagggtggtttcacttggttaagtgacagtagcagctctggtttccctgggtttcctgcatctggcgacaggagcaattcaggatggatggatggttatgattcttttaatgatggcttaaatgatacgattgctaatgcggcacgcaacatccaaatggaggaggacgaggacgtcgacggtgactgggaagatgactttgagttcaggcctgatgtgcggtttaggcaaggttcaacgtattctgttcgggaccttgaccttagaaaacctgcagccgcaaagaaccctcctagacgacagtttgaaacaactacagcggaggtactgaagaaggctgattttaggaatgttagattcctctccaactttcttacggaagctggaattatcatcaagagaagccagacccgtataagtgcaaaagctcagcgtaagattgcaagagagatcaaaaccgcacgtgcgtttgggttaatgccttttacaacaatgggtagaagaccattcatttttggcagaagtgcggaggagcattattgggatgatggatatttcggctatgtgaagcagaaggatggtgagcctgttgagaatgaggatgctgagccaaatgtggaggctgtgtaaacattctgaagcatccttttgcaagcgctccgttcagtttcttctggtgccttcatgacacaagtcacacaatgcttgttttgcgtcttcagatcatagcgtagctcagcttgaataaaactgtaacatcacgcaagttttgtgaaaactcgtgccttgctcaattgtgccactttagcagacatccccagctcacctcatcctggctggagatcatatgcagatatgaaatggaacgtgggatcagagttttagttgacgctcaaaattttgagatagcagcactgatttcagtttctgttggataatgattgtttggctgttcaacgagaaaaatattgtatgcacgtacaaaacgttagattttttaacaacgaaaatattttcttcaaattggttttcggaaaaaaaaaaaaaaaaaaaaaaaaaaaaaaaaaaactcgagagagggccgcggtacc

SEQ ID NO: 99110 - DNA, 405 bp, Zea mays
  Clone ID: MRT4577_21900C.1
gtaactaaatgctaaacaaattcaagaaagaagagaaggcagaatgggtgccagaaagactaagagaggggataacgacgtgccggggaatacatggggtttataattcgaccaaccatcaggagaagcaaatccaggggggacactaattactaaagactgaagaagtcgcctttaatgcaaattcaggtaattggaaagcaatgggcacatttataatcctacaaactggcgtcaaataaaggtgacaacatatttctacatgaggccttactaaagcaaaattgtatgaaaatccaagaagtaacaagggtttaatcatgaacccaatgattcttttttctagtaaagacgttaccttaccggtttatacagagatatattgaaagcggacgagcagctgat

SEQ ID NO: 99111 - DNA, 2630 bp, Zea mays
  Clone ID: MRT4577_21901C.1
agtactcacgccgagcttgttctccacaccactaggcactagtccactacctaacgctacctgccttttcaccgcgtcgtgcgccaccgccacgttgagctcgcgtccgtcccagatccgccgtgctcctccatcgctcgcgcaaggttggttactggcctcgcctgctcgcctttccttcaactccttcccgccttgcaggatttgggctttctcgatcacgaggcgctccgatgaagatcacggtgcgggggtcggagatggtgtacccggcggcggagacgccgcgccgccgcctctggaactcgggccccgacctggtggtgccgcggttccacacgcccagcgtctacttcttccgccgcgaggacgcggacgggaacgacctggcgggcgcggacgggagcttcttcgacggggcgcggatgcggcgcgcgctggccgaggcgctggtgcccttctacccgatggccggccggctggcgcgcgacgaggacggccgcgtcgagatcgactgcaacgcgggcggggtgctgttccaggaggcggacgcgcccgacgccaccatcgactacttcggcgacttcgcgcccaccatggaactcaagcgcctcatccccaccgccgacttcaccaacaaaatctgtaagtttcctggcacatatacatttgacaacaaatatactgattaagagtgtcaaaggggaacatatgcttctaaacttcatgatgcattgtattaactatttgatggccaagtagtgcataaggcagcttagatgttcttaatgacactctttgttcattaggcaccagaaccaaatttggttcggcacaatgtcctgcactgctgagcgtgatgatggggccctttctacaaaagaccgggtcctttcgcctccttcccggtacacaaaactatgttccttcctacaaggatccttggagattttggtgaatggagattcttcttgtgagcattatttgtatccggggtgtgggtttgttccgacaacaataatggttggaattgcaaaactgtatacgtactacgatagaaacgtgggatccgcttggagtcttggtattggattgaagttgcaaggtgctatagttaattcatctagtccattcggttttggtgcgatgattgtttcgtgttagctgtgctacctaccagcaacaatctgctgatgaaatcataggcagattaccataatcccaagcagcttagttgtcggtccttctttttctacggtagagaagaaagattgccagcctcctatctcattcagtcacctaccgtcatctagtatatgctgaatattgacttcagtctcgtgctctcgtcttgtattcttcgtttgatagggacaaaatttaaaagaatgcttatacttccaaaaaaaaagaggtatgcatgaaacaatttcggcacctaaccaaaaattggcgcgcgcttttgctgcaggtgacccacttcaagtgcggtggcgtggctatcggcgttggcatgcagcaccacgtagccgacggcttctccggcctgcacttcatcaactgtttcggcacaatgtagcctgcactgctgagcgtgatgggtacctgtactcactgaatgcttccactcttagcaaacagtgggaatctatggggccctttctacaaaagccagccggcgcccgccatgctatcctctgagccgccacaggcggccctcacgtccaagccggcgacgccgcccacagccgtggctatcttcaagctctcccgcgccgagctcgtccgcctccgttcgcaggtccccgcgcgcgagggcgcgccgcggttcagcacgtacgctgtgctggcggcgcacgtgtggcggtgcgcgtccctggcgcgcggcctgccggccgaccagcccaccaagctgtactgcgccacggacgggcggcagcggctgcagccgccgcttccggagggctacttcggcaacgtgatcttcacggcgacgccgctggccaacgccggcacggtgacggccggggtggcagagggcgcgtccgtgatccaggccgcgctggaccggatggacgacgggtactgccggtcagcgctggactacctggagctgcagccggacctgtcggcgctggtccgcggggcgcacacgttccggtgccccaacctggggctcaccagctgggtgcgcctgcccatccacgacgcggacttcgggtgggggcggcccgtgttcatgggccccggcggcatcgcctacgaggggctcgcgttcgtgctccccagcgccaaccgcgacggcagcctgtccgtggccatctcgctgcaggcggagcacatggagaagttccggaagctcatctacgacttctgatctccaactcctccccacaagtcatcagtaccagtacgcgcaacacaaagaagcaagagaccgttgggagtaggttgcagcaatattctttgatttcacacatagttcctgcacacttttccgttcctgcctgccccctttgggcagggcgcataccttttgtgctgaattatttacgagcccctgcaattgtatgatgaatgaacaatttaatccgttctgaatgatacagattaataagattaattaactt

SEQ ID NO: 99112 - DNA, 157 bp, Zea mays
  Clone ID: MRT4577_21902C.1
tgaaggtaggtattctattaagatatttctttcttatcctatttcctcgcttctttgtgttgttggcgacacccctttttgcagaacctgtgtataactgcagcacatcgtcgcataagggaaattcttgaaagagagaagaggtcagctgatattc

SEQ ID NO: 99113 - DNA, 326 bp, Zea mays
  Clone ID: MRT4577_21903C.1
ctgggcattcgacagaggcccaagtgagggtgcgagactaccaacataccgtggtgcctactctcgtcaaggaaacgctctacctgctgtacaggaaggtgactgcgtgccccaactgtcatagggaggagtttgcttataaacatgccacataccatggacactctcctaagctcatgagctaaaactgagacgtttgcaagggcgttcacaagcactacatcttggggtacaactcctggcgcttactagtccatgggatggtatataaatactagagacctattcttactctgaacctatgacgatccactacagagataact

SEQ ID NO: 99114 - DNA, 259 bp, Zea mays
  Clone ID: MRT4577_21904C.1
aggcgtgttacttttctgaggcaaaccaaaggtaaatttctcaaggttcttgctgccttctttagcagcatttgatggaagatcttttatacatttgtaatagataaaaataaaccagattgcaaatgcttttttaaaatcctaaaccatgtaccaagtttttggtccaaattatgtaggataagttaaacttaaattgcattctattaaccaatatgagtgtatttctgtaagcatagttatgttgaacataagtttt

SEQ ID NO: 99115 - DNA, 431 bp, Zea mays
  Clone ID: MRT4577_21905C.1
gccggccgggttgggatacgttcctctcgacggtagctgtctctgtctctgctccgcaggaacagaaactcaaacaaacaccgatacccatgatcatccgcgggaaaaaccgcaatgagatctagcgagtacctcttcgaggaggtcctgatatgtgccaacaaggactacaacctgaggaactgcccgcacatcgatgtggccaacctctgcccgttgtctctcattgacacatctaaccgccaccatgatggtagggagaccttctcctgttacaactactactggtatcgctccaacgctgcgatttaatacctaccgaactacctgaacctatcgtctgagtattttgactgccacgctcgagaagtctgccacagctaacgtgtccgccatttgtctctggcccttccggagattgctcaaggggc

SEQ ID NO: 99116 - DNA, 111 bp, Zea mays
  Clone ID: MRT4577_21906C.1
acccacgcgtccgaagaagtcggctaagtctttcgatcgtgttgcgcggcttcttcgtcgcatgggccatctgtaggtgtagtctgaggcctgacaggagcatttgagtgg

SEQ ID NO: 99117 - DNA, 239 bp, Zea mays
  Clone ID: MRT4577_21907C.1
ggtttctgaggctgagatggagaagcaaaaagtggcacgctacttccccaccgagaggggccagcccatggtgcacggtgccctgagcctggcattgagcagcgtccgcagcaccgaaacccatgtggagcgcgtgctgagcctgcagttccgagaccagagcctcaagcgctctcttgtgcacctgcacttccccacttggcctgagttaggcctgcccgacagccccagcaacttgc

SEQ ID NO: 99118 - DNA, 361 bp, Zea mays
  Clone ID: MRT4577_21908C.1
cccacccttccggggacccgggggcaaaacccccctgggtttggattgatttgtttggctggaggggccgggaattaagcttttacttcctcgctgctgggggggaagggcctggatttcggaatttgggacctaccaaaaccccccggggattggattgatttgtttggttggccagttaaaaaaacatttattccaattccaccgggttttgctggataagtcgggaaataagcttttggtgcgcccctcctgggggtgcaaggcttgcattcccggaattgggaacctataaaacccccttgggggaacctaaattaatttcccggccgccggttttcaaacgtggggccgggaaaac

SEQ ID NO: 99119 - DNA, 427 bp, Zea mays
  Clone ID: MRT4577_21909C.1
ccaagaaaaacaaattagggggtttcaacaattacccgggggggaaacaaaacccccccctttggcccaaacgggggtcattttaggggccaacgccaaccaaaaatctcgactggcctatgcaaggcaccgggaaaaaaaaaacccccatgcctttcgcggaaaaaaaaaacccagggccggaccccctttccgacccaaaagacaaggaagttgcaaaacaaacccggggaccttaattgccggggacaaaattgggggggaaggcccccgccttgttgttgacggggccaccaagggggccaggggggtttttgggggggcccttgccggggacaagggcctggacaaaaaaccccaacatgaaaaacagggggggggggccgtttttgggccccttacccttgagcccgggaaaggcctcggg

SEQ ID NO: 99120 - DNA, 372 bp, Zea mays
  unsure (1)..(372): unsure at all n locations
  Clone ID: MRT4577_2190C.1
caggatcaaataaccccacaggattaaactccgacgcngacaaaatcccattccatccatattatacaattaaagacctccctaggtgtatttatattactattattcctaataaccctagtactattcttcccagacctcactaggagacccagacaattatacacccgctaaccccctcaacaccccaccccacatcaaaccagaatgatattttctctttgcctacgctattctacgctccattcccaacaaactaggaggggtcgtagccctaatcttatncaatcctaatcttagccttcctaccatcctggcatacctccaaaacaaggcagctttaacattccggcccattcacccaaatccttt

SEQ ID NO: 99121 - DNA, 599 bp, Zea mays
  unsure (1)..(599): unsure at all n locations
  Clone ID: MRT4577_21910C.1
cgggnaaatccccgctgtcgtagcgtcccccacgcctggggtggtagcctcggcgcgccctgtcgtcggggtgggcccgacggctgtgatggtggcgctcgttgccgaggtgacccgaggccgcaggcgctgtgttgcgcgtgcgcccggaatggaccgaggcttcccgcatgaatcgggaagtcgcggcgcgatgttccgaggggaaccaggtctgggattttgttgaggaggtcgttctgcaagctgatgttcctgatcatttcagatggaagttgactcatgatggctgttatagcagcaagtctgcgtatgaggccttcttcgtgggctctaccaagtttggcccttggaagagaatctggaaaacctgggccccgtcgcgctgtaagttcttcttatggttggtgcaccataatcgggtttggaccgctgatcgtcttgagcgcagaaatctgccccatccagtgtcttgcccactttgtgaccagatgtctgagacggttcatcacttgttggttggttgtgtgtttgctcgccaagtttgngccctgatctttcatcagttgaggctgctgtagctggctcctcacccctca

SEQ ID NO: 99122 - DNA, 473 bp, Zea mays
  Clone ID: MRT4577_21911C.1
ccggccggggcgcatttgggtcacaacagctcacgctactcagctcgatttctatagaggcgctgacgacagccatggcgccgaagactgtgtgggggtatttcttcatcgattatatcccagaaccattacaggtttcagacaaacagagagtcgtggaactgaaaggggaggtggcacgcctcttcgaggactgcaactgcaaggatgtcgtggagagaatgaacctagttgatgtggtccagcgtctgggaatagatcaccatttcaaggaacagatagacacggccttgaagaacattcaaggagctgagttcaatagctcggatctccatgaggtctccctccgctttcgcctgctaaggcagaacgggctttgggttccagtagatcaattcgacaagctcagaccacaggaagacgggagcttcaccagagacataagtgacgacccaaagggcttgttaccgcta

SEQ ID NO: 99123 - DNA, 1967 bp, Zea mays
  Clone ID: MRT4577_21912C.1
gccaaaggataatccagctctccattatgagtttaagaatgatatcaatagaacacaacaccaatacgtggagacacataagaacaaactaagacaagataatatatataggtttcccatgcaaacacgtacgtacaatggatacatatcctcatgtcccatttaccaaggtctgtgtattattattaccaacacatccttcacacacacaacatagatggtacgtacggtaagtaatccatatatattccggccacggctagctagtgcgtactagctagtagaggggaacatggttgacgaacaggtcttccagcgtttccttgaggtgctcgctgtccgtataacggtcaaccttgccgtggaaaaacaccatcatgctcatcgcgaggccggcgactcgttgcacaaccggaagcagagcacggtccccaacgagtgctgcttggtttagtgtcttccatgcgtcgtcaacaaaggacccaatcttgtccatggcgacctcgcccgtgacattctgctccttcatgtagcactccacggtggtggcgacatcggttttgttctttcctctcttgaaatctgccatgtcgtccatgaatcgtgtgacctctgcacacgctcgtacgacacggttattgctaccaatcatccactcgaatacctccttggtggcggcatcgcccatgcccacaagcatcccaacacacagcacctgaatacctgccgacgcagtggacaagttgacatgctcatcgaagcttggtgtgtagccctggtggcaccattccacctcttggagatagcttttggataggagctggaacgctttcctagcgtaagcaacgcggtacttctcgtgcgcttccagctcatcctcaaactctgcgaagttcctcatcacctcgaggaagaacttctgtatgcactcaggtagaagagaaatatcatcactctcatcccatctttctatagccttgttgagctcccgacactcctccaaagtagcacgatcatcgaaagtgtcatctaacaaagatgatagcatgatcaacctggcaaggatcatccgtgcccgtgcatgctcttcctcgtagtacatactgaaagcccagaagtagcactcaacaatccgatccctcccgtagtctggcccaatgacaccacaaagacccttccaccactgagtaactgtcctcagttcattctggtgaacatgctgcaggaggttaaaatctagcctggcgagctccagtatctcagggtggatgtacgttgtgtcgtcggcactgctgtattccgggatataggacactgcttccagcctcttgagggtccttggcagtgggatcttaagggagcgcccgacttgttccgacaaataaggggagtcgtggaggccaccaccccgtcgtatcgattccaggtgccgcctcgcaaacaggagcgcttcttcgagcacctcctcgccgtggttcaaaaggctagctgcgttgtataggcctaacaagccctttgggtcgccagctatgtcgctgctgaagctcccgtcttcctgtcgtctgaacttgtcgaattgatctgctggaacccaaagcccgtgctgccttagcaggcgaaaacggagggagacctcatggagatccgagctattgaactcagctccttgaatgtccttcaaggggacgtgtctatctgttccttgaaatggtgatctattcccagacgctggaccacatcaactaggttcattctctccacgacatccgtttatttgcagtcctcggtgcgcaacaaaagacccactcttgtcaccagcgacctctgcttggataatatgcttcttcgtgtagcaatccaaggtggtaagaaattcccccacacagtcttcggcgaccatgtctgtcgtcagcgcctccacatgaaatcgagctgcatagcgtgagctgctgcgacccttgaaatgc

SEQ ID NO: 99124 - DNA, 879 bp, Zea mays
  Clone ID: MRT4577_21913C.1
caacagctcacgctactcatctcgatttcatatagaggcgctgacgacaggcatggcgccgaagactgtgtgggggtatttcttcatcgattatatcccagaaccattacaggacaagcaataaatccatggtttgccctacagtagaagggacttttgttggtgcaagcaaggtacttggttgtggattgccagttcgaacaagaaaagtgcaaagaaaaatttgccaaagggacctgcagtttcagacaaacagagagtcgtggaactgaaaggggaggtggcacgcctcttcgaagactgcaactgcaaggatgtcgtggagagaatgaacctagttgatgtggtccagcgtctgggaatagatcaccatttcaaggaacagatagacacggccttgaagaacattcaaggagctgagttcaatagctcggatctccatgaggtctccctccgttttcgcctgctaaggcagcacgggctttgggttccagcagatcaattcgacaagttcagacgacaggaagacgggagcttcagcagcgacatagctgaggacccaaagggcttgttaggcctatacaacgcagctagccttttgatccacggcgaggaggtgctcgaagaagcgctcctgtttgcgaggcggcacctggaatcgatcgacggggtggtggcctccacgactccccttatttgtcggaacaagtcgggcgctcccttaagatcccactgccaaggaccctcaagaggctggaagcagtgtcctatatcccggaatacagcagtgccgacgacacaacgtacatccaccctgagatactggagctcgccaggctagatcttaacctcctgcagatgttcaccagaatgaactga

SEQ ID NO: 99125 - DNA, 384 bp, Zea mays
  unsure (1)..(384): unsure at all n locations
  Clone ID: MRT4577_21914C.1
cccacgcctactcgtacgcgtgtagtcaagatcctctacagctagatctgccacaccaggatgtacttctgggatgccaaagggcatactcccgtgtaccctcagatctttggccaccaagctaaacgtattataaacagtgttgtagatggtgatactgacctaacgtacaacgaccatgtcctacctgtgttcactgtgcagtgcattgagacgatacacactgcaagctggctatatatcaacatgtgtgcaccgctgangatcaacaccgactcgtactgagatgatcgccgatagcaatacccaggttctaaatcaactacaagcctatataccactttggaaacacttacaccttgatcgagtacaccgacatgcata

SEQ ID NO: 99126 - DNA, 401 bp, Zea mays
  Clone ID: MRT4577_21915C.1
acgggagtccgggaaggagctgaccagcaacgcgctggccatcatcgagaaggcctcgtcggtcctggtcgcgctccacattcccgggttcacccatcggaggttacttggcaacgacgaagaaggaaacatggagaatcaacccaaagtcaaacactcgggtagtacgttcctgggcgagctcaaagacgacgtcacggcggccgacaaccgcaggctgctcaacgtcgacgaagaagaaaacatggagaatgaacccaaagtacaacactcgggtagtacgttcctgggcgagcgcgacgacgacgtcccggcagccgacagccggaggctactcagcattgaggaagacaccccgcagtgggtgaacggaccagagaggccgctgctcaaaggcaact

SEQ ID NO: 99127 - DNA, 536 bp, Zea mays
  Clone ID: MRT4577_21916C.1
tttttttttttttttttttttttttttttttttttttttttttttttttttttttttttttttttttttttttttttaggggaggggcccagggcctatttatggggggtttatataaaaaaaacattatttaaaaaatgcttaggggaaaaactgacccggaacggacggaaaattgagcatcctttgggctataaaaaaattaaaatcccatgacgggaagcttttaaaaaaaaaaatcattccaaaactgggtttatttttcctcagtcataaaaaaaaaaaaaaactcctgtagtcctgggtatcggcaggtgggaaacacacacacacacacacaccatttggggagggaaaaaaaagttccatccaggcagtttttggcacccaaagcgtttgaaaacggtaggggaaaaaaaaaccgccctttggcgttttttaaagggaaaaacttggcaaaaacgtttttaaatttggcctttatttgctcccttttaaattaaaacgctgggggaacaaacccggactccggggtc

SEQ ID NO: 99128 - DNA, 385 bp, Zea mays
  Clone ID: MRT4577_21917C.1
catgtgctgaagcatcggttgtaagcggggctgtggaagcattgcttgatctccagatcgagccattagtgtgaggaaactcgctcccagactaactgaggcattgctgaccactgtaagaataagggaggcaaaggccgctcaaaatactgttgctccattgttcatgtaccttctggttccacatacacaatcttatcagggaagattgcttgctgctcttgctcttggtgatcttttccaaaacaaaagtcttgctcgttctactgatgctgttgcagtatgccccgctctagtcaatctttttgaagatccaacccaactgatagaagattgaaaagtggttagcaactattgtgcccttgtcataattttatttattgta

SEQ ID NO: 99129 - DNA, 330 bp, Zea mays
  Clone ID: MRT4577_21918C.1
acgacgacgcgtagatacgaccgatcgcatgagatgagcacgctagatgtacatgatcgtcgtcgcaagtgctctgcgtgcgagcatgatcaaccatatgaactataactaggcgcgcagtttgcggtcaactaacaatccacctatagcagctatacttcaggtccacgttcatcaacatataatggcacagaggttgaggagcctgacgacaaagatatctacgtaaactattacatcgaccatagctgcttcaacacccgatatgcatgcctgacgagaacttacatccaaatgctagcgcatggctaggaatcatcatcttgagca

SEQ ID NO: 99130 - DNA, 2200 bp, Zea mays
  Clone ID: MRT4577_21919C.1
gggtacctcgaggccggccgggaaccaccgttcgtgaaaatctcgaagcaggtccgggaactagctagcgtagccatgatgaactatgtcatcttcggcgtcctgctcttggtggtcggcggcggtctcaggccatctccggcagccgccgacgtattctgcgacaaccttaaacaggtggccgccactctgccccaaaacacctcctcctcccccgtgcagttcgccaccgccatcgtcggccaggcccccgacgtcgtctacgctctagccttctgccaaggcgactacagcgccactgcctgccgcgaatgcgtcgcccaggcgttcaatgtaaccccggcgtgcaacaaggacggcatcttctcctacaaagcgtgcccggtcttgtacgccggcgacaacttcatcgacccctccaacgccacggagcaagctgacgacactcctttcgtgaggtggaacatcaacaacgtcaccggagacgcggacgatgtccgcctcatcaccggcctcatacgcgagctgctggtggataccgtggacagggcggccagcacggcgccgaggcggttcgccacgggcgtcatggacagtggcaggcccttcccgacgatgtactccatggcgcagtgcacgccggacctgtccgccagcgactgcctggcgtgtctccggcgccttgttggcatggtcaactccaccatggccctgcggatgggagcgcagatccacgtgatacggtgttatttcaggtacgaggcctactcgttgtacgacagccagcccatgcttcgtgtcgggccgccatcggtgccggcgccagctccagctccagctataggggccaggcgcaagagcaaactttgggtgattccagtcgttgtagttcctctagcagtagcagcagcagcagcactctgcttcattttctactcgccttggttcagaaggtacaggaaaggcgaaacgacgatggcaaaagcaggatctcaagaactgcagggagaacttgttttggatggaaagaattcagagttccgggtgtttgattttgaacaagtactggaggccacaaatgacttctcagatgaaaacaagcttggagaaggaggctttggcgctgtctacaagggccagtttgctgacggattggaggtagcagtcaagagactcgcttcacattcagggcaaggtttcacagagttcaaaaacgaagtccagctcatagccaaactccagcatagcaatttggttaggctcttgggatgttgctcgcaagaagagaaaaaaatactggtctatgaatacctgccgaacaaaagcttggattccttcatctttgatgaaaataaaagggcattactggattggtccagacttctatcaataattgagggaatagcacatgggcttaactacctacataagcactccaggctgcgcgtcatacatcgggatcttaaaccaagcaacattctcctggacagagaaatgaacccaaaaatctcggacttcgggctagcgaaaatattcagctcaaataacattggaggaaacactacaagaagagtggttggaacatatggctacatggcacctgagtacgcttcggagggcatcttctctgtcaagtccgacgtgttcagcttcggcgtcctcgttctcgagatcattaccggaaagcggaattccggcagccatcagtgcggcgatttcatcaatctcattggatatgcatggcaattatgggacgatggaaggtggatcgatctagttgatgcatatttggttcccatgaatcactcggcagaaatgaccaagtgcattaagattgcattgttatgtgttcaagagaacgcgagtgatcgaccgaccatggcagaggttgttgcgatgttaagcctaagcaatgacacggctatgatcgtggctgagcctaagcagccagcatatttcaatgtgagggtgggaaatgaagaggcgtatacgactactgagtcatgcagtattaacgatgtgaccatatcggtcacaacaccaagatagtcttctttttctctccttctagtggcagcatagcacacatgagttctagtgttcttatatcgttctagtcactggttcgtcattgtagtacctatatattgttggcacttgtagtaaaagtttgtaggtggtgtgtatgtgtgtttttaat

SEQ ID NO: 99131 - DNA, 394 bp, Zea mays
  Clone ID: MRT4577_2191C.1
acgcagacgcctgcgacgacgattgtgctgtcgcctgacccaaaactcttagtgctcgttggagagcctacaatattgcacacaggaaagctcatctacagtatgctcttcaacctactggtgactcaacatcacacttagcatagtatgactgagactcacagaagagggatactagccgacgcactggatgttcgcaatactgtgattaccattgctcttatacttcgcaatcctacacgtgatgtctctaactgtcctgtacgagacaccacacatgcatgtgatcctgctactagcggacacacttcaacatcctgtgacctacgaggtaccctacgactatgccctatgtcatctatcgggccaatgcaaggaagactcggatgcacat

SEQ ID NO: 99132 - DNA, 607 bp, Zea mays
  Clone ID: MRT4577_21920C.1
aagcagttccaaccataggtttaaatcttgagatgataaccgtcacaaaaaatctaactatagctcaagcttcatgataaaaaatgcagacctcaggaaaaaaaaaagaacagtgctcgttccattacccctggaacgatttcacaagcgcctcaactcaagccaacaaggtaaaattacatcagcagttcaacattatcatacatacactagaattagaagggggccaccactatagtacaaggacctgcagccttgaccttgcctcggcagctatattcaagtgctcctcgtcagggttctctctcgctgccgcgagagcttcaccataggtaatcctctcctgctctattttgtcgacctcgatcttgtcaatttcactctgaaagattctctgaaattttatcgaaaaatgccatcaacgagcttatctcgaatcccatatttgacacatctccttgaagatcttcgacctttttatttgacatctttacctcccattccagtttctctacagatgcttgcttgtctgcaagcataatctttgcatcatgcaactgagaattggtagatctgatcaaagcttctttgtcagacaccaggcgtc

SEQ ID NO: 99133 - DNA, 1346 bp, Zea mays
  Clone ID: MRT4577_21921C.1
ctggccggggtccgaacccaatgcctcgaaaagccttaaaccccgagggagcctgtccgaatcacgccgccgttttcatcttcactcccaaccgtttcattcccacctaacttactttttccgatttcgactcgattcgtcattccaaacaggacaccgaatgcacgatcgatcccacaagccgcagccgccggaggctggcgagggcgccggcggcgggaacgtggatcgagtgctcttcaagaacctcgtcgagatggtgccgctcgtcgagtcgctcatggaccggagggtcaactcggcctactcgcgacgcacttcgctagtctacacgccggcgccgcccaagaaggcgagcgaattggaaagtgtcaaattgccacagagcgtatcggccaaaaagcggagagaccctggcgatgtatccaagaagagcacccctgattctaacggcgacaacggcttggttgtgccattgtctctatcgggtgctgaaaataagcccaaggatgatgttgctgggctgcgcgagcaggtcgattacctgcaaaagaaactgctcgagaaggaggaggcgctgaggtccgcggagagcctcgtgactgagatgaacgcggcatatgcaaccatcgatgaactccgacgcctggtgtctgacaaagaagctttgatcagatctaccaattctcagttgcatgatgcaaagattatgcttgcagacaagcaagcatctgtagagaaactggaatgggaggtaaagatgtcaaataaaaaggtcgaagatcttcaaggagatgtgtcaaatatgggattcgagataagctcgttgatggcatttttcgataaaatttcagagaatctttcaggtgactcttatgatgacacagtaccatcatcatatgaattagaggcaattcaatcaacgagtgaaattgacaagatcgaggtcgacaaaatagagcaggagaggattacctatggtgaagctctcgcggcagcgagagagaaccctgacgaggagcacttgaatatagctgccgaggcaaggtcaaggctgcaggtccttgtactatagtggtggcccccttctaattctagtgtatgtatgataatgttgaactgctgatgtaattttaccttgttggcttgagttgaggcgcttgtgaaatcgttccaggggtaatggaacgagcactgtatcttttttttttcctgaggtctgcattttttatcatgaagcttgagctatagttagattttttgtgacggttatcatctcaagatttaaacctatggttggaactgcttatgtaaattgttcttgagcctaaggtataggcaatagc

SEQ ID NO: 99134 - DNA, 319 bp, Zea mays
  Clone ID: MRT4577_21922C.1
cggacgcgtgggctagttctagatcgcgagcggcaagatcaaagagggtgtcgtcatggcgataatgcatccaggcattgctgcaggctccgcaacccttgcagggattatccttttcaaaaggccaaggagctaccttattcaacgagtacgacacatgtttggtagcaaggaagtaaccaccctatgcccgtttgattagcacataattcctgtaacttgatagattcacgctcttcaaagttaaccatctttcttgattcatactcttccaaataaattctccattttgcttatactaggtggctatctattcacc

SEQ ID NO: 99135 - DNA, 1999 bp, Zea mays
  Clone ID: MRT4577_21923C.1
cccagcgtccgccccgcgtccgcccacgcgtccgcccacgcgtccggcagacattgccccctcagtgtctgattcacgttttttttcctggtgggcacgctctgtcaagctggtgcccaaaatagtccggaaggggtttaacactctctgtattttagatgtctgggcaatctagaaattcagaaacctgtgtgtttgagggcacccagccaaatgttcaactccttctccataggatatgaagtgagggtctcctttggtgtgccgctggagcttctaagttgcatgagcttcttagtaggttgctgaacccagctgtttaggtgctggaagtcctggtcgtttatgttgctttttacgtaaaccctcttaggctatctccagcagcttgctcatcatcatctctcatttcaaactgcgctctgtaaatagtgcagtctacagtataaatcagtgcaaaaacagtgttttgcatggccatataatgtacctgggttgggtcgcttgaccttttctcgctgttttcctccttaaatgaaatgacacgcagctccactatgtcgttcgagaaaaaataatttatgaagaaaatgctttatctttattttagatgcagaccaagtttctcaaccttttggtttgctgcatttccattacatcaattatggatttcttttcttttccctgacattacagatgaaaggtccaaaattgatgatcacaattcaaagtttgatctcggggtgccagatgatcttgatgtatcaattgaacttagaaattggctatttgcacttgaaggaactgaagaagtaggataccttttttctcctcgtggaggtgatggtatcagtagagaagaaaaatgctggcattcaaccttcaggaatctacatatctctggcaagagcagtgaccgacttaaattgggaggcagaagaaaggtgtcacccgaaaaggcatttccagtggaacgctttacggctggaattgaaggtttgcaggcaataaaacctcgtctgagagatcagtgcactaaaaaaggaccatcaaacaatcatgagatgggcagagattttaatagttcaagttctgttggtgaccatggagttgatgtcgaagctaccatggtcattggcgaagacgagattgagggtgccaaatggacaatggataatgtcaaattttctgtcaaagaaccaatcgaggcggttgcaacaaaagaagaactagagcaccttgtgatgctttgcagatctgaggctgatgcaatggggaggatcactgctggaattcttcgtctccttaaacttgacaaatctcttgggcaaggaactatagaacaactacgtaacctaggaagtggaggcatggacaatatcttttcacccaggaggctcagcaggcagaacagttttggtagcataggcactcctcggactccaactatgcaagccattgcagacgtcatgggttcgaaaaccacactggaagcaactatttcctcattacaaggcgagatttccgaatccaaggccaaatgtatggcactgatttctcaggcaagcagcactgaggatcaaaaccgtgccgaggacatcaggcagcttagcgaaaagctcgagagcatgcaatcgttggtgacacgattgagaactttgatcatttgatctgactatctgagttgtgcatggttttttttgtgtacagtacacaaggtcgttctgttcaaactcggaagtggcaaatgctgcttcctggtggctggttgagttattcttttgtgtacatttatatatcttgggaggcggtgtgtaaagattaaggggggtggaataatcggttgataggcagctggaggaaattttgtaggcagctggtactggcaaatatgctttgtagcacggcatcatatgatcaaacgggtcactaagaagagtgcagtgccatttatatcattgtatgtataaaatgtgcacagaacgtgcttttcgcgcac

SEQ ID NO: 99136 - DNA, 2856 bp, Zea mays
  Clone ID: MRT4577_21924C.1
aagaaagtagggggaaagcagggaagtaagctaatgagtactgttttttatttataatatttgagcaagtcattttaaagtattgtcctaaatactgatgtgttctcttccggtattgatgttatctgtcttcttggcctatatttgacgcaaacttcagttctcacagaaacaaatggtagtgtgctctatttgatcttgtcaatttgttagttacttgttgcgcaggtcagtgtgaggttttctcaattctttttttagttctcatttttaattgtaattccacctaaatgattatgtttctgggctgtttttatttattctgactgttttctttactactgtctaatttagttctcaatttcttgtgcagtgtccatgtactatcttgtgcggatttcgcgcaccatatcacctcctaccggatcttttcagctcttcatcagaagccccgtctaggtcggcagagcctgcttatcttgcacattttcctacactcacaaggaatgtgcctggattctagcgcctcgccggagcatggggtcatcgaccccatcgacggcggttgtggaggaatggaggaatatgataaacggcggcgacggccagaagaggcgcaacccaaatatcattcgctttcaacaccacattgagttcgaccccaagttcttcgacaagtcgtggcgtaagctccatgacgccatccgcgagatctgcaaccacaactgcatcggcctctccttcgaggagctctacaggttaacattgcatgcttgcccctggtcccttggcttttttggttgtcgccctgttccatcagattctgttccagacacttaggtcgcgctatatgatcgcagatgattcggatagatagtggtcgtgaatggattgattgctgtgctgattggtgatctgtaattttcatgttttaatttataaccaatccccgtgtgggcttgtcagcttctatgcatgtgaatagattagtgtagtagggcttgtcctgttaccataatttatcaacatgatattaggatattttattattggtagttgctcgaagcctttagtttaggccatttgcggtgtcattttctcggtctcgtcattaaatgcttaaacggttggagatcttcttttgattccatgttatgcgtacaccagagctgactaacgagaactgccatctagacatgcttaaacattatttattatctagagaactcccttaataatcttgtgctcgtgttcctgtacttcataatatgtcttggcatcgatactccctgcatagtttgcacttagcagtccaagtaaatgggttgtaccattcccttgtctaatgatacgaggagattcgactatggtgctccaccactctccctgcatagttggcccctgcatttcctaccccacctactaccactccttcaaatttggctccatcgtttaccctaattgctgctggtggtggttcgttgcgagcaaggaggactgagagagcaggacgccaccaccattacttcctggtaagcaattccactaccacgacgaccgcttttctgttctttgcgtcatctcattctcatgactgagttggatagaatcgtgagatgtgcggtagtacatttggttaaagtctgtatttgtgaggtgactatctatttgttccttcgaaatgtcagggtggcattcaaagagttcatattataaaaggatgtgtagatggatcacttctattagaattgtttacaggagatggagaaggaacaatgatcgctagactggaattgaaggtttgcaggcaataaaacctcgtctgagagatcagtgcaataaaaaaggaccatcaaacaatcatgagatgggcagagattttaatacttcaagttatgttggtgaccatggagttgatgttgaagctaccatggtcattggcgaagtcgagattgagggtgccaaatggacaatggataatgtcaaagtttctgtcaaagaaccagaatgagctcattttagtcaattgtctaaacctgttgatttgaatctgctttctgaactgtttatccatttgagctttgcagatcgaggcggttgcaacaaaagaagaactagagcaccttgtgatgctttgcagatctgaggctgatgcaatggggaggatcactgctggaattcttcgtctccttaaacttgacaaatctcttgggcaaggaactatagaacaactacgtaacctaggaagtggaggcatggacaatatcttttcacccaggaggctcagcaggcagaacagttttggtagcataggcactcctcggactccaactatgcaagccattgcagacgtcatgagttcgaaaaccacactggaagcaactatttcctcattacaaggcgagatttccgaatccaaggccaaatgtatggcactgatttctcaggcaagcagcactgaggatcaaaaccgtgccgaggacatcaggcagcttagcgaaaagctcgagagcatgcaatcgttggtgacacaattaaagaactttgatctgactatctgagttgtgcatgttttttgtgtgtacagtacacaaggtcgttctgttcaaactcggaagtggcaaatgctgcttcctggtggctggttgagttattcttgtgtacatttaagggggtgtgtaaagattgggtggaataatcggttgataggcagctcgaggaaattttgtaggcagctggtaccggcaatatgctttgtagcacgacatcatgatcaaacgggtcactaagaagagtgcagtgccatttatatcattgtatgtataaaatgtgcacagaacgttgcttttcgcgccc

SEQ ID NO: 99137 - DNA, 504 bp, Zea mays
  unsure (1)..(504): unsure at all n locations
  Clone ID: MRT4577_21925C.1
agaggtggagaatgcggccttagagaggaaaaaagaaaaagaacaaaactaaaaaaaattataattaaaataataaataaaaaaaataaaaaaaaaaaaaaaaaaaatgggaaaaaaaaaaaaaaaaaaaaaaaaaaaaaaaggttttttttttgttcagtaaacctcccctaaggggtgattttttgtgaatatgaatcataactgaaggatggaaggagcattcgttcagggggcccacttcagtccttatgtggggaggggactagcaactgtgcgttgccaacactgcttacaatggaaactgccgggttccgacaatggaggaatggaccacatagccagtcggttaggagctgatattggcacaccaaaaggaaaaccgggatcttttaaggatctcgccctatctcaatgagggtaaaagaatgctctcttcctgcaagtaatattgagcctggntgactagttcaggatcttatgagatcatagnaaatggagctg

SEQ ID NO: 99138 - DNA, 326 bp, Zea mays
  Clone ID: MRT4577_21926C.1
gagggttgtcaaggagcagatccgggtggacgtgaacgatgtggctttcgtggcgaaaaaactgatagaaggccaaagcacctgtgcagatgtttttgcaaagcatactgcccatatataaatagacatggtatgtcgtctctttttaaacatgtgcttacctaatgaatcaatggcacatggcgtacacaattcttaaaagtcacatagcctatattgaaattgaattctttattatacaaacaaaaataaaatgaatggagactaactgacccatatacaatcagtaaacaaaaaaaggccatctgtattaaagaatttgttca

SEQ ID NO: 99139 - DNA, 648 bp, Zea mays
  Clone ID: MRT4577_21927C.1
ccactacctcccaatcccaagtcccaactcgctccccattcgcctccctcccacccggctcctgtcctcttcccctccccaaccagcctccctcaaattcgccgatccccagtagcgaaacccacactcgacaatcctctatcagaatcccgctcccctacaccacggtagctgagaagacggccggcgaagatgatgttcacggagggcctcgacgagtcggcgatcagctggatcaagcagggcatggactccccagcctcagccccagcccccgcacccccacggtccccgctgtcggagcgcccgccgctgggacaggtggcggcggcgccgaggagccccgcgctgcacgccaggccgtgcggggccggcgcaggcgtcggtttcttctcccccaatggcctcccgcaagtgcgggtgaacgggacgcaccactcgggcctgctcggccgccactccgtgctcctctcggtcgcggactccgatgagtgggaggacgagagcgtcgcatcgtggggcatgcccgaggactgctacggcggcggcaacttctccgagaccggcgacgaggcgtgctccagcgactccagactcatgcggagggccatggaccgctgcggcggagggtgggatgaggaggtcacg

SEQ ID NO: 99140 - DNA, 138 bp, Zea mays
  unsure (1)..(138): unsure at all n locations
  Clone ID: MRT4577_21928C.1
gctgctaaaaagacccanaatctcgacagcaacgaattcgcatttcccccanccctcccaccnnncccactttcccttccggatccccttctcctcgtcgcgnaatcccaaaatccgcgggccatggnaaccggcggg

SEQ ID NO: 99141 - DNA, 406 bp, Zea mays
  Clone ID: MRT4577_21929C.1
tccagacgtgcctaggccactgacatacttctactctgtctgtcacctcaactaatccatggtcagcttgtactccacaatgctattgactggctggacaacttctgacattcagagcgcaaagcttgtgaatgttgcttgtccatctgcttgagtcaggattgaaatccactgtactactgcaggtctattcatatggtcgcttgatgcacccgtcctattttccgacatggaattctaacttcatccatcgatagcctcaagcatctcacgcttcaactgtggtatctaatatattctatcaagtttattgcccttaaaacatgcttctagccacgtttgaccatggcatgaagttcgcatacttaataacatgcgaatctaagcattgtgccactatcttaac

SEQ ID NO: 99142 - DNA, 167 bp, Zea mays
  Clone ID: MRT4577_2192C.1
ggaattacccactcgacccaagcaaccaacgaactcttgctccgattactagctatcttacgtcgacaatcgcatgggtactagtaagcatgaagacgccgaacgcggtagctgccttcctgttgtcagcgacactgctagcttgatccacttcagctgcaatcacc

SEQ ID NO: 99143 - DNA, 543 bp, Zea mays
  Clone ID: MRT4577_21930C.1
tctgccacacggtaccgccagcttgttttctctaccccgtcacggcttacattacgttttatctgttacacctcatgagcgcatgcggatcaatattggattttaagtcttgggctccttcacagagtaacatggcccagcaggccatgaccacgccaggtgtacggtcacgaactcattatgttcacacagaaaaattagtggcgctgactgaatctggggagactcatgcgcaacactctgcgggggccaatcaactttttgacaaaagggcagaggtgtcaatgctttgtatctgtgcttccaaatccctgccatgcttaggactgcgcaaaaaacataatcatgggcatatatgcctactgcttgaaattgctgtccgataacagttactcacagatactagctcttggccttgagagcaaagcctgccatgactgatgagtgagacaactgacattaattgggatatgctcactgtcccgttatcattcggtaaaaccgatgagacacttttgtcaatgaattgttcaccatcacccg

SEQ ID NO: 99144 - DNA, 591 bp, Zea mays
  Clone ID: MRT4577_21931C.1
atgcgtgcattggaaggtcagcagctgcttgaggacgacccctcagtcgtgtacctcactgcatacctgctcaccctgaatgcacagtatgatttcttggctcggcaccaccgtcagatgattgctcgagcagaagatggagagaagtgcaaccagccctgcggatccaagaacccgcttcatccaacccagttcaacccaggagagctgaagatccccagattcttgaaggtcacccgatctctaccagaggagaaaagaaggcttgggaacctcccggaaggagccatagtcttggaaggaattccagtcttccctcaggctatggataagcaagaacactccgagtcctcccaagatcccccgtcagagttgtttgagcccctcaccatgaagaagattctagcaccatccctagagatcaaagaagaagctgcaagcaccccaccagcaccaccgccctctgaggagctacaagagccagtcccgctggaagaagagttcgaccccgtcttgccatctcagtcaccgccagaagaagtcatcaacatcaactccctcttaacccatctaggagatgtctcagattga

SEQ ID NO: 99145 - DNA, 366 bp, Zea mays
  Clone ID: MRT4577_21932C.1
gcattataaaggacggcaagcggcgggggtggagcggggcaccttagaccacgactgcttcgcctagaacgcgcggaccgcgctgcacggttcgataccgcgcggaggaccatggaacaacggcaacagctactacatcatgcgcgggacggcccccgctgggaaggtggagggctcctcggaggcggaactggagaccgactggacccgcctaggcttcgcggaggtggactacagctggggcccgaccgcgcacgtggcgccgatcaccaacctggactacattgccacgcgcatcctggcgaggccgtgggcgcacaagcaccgggcgaggcttatcacgcaatgcagcaccccggaccgcgc

SEQ ID NO: 99146 - DNA, 687 bp, Zea mays
  Clone ID: MRT4577_21933C.1
atgaagatggttttccccaagttgctgagagcatgcacagtccgcctcggaatcaggagccagccagagtataatggttgtgaattcgtcgagcatgccaccgagaagtgtgtcgtgactgtatacattggatctagtccgcaccatgtggaatggagtgtcactgctgctaggcacagattcaaagacacctaccaagtcgtcgctcacaaggcattgagggccctgtgtcagatttatgaagaagaagtggacgacaccccgcttagattctttctgccatttcagagagtctgtcccgtttggatggccacgatgcgtgcattagaagagcagcagctgcttgaggacgaccccaaagtcatgtacctcactgcatacctgctcaccctagatgcgcaaggagcaaagaaggcttgggaactcccggaaggaaccatagtcttggaaggaattccagtcttccctcaggctatgaataagcaagagcaccccgagtcctcccaaaatccctcgccagagttgtttgagcccctcaccatgaagaagattccaacaccgtcccgtgagatcaaagaagaagctacaagcaccccactagcaccaccgccctctgaggagctacaagagccagtccagcttgaagaagagttcgaccctgtcttgccatctcaatcaccgccataa

SEQ ID NO: 99147 - DNA, 553 bp, Zea mays
  Clone ID: MRT4577_21934C.1
ccacgatacccctctatcggaaggaggctcctccatggtactactcagctttgcgccaatacattcttaaccattgcaacaatcgggatacttccgcaactaggatcagacctacttacaaatctctggggcctagcaagtatactgacttggccattagctatactcaaaacttgctcaacagaggtgccataaccagttccacttatgggaccttgttgcaagcagattgtctgcctctgcatttggacaagaatccgactaaaaccctgactcgatgacgaccccggaaatcacatctcagaatgccacattttatcatgaagcttatacgtattagtaaataccaactatccattattgatctatccacgctgcatcttgtgtgtaaacacaactatccagcttgtataatggatcaacagatcacctgacatgtgacggcggcctaaaactactaactctaagacattgtaacggtgaataggatgatcgtgtggcaagttatgagcatctctgctcactagactcaaggctaaggcctcttgcatgc

SEQ ID NO: 99148 - DNA, 852 bp, Zea mays
  Clone ID: MRT4577_21935C.1
atggcggtgctgggtgcgctgcaaagggggtgtggcggcggtagtgcgctacaaagagggcacgcgtgcagggagcacgaaggactgggcataactaacttcagaccagacaacttcttttctggcaaggctggcgcacgacttcaatctgagacatctcctggatgggtcaagagggagctgatgttgatgacttcttcttctggcgacggaggtggcaggacggggtcaaactcttcttcaagcgggactggctcttgtagctcctcagagggcggtggtgctggtaggggtttcatcggcaatgactttatgactttccaaggcagctacacgggcttgagctatggtgggatccacatggagcttacggttgcgcttctctgcatcttctgctcgggcaatcatctgacagtgggtgagcaggtatgcagtgaggtacacgactgtggggttgtcctcaagcagctgctacccttccaatgcacgcatcctggccatccaaatgggacgatttctctaaaagggcaaaaagagtctgagcggggtgtcggccacttcttcttcataaatttgacacagggccctcaatgccttgcgagcgacgacttgacaggtgtctttgaatctatgcccagcaacagtgacactccattccacatggtgcggactggatccaatgtatacagtcacgacacacttctctgtgccatgctcgacgaattcacgaccatcatactctggttagctcctgattccgaggcggactatgcatgctctcagcaacttggggaaaccatcttcattctggcacaagttggtttggcagtggacctctatctgacttcttaa

SEQ ID NO: 99149 - DNA, 1605 bp, Zea mays
  Clone ID: MRT4577_21936C.1
atggaggttcagtgccaaaccagcttttgccagaatgaagatggtttccctaagttgctgagagcatgcacagttcgcctcggaatcaggagccaaccagagtatgatggtcgtgaattcgtcgagcatggcacagagaagtgtgtcatgactgtatacattggatccagtccgcgccatgtggaatggagtgtcactgctgctgggcacagattcagagacacctaccaagtcgtcgctcgcaaggcattgagggccctgtgtcagctctatgaagaagtggctaacaccccgctcagattctttccgccctttcagagagaccgtcccgtttggatggctaggatgcgtgcattggaagagcagcagctgcttgaggacgaccccacagttgcgtacctcactgcatacctgctcaccctggatgcccagtatgatttcttggctcagcaccaccgtcagatgattgcccgagcagaagatgcagagaagctcaaccgtaagctccatgtggatctcaccacagctcaagctcatgcaactgcattggaaagtcatgaagtcattgctgtggaagctctgaagcaagccaaggatgagcacgtccagaagttgatggaggcctacttggtaacccacaaccaacgtagagccctgcggatccaagagcccgctccatccaacccagttcaacccaggagagtggaagacccccagattcttgaaggtcacccggtctctaccagaggagaaaagaaggcttgggaactcccggaaggagccatagtcttggaaggaattccagtctcccctaaggctatggataagcaagagcaccctgaatcctcccaagatcccctgccagagttgtttgagcccctcaccatgaagaagattccagcaccgtcccgtgagatcaaagaagaagctgcaagcaccccaccagcaccgccaccctctgaggagctacaagagacagtcccgcttgaagaagagttcaaccccgtgttgccatctcagtcgccgccagaagaagttttctctaaaaacatagatcacaaattagagctaatccttaccttatgcttccattctcatcttaacccatctgaagagaaaagtgtcttacccaagaagataccgggaagcttacccttgaagcctggaataagctacagaggaacatatccagtcgctcagtcaaaaggaccgaccgtgagaatcaaagcactgcccctgagtcaaacctgctcaagcagcaacagcagaagaaggtcccgtaacacccttgttatgaggtacttcaaggagttcaaatccccaagattcaagagttctaccctcattctttttaagtggggtagtgttccagtaaagttcctgtcatggagaaaaagaagaaggcctgtagcaagcttgtggaggaccagatcaccgaagcttataagtttctggatgagaagtggtcacccaagttccgttgataaagcaccagaagaacaatcaaggaaggaatccatgtgggagttcgcaagagaaaggtttgtgtgttggcatcgatgcttcttcaataagctagctgccaagcaaaagctagaagcttga

SEQ ID NO: 99150 - DNA, 944 bp, Zea mays
  Clone ID: MRT4577_21937C.1
tgaggaagcaatgaagacataattgttgcatctgataaagctcgggcgaaatacaagcaaatccttggaattttgcatccctttgctggctcttttctgattcagagaacccaatgggggatgtgtccttgaatggacccgttaaggccgagccaactgccggtggcattgccaagggaaaccgagttctcgacacgatgtccgccgggtggacggacgagagacacatgctgtatataagctccatggaggcttctttcgtcgaccagctatacaaccatggaaaccatccgcacagagtgacgcggtcgaggcttcggtgggcgaccatgagtcgggtactcaggcaagccgcaagagcccttcagtgtctcatggaagggaacgggaagcttgtaagggaggaccccagattcttcatgaaagcacagaggtctctgatcaaaattttgctgacgatgaggctgaagctgaaacagaatcgatgaaagcatgcaagaaaaggagactaagcagggcttcgcgctactgtgctgaatgataaagtaaaattcgcaggaacaattagcgtagcctgttgcaagaatcgatatgacttatcctaaaagaaggtgctaagatgatgggacatggctctcaaaactttcagctgttgcctgctggtagccaagacacactgaatccgaaggaaggcgttgaagggtagctgttagtgattttgtgatataaagagtactggggcagttagcatcggcatttttagcggatttaagttcttgttatgtgtatctgtcttcatcagtagtgctgcttagtacctcactctctcgtcagcagtatatttctatatattgtctgtacttggtagatatatgtattggttgatcctatgagtgtaatgtttttttttgctgcagcttttgggggcagttggtattaaattc

SEQ ID NO: 99151 - DNA, 140 bp, Zea mays
  unsure (1)..(140): unsure at all n locations
  Clone ID: MRT4577_21938C.1
aattctnnngacaatatgctcacttgtttgcggccgccctctttttcacgggcgcgctggtcatgggcatggccttgggctacggcttccccatggtgggccgcatagaggccggcatcagcatttggattcatatctaa

SEQ ID NO: 99152 - DNA, 415 bp, Zea mays
  Clone ID: MRT4577_21939C.1
gtcggctcttgctgatcttgttggctttctgcctctcactaagatcaaggtccttgcgagcagtgcggtaagtcagctaaatgccttgacgccaaatgccacaggattcagggactcccctcatgatggttaatttcgaattggggccaggtgttctacaccccgttcttgagacagatttggacatggcttggcttggtacctgcgacaaggaagaatttctactgctaccttggagctggttatagttgtatcgtagtccctggtggtgtacgggaaatgcttcatatgaacaatgattcagaggttgcttttcttaaatcaagaaaaggttttgtcaagatagctatacagtctggatgtcctttagtcccagttttctgctttgggcagagctatgcatacaagtggtgga

SEQ ID NO: 99153 - DNA, 463 bp, Zea mays
  Clone ID: MRT4577_2193C.1
ccttttcatgtcctgctgctccccatgtcgccccgactcgacctggactacatagggctctagccggcggcggctgccgccgctgaccacgacgacctgaagggtaccgagctccggcttgatctgacggggtacggttcgccggaccgccgtgatgtggctgccagcgcaaccaccctggacctgctcccggataagggcgccaagtgcggattttctgacaaggcgccgacgccatcaaccggcgcaggttccgggaagggaaagacggttgcggaagaggaagacgacaagaaagttgcagggactccttcaccggtctaaaaagctcaggaggtgggacggccaccaatgcaaagctaccgtaagaacacgatgactaccacccagctgaagggcagcaaggaggatgctgaggtcaagcaggaccagtgggtgctgtacgacaaggtcagcatggatg

SEQ ID NO: 99154 - DNA, 1080 bp, Zea mays
  Clone ID: MRT4577_21940C.1
atggaggtccgctgccaaactagcttttgccagaatgaagatggtttcctcaagttgctgaaagcatgcacagttcgcctcggaatcaggagccagccagagtatgatggtcgtgaattcgtcgagcatggcatagagaaatgtgttgtgactgtgtacattggatccagtccacaccatgtggaatggagtgtcactgctgctgggcacagattcaaagacacctgccaagtcatcgctcgcaaggcattgagggccttgtgtcaaatttatgaagaagaagtggccgataccccgctcagattctttccgccctttcagagaaaccgtccagtttggatggccaggatgcgtgcattggaagggcagctgctgcttgaggacgaccccacagtcgcgtacctcactgcatacctgctcaccctggatgcacaatatgatttcttggctcggcaccaccctcagatgattgcccgagcagaagatgcagagaagctcaaccgtaagctccatgtggatctcacctcagctcaagcccgtgtagctgccttggaaagtcgtgaagccattgctgttgaagccctgaagcaagccaaggatgagcacgtccagaaggcctacttggtaacccataaccaacgtagagccctgcggatccaagagcccgcttcatccaaccctgttcaacccatcagagctaaagacccccagattcttgaaggtcacccggtctctatcagaggagagaggaaggcttgggaactcccggaaggatccatagtcttggaaggaattccagtcttccctcaggctacggataagcaagagcaccccaagtcctcccaagatcccccgccagagttgtttgagcccctaaccatgaagaagattccagcaccgtctcgcaagatcaaagaagaacctgcaagcaccccaccagcaccgccgccctctgaggagctacaagagccagtcccgcttgaagaagagttcaaccctgtcctgccatctcagtcgccgccagaagaagtcatcaacatcagctccctcttgacccattcaggagatgtctcagattga

SEQ ID NO: 99155 - DNA, 1560 bp, Zea mays
  Clone ID: MRT4577_21941C.1
gctgctggctgcggctatatacccccctccctccgtttctctatctccttctgttagtagacgcgtctccatagcctgagccaaatctagggggcttgcttcatctgctgtccgatcgtggtttggtttctcggggctggcgcggtcaagagcgcacctgaattccaccgaaatccgccacggtagttcttgcctaggtgtgtcgttggtcgttgccttgtgacccttgcggattttcttgtttctttttgagttgcgatctttgcaggttagtctcccccccaatccgtaatcatccggcgtctaggaaactgcagtccagtttgcttatttgttcgtctcgtgccttctccccatcctggttagaaagaatatcggaagggggatttttttttttttgcctgttcgtagaggaagcagtgaagacataattgttgcatctgataaagctcgggcgaaatacaagcaaatccttggaattttgcatccctttgctggctcttttctgattcagagaacccaatgggggatgtgtccttgaatggacccgttaaggccgagccaactgccggtggcattgccaagggaaaccgagttctggacacgatgtccgccgggtggacggacgagagacacatgctgtatataagctccatggaggcttctttcgtcgaccagctatacaaccatggaaaccatccgcacgacgcaaatggcgccggcttcaaggttctccgcaggggggtgtgggagtacatcgagtatgagaagaccagtgcccctgtgcgaagtggggctaaatgctgcgtccctgcaaatccttggatccggcatttcaggccacgtgactgcggtagtaacgcacagagtgacgcggtcgaggcttcggtgggcgaccatgagtcgggtactcaggcaagccgcaagagcccttcagtgtctcatggaagggaacggggagcttgtaagggagaaccccagattctacatgaaagtacagaggtctctgatcaaaattttgctgacgatgaggctgaagctgaaacagaatcaatgaaagcatgcaagaaaaggagactaagcagggctttgcgctccggtgctgaatgatcaagtaaattcgcaggaacaattagcttagcctgttgcaagaatcgatatgatttatcctaaaagaaggtgttaagatgatgggacatggctttcaaaactttcagctgttgcctgctggtagccaagacacactgaatccgaaggaaggcgttgaagggtagctgttagtgattttgtgatataaagagtactggggcagttagcatcggcatttttagcggatttaagttcttgttatgtatatctgtcttctgtcttcatcagtagtgctgcttagtacctcactctctcgtcagcaggatatttctatatattgtctgtacttggtagatatatgtattggttgatcctatgagtgtaatgtttttttttgctgcagcttttgggggcagttggtattatgattccaaaccaatggaagtcaatagaaaaagcaggaagttcacc

SEQ ID NO: 99156 - DNA, 465 bp, Zea mays
  Clone ID: MRT4577_21942C.1
atggaggcctacttggtaacccacaaccaacgtagagccctgcggatccaagagcccgcttcatccaacccacttcaacccatgagagctgaagatccccagattcttgaaggtcgcccagtctctatcagaggagagatgaagacttgggaactcccggaaggagccattgtcttggaaggaattccagtcttccctcaggctatgaataagcaagagcaccctgaatcctcccaagatccccgcccaaagttgtttgagcccctcaccatgaagaagattccagcaccatcccttgaagtcaaggaagaagctgcaagcaccccgccagcactgccgccctctgaggagctacaagagctagtcccgcttgaagaagagttcgaccccgtgttgccatctcagtcgccgccagaagaagtcatcaacatcagctccctcttgacccatccaagagatgtctaa

SEQ ID NO: 99157 - DNA, 588 bp, Zea mays
  Clone ID: MRT4577_21943C.1
gggcaatacacaccaagttgccttgcacgaccgttgcggcgttggcatcacagatactggcgtgcttgatagccaaagactacctaaactactggatccacacgatgctaaatggtgagtgggggaaccagaatgtccacactgttcaccatgattttactgcgccaataggaatcactactgcatatgcacactgaactgaggtgctgatactcggcataccatccttcgtgacgacaaccattgctgcatgacacatatatcacatctatgcctctggattataactacgaaggctacaggctatttgagacacatagaacaatgtgatttgccattcacccaaacaaattatattgcattctatggaggagcaagataccatgattatcatcattataccaggacgacagagccaaatcaaacctacatctgttactcacttactgtgattactcatatggcactgacacaagatacagtattctcaaaaacatacctatcaaagctgacagatctgaggcataatgatagccagaaaggaaactgcagctgacccagctatgcgaaactgaattacattgcaag

SEQ ID NO: 99158 - DNA, 245 bp, Zea mays
  unsure (1)..(245): unsure at all n locations
  Clone ID: MRT4577_21944C.1
caaaaacccccaaaaccngacgagcaggagggccganccgcggcgccccgccgcccgagcggggcagncnacncggcccagccggggacccaagcggganggggcacaggagccccgagagcggccaccccaccgacggaaccnccgncagcggcagcggccgcagccagaacggaagacaaagctacggctangcaagcccccccggcaaaagggcaaccaaggaagacgccnacgagacaaaa

SEQ ID NO: 99159 - DNA, 1020 bp, Zea mays
  Clone ID: MRT4577_21945C.1
atggaggttcaatgccaaaccagcttttgccagaatgaagatggtttccccaagttgctgagagcatgcacagttcgcctcggaatcaggagtcagccagagtatgatggtcgtgaattcatcgagcatggcacagagaagtgtgtcgtgactgtatacattggatccagtccgcaccatgtggaatggagtgtcactgctgctgggcacagattcaaagacacctgccaagtcgtcgctcgcaaggcattgagggccctgtgtcagatctatgaagaagaagtggccgacacaacgctcagattctttccgccctttcagagagaccgtcccgtttggatggctaggatgcgtgcattggaagggcagcagctgcttgaggacgaccccacagtcgtgtacctcactgcatacctgctcacccttgatgcacagtatgatttcttggctcggcaccaccctcaagcccgtgcaactaccttggagagtcgtgaagtcattgctgttgaagccctgaagcaagccaaggatgagcacgtccagaagttgatggaggcctacttggtaacccataaccaacgtagagccgtgcggatccaagagcccgcaccatccaacccaattcaacccatgagagctgaagatccccagattcttgaaggtcacccggtctctatcagaggagagaagaaggcttgggaactcccggaaggagccatagtcttggaaggaattccagtcttccctcaggctatggataagcaagagcaccccgagtcctcccaagatcccccgccggagttgtttgagcccctcaccatgaagaagattccagcaccgtcccgtgagatcaaagaagaagatgcaagcaccccaccagcaccgccaccctctgaggagctacaagagccagccccgattgaagaagagttcgaccctgtcctgccatctcagtcgccgccagaagaagtcatcaacatcagctccctgttgacccatccaggagatatctcagattga

SEQ ID NO: 99160 - DNA, 476 bp, Zea mays
  Clone ID: MRT4577_21946C.1
tctcccttatcgtgccttagggcgaggtaaaaaaaaaaaaaaaaaaaaaaaaaaaaaaaaaaaaaaaaataaaaaaaaaaaaaaaaaaaaaaaaaaaaaaaaaatcctaaaaaaaaaaaaaaaaaaaaaaaaaaaaatgtttgtccttccccggggggcctttgggtttttcctcccactttcctgtttttggggtggaggggttttttggggggctccaggggtttttgtttttttaagttgcccttcctgtcaagttcctggggggggggggcttaccggaaaaaccccccccggacttaagctttttttttgttttcattgccgaaaaaattggcaccggggtttaatttcccccgtttttaacccgggtcccccccgaaaattctttgttttgcccttaatggggtttggttcccggccaaaaccccgatttttgggggtgggcctaaacccgtttttccgtcttttaaaaa

SEQ ID NO: 99161 - DNA, 1020 bp, Zea mays
  Clone ID: MRT4577_21947C.1
atggaggttcagtgccaaaccagcttctgccagaatgaagatggtttccccaagttgctgagagcatgcacagtccgcctcggaatcaggagccagccaaagtattatggtcatgaattcatcgagcatggcacagagaagtgtgtcgtgactgtatacattggatccagtccgcaccatgtggaatggagtgtcactgctgctggacacagattcaaagacacctgccaagtcgtcgctcgcaaggcattgagggccctatgtcagatctatgaagaagaagtggctgacaccccgctcagattctttccgccctttcagagagaccgtccagtttggatggccaggatgcgtgcattggaagggaagcagttgcttgaggacgaccccacagtcatgattgctcgagcagaagatgaagagaagcacaaccgtaagctccatgtggatctcaccacagctcaagcccgtgtagctgccttggaaagtcgtgaagtcattgctgttgaagccctgaagcaagccaaggatgagcatgtccagaagttgatggaggcctacttggtaacccataaccaacgtagagccctgcggatccaagagcccgctccatccaacccagttcaacccaggagagctgaagaccctcagattcttgaaggtcacccggtctctatcagaggagagaagaaggcttgggaactaccggaaggagccatagtcttggaaggaattctagtctcccctaaggctatggataagcaagagtaccctgagtcctcccaagatcccccgctagagatgtttgaacccctcaccatgaagaagattccagcaccctcccttgaggtcaaagaagaagctgcaagcaccccaccagcaccgccgccctctgaggagctacaagagctagttccgcttgaagaagagttcgaccccatcttgccatctcagtcgccgccagaagaagtcatcaacatcagctccctcttgacccatccaggagatgtctcagattga

SEQ ID NO: 99162 - DNA, 345 bp, Zea mays
  Clone ID: MRT4577_21948C.1
gtatgtacgcctgtcatgtgaccgtgtctcggaattcccgtggtcgtgcccactgcgtccgcgagacgcgtgtggcgtgactgcgtggcgctgggtgtcgccgtctcagtgctcatgcgtggtaccctttactagcgactatcttgcgcacccaactgtcgttcactcccgctggtactacgcgcttgttccgtctcgctgccggccatctaatgatgccgtggacgccagcaccctgctgcactatatcaacgtgttcgacgcggtggtggacgtcgcctacgtctggcattgcgtacctcgatgtcgacaacgtgccggtgatgtgttacggagaccgggttt

SEQ ID NO: 99163 - DNA, 616 bp, Zea mays
  Clone ID: MRT4577_21949C.1
tcgaggctcttccgggcacctgaggttcctgtctatacgaggttgttccatatctactgccttcctagttgtttgggaaatctgagacacctccaaactctggatggtagaggtacaagtattggtagttttccatctgcgatcaccaagctacagaagctagagcaacttcttgtgtctgatgatgattcagaaaagagagaacggcaccggaaatttttaatgctcttacatctctctgaaggatgtagcgctgttttattgaaaggtatcgactctgtcattccagacatcaaggatgaccaaatagatgaaatgtcagatggctccatgagaaagaataattgctgcacatctctgctataccacactcgcatgcgtctaacacgggtcctcctttgcttagctctttgccctttctactggaggccacaagcactagatgaaggtttgaacaggcgagatgtattcaacatacattctgccatggttaggtttacatttgtgaccgtggaagttcctagaggaatcagaaaactgaaggccctgcacacactaggagttttcgatggtgcacggagcaataccgttctgaaagagcttcaagagcttactc

SEQ ID NO: 99164 - DNA, 742 bp, Zea mays
  unsure (1)..(742): unsure at all n locations
  Clone ID: MRT4577_2194C.1
gccggccgggtctcggagcgttaaagcacttcctaataatttcgtcgccgcctcgggagagacagagagagagagagagagagagagagggacagtgtgctgtggaggttcccgacgagaggagagagagagagagagagagagtggcgtcgacgacgacgagcttgagcttgagctgtgcagcaactgggaggtatggggaggagtaaacaaagagggggcagcataggaaaagaccaccggacgccctcgtgaagcccagcttttcgtgccgcgttcagcctcctccgccagcgcgcgagattctctccatccgcccaggccccagcacagcaatgccgcgccgctggcttcttctggctccctgcgcgcggctgggctgccgtcgggatcgccgcggcaacggccgcgcccggcacgtgttacaaaaaccggccgtgcaccagccgatcatcggcagttgtcaaactccccccgcgctacatctcggagagccaccgccaaagcttcgaggcgggcggcggctacggctggtactttcgtgattatttcgctaaacacacttttaagttgtccgctgtacggcagtagattacactgttaaatagtagaatgagacataagacgagagacagtcttacagttctccagtctattttaccaattcgattttttttctgcaaataaagttagttactatatgctttttatgtgcgcaaaaaaaaaaaaaaaaggcccctan

SEQ ID NO: 99165 - DNA, 1472 bp, Zea mays
  Clone ID: MRT4577_21950C.1
cgcggcacctccttccctggccatgaccatgagcccgccggccccccgctaccgcccaccgggccgcccccgacgaccaccagcgacccgctggccccctcgctccccttccagtaccagcccccccctcagtcagtcgcagcccctcttgcctgtcctgtctcggtcgcctctaccccccagccaacgcggacaaaccccccctcggcggccaccgtccctgaagcacctcgtggcgtcctcggtagccccctggtgcccctccgtgaagcgatgcgcgcgatcgatgattgctcagatatggtgccgttcgtggagtcacgggggattgcaggagaagaccctgagccgcagacgcttggcgaaggtttcctttgctgcaatctgttcttaggtaaagaatgggattaagttttcatgctttatacatgggcgttgcatgatttctttgagttgaaggattcgccttgtcacttcccccagccagttgtctatgtcgtgttgttttacgttgtctaagttctgattctttttttttgtatatatattatgtagatgactctattctcaaatattaaaaattattattaattgtaattcgaagcattgcctaaaaaaaaaaaaaaaaaggaataagatagagagatcccccacagacagctccctgtgggtttcattttcgatagctaccttccgtttccgtgtgtttttagtgatgtaatcgctgtttatggccatagctaatcctatgatgaccatgtctttaagtaaatgaaggacaaaatggaaaaacaaaaaaaacagaaagccccgaggatccaagagccggcttcttccagccctggtttgctcaaggttgcctaagatcccatgattcttgaagttaaccagatctttttcaggggagtgaacaggacttcgaaaattttggcaggatccatagtcttggaaggaattccagtcttccctcaggctatggataatcaagagcaccctgaatcctcccaagatcccccgccggagttgtttgagcccctcaccatgaagaagattacagcaccatcccttgaagtcaaggaagaagttgcaagcaccccaccagcaccaccgccctctgaggagctacaagagccagtccagcttgaagaagagttcgaccccgtgttgccatctcagtcgccgccagaagaagtcatcaacatcagctccctcttgacccatccaggagatgtctcagattgaggtgttgaggcggttctccaggagttccaggactttgacgagttcaatgattaggctagcgacctcccccagtcagctgcctgtggtgggttgtttacgttggctacgtttcgattctgtgtactttgatttatatatgtaaatgactctagtctgtaatattattacttactctttattgtaattcgaagcattgtgctatgatgagtcatttatgtaaaaaaaaaaaa

SEQ ID NO: 99166 - DNA, 626 bp, Zea mays
  unsure (1)..(626): unsure at all n locations
  Clone ID: MRT4577_21951C.1
ttcagtagctggtgttcccacaattgtggactccatttttggtggtcagctatctagtactgtgtccagcacagaatgctcacacagttccgttaaacatgatcaattccttgacctctcactaccagttccatcaaggagacctccaaccaagagtgtttcatcaccaccagttaagaggaccaaacagtccatacgagataggaacaaaaaccgcagatacgggaaggttccagctcgagcatctccttcagtagagagtaacaaagaacaagttcaatcaattgctgagcgcaattcccaaattcctggttcagaacttgaacaggtagtcagcgnaaaaagatgctgagccctctggatgcagtgagtcatgtggttctgtgcctaatcaagaacaaaatgccactacaaatgtggagaatagcatctgctggttggattatgtcgctgatgcggatgaaacaaaatctgagattcttgattctgcagattctactgaaacaggacaaatttgggaatgcagggatgctgcacatggtcccttacaccctcaggatgatgccctacccaaagagcagatcttgggttctgagcactcaggcgaaaacactgttgatgatgat

SEQ ID NO: 99167 - DNA, 456 bp, Zea mays
  Clone ID: MRT4577_21952C.1
aaaaccccgggttctacctttacccttttgcagtttcaggctgcaaaacctattttgtttataatttacaacgaatggaggggcccaaaacaagggggggaagggttaacatcatcgttttgctactggcaacagcgtctcaacccccccccttgggctgaaagcccaaatcccccacgggcgaacatgcgctggattttttcccggaccccgttgagggacctggaaggcagggccggggtaatctccaccacgtcccccatgctaagtttccggttggggcccaaaataggctcggggttcacccggggccgaaaatcctccttcagggggaggctggaggggctccatctcgagctgtgggccccggcacggcccataaaaaccattaccggtgagtctgccgggaatttttggacaaacattttggcgggctccaggaggaagacaaacagg

SEQ ID NO: 99168 - DNA, 591 bp, Zea mays
  Clone ID: MRT4577_21953C.1
ggggaaaaaaaaaaaccagggcttttttacccttttacctgggggggaaaaaccggattttaaaagggcttaaaccaaaaaaggttccccctgaaaaaccggattttaaaaggggtttcccccccttaaagcccctttttttaacccaaataaaaacccggcccccccaaaaaggccctttttttaacccccgggggaggcccacctttggggggggcccaaattttttttggggggccaaagggggcctttccctggcccattttttcccgacccccccaggttttttttggggggggggccggtttcccctcgcccaataaaaaatttcgggccggcaaaacccgggccttttttttttttgccttgcccggaacctgtcccaggtttgggaaacccctttcccttcccttggggcccctttttttgtttttttgggccggggaagccctttcctaaagggggggggggttttttcttttttttttccccccttcaccaggggtaccaggggaaactttccgggtcccttgcctttttgtttcccccccaaaagttttatttttttcaatctttccccggttttgtttt

SEQ ID NO: 99169 - DNA, 222 bp, Zea mays
  Clone ID: MRT4577_21954C.1
aggccccaaaaaaatataatggtatctcttctcaactttctcatctgatgcctagggaaccccccttttttgttgccacgtttattgcggatttcccaacccccacagactcccgacttgactgatgtctagggggttttacccagggaacgaacaggccctcccccatagcattctgaagttcaacccttgcaaagcttctttttttttaacccccggaat

SEQ ID NO: 99170 - DNA, 183 bp, Zea mays
  Clone ID: MRT4577_21955C.1
gacctgctgtacaacggcggcatcggcacctacgtgaaagccgcgcgcgatacgcatctgcaagtgggcgaccgcgcgaacgacgcggtgcgcgtgaacggcgcggagctgcgctgcaaggtcgtcggcgaaggcggcaacctcggctgcacgcagttcggccgcatcgagttcgcgcagcgc

SEQ ID NO: 99171 - DNA, 3568 bp, Zea mays
  Clone ID: MRT4577_21956C.1
ggccccagtttcaataaattcgcccttaagcagtggtaacaacgcagagtgcgcgggatgatgcaagcaaattagctggtcagcttgttgcggaatctaaagcagcgaagcggattggcttcattggtcttggagctatgggctttggaatggcatctcatttgctgaaatcagggttctgtgttgttgcttatgatgtctacaagccaacaatggccaggtttgctgatttgggtggatcaacaaaaggttctcctgaggaaatagcaaaagatgtggaaatacttattatcatggttgcaaatgagtctcaagctgatagtgttctttttggaaacgctggtgctgtaccagttttatctgctggaacatctgtcatcctttcttctacagtttctcctggatttgtgatccacctcaacagaagattagaagctgaatgccgacagataaagttggttgatgctccagtatctggtggtgtcaaaagggcggcggatgggacactacatgagctcgtaaaggggtgcgatgaagccctccattgcactggttctgttctatcagcgctgagtgaaaagttgtatgtaatcaaaggaggatgtggagctgcaagttctgttaagatggtcaaccaacttcttgctggggttcatatagcttcagcagctgaagccatgtcatttgctgctcgactaaatttgagaacgagaagagtcttcgaaattatgcaacatgcaaggggttattcatggatgtttggaaatcgtgtgccacacatgctcgataatgattatacaccctattctgcagtggatatatttgtcaaggatcttggtatagtatcttgtgaaagttccaattcgaggatcccagttcacgtctctagtatagcccaccagctgtttatttcaggatctgcttctgggtggggtagatatgacgatgctgccgttgtgaaggtctatgagacattaactggtgtaaaagttgaagggaaggctccgatgctcagtaaagaagatgttcttcagtctcttccatctgaatggccagaagatccaattgataatcttgtacctattgcatctcatagtagcaaaaagtttcttgtagttttagatgatgatccaactgggactcaaacagttcatgatatagaagttttaactgaatggcctgttgaagcccttgttgaacagttcctcaagctaccaacttgcttttttattttgacaaactctcgttccatgactgctgataaggccatgctgctagtacaaactatctgtaaaaatcttaaagctgcggcagagaaggtccctggtgttagttatacaatagtcttgagaggtgattcaactctacgtggtcatttcccagaggaagctgacgctgctgtctccgtattaggtgagatggatgcttggataatctgtccattttttcttcaaggtgggagatacactattaacgacatccactacgtcgcagactctgatagattaattcctgctggtgaaaccgaatttgccaaggatgcagtttttggctataaatcttccaatctcagacagtgggttgaagagaagaccaaaggacgggttttggagaaccaagtttcaacaatttccataactctcttgcgtaaacaaggaccaactgctgtttgtgagcatctctgtagcttggagaagggctctgtgtgcatcgtcaatgctgctagtgacagggacatggctgtctttgcttctggaatgatccaggctgaattgaaaggaaagcgatttctctgccgcacagctgcaagttttgtgagcgcaaggattgggatcaagccaaagccacctatctgtccaaatgaccttggcttaaaaagagctttaactggaggcctcataattgttggttcatatgtgccaaaaactacaaagcaggttgatgagttgcgatcacagttcgggcaatctcttcgagtcatagaggtgtctgtcgagatggtttcaatgaaatcaatggaggacagagaccaagaaatcagacgaattgttgaactagggaatgcttatatacaatccagaaaagacactctaattctcaccagccgccaactcattactggaaaaactcctgaagaaagcttagaaattaattataaagtgagttcagcactagtggagattgtgagaaggattgatagtaaacctcattatatcattgcaaagggaggaatcacttcatctgatattgctacaaaggcgctggaagctaaacgtgccaaagtcatgggacaagcattagctggtgtacccttgtggcagcttggtcctgagagtagatttcctggggtcccttacattgtttttcctggtaatgttggtgataacagtgctcttgctaaagtggtgaaaagttgggcttccccatctagaagttctacaaaagaaattcttcttaatgcggagaagggcggttatgctgttggtgctttcaatgtgtataaccttgagggaattgaagctgttgttgcagcagcagaggctgaaaagagtcctgctattcttcagattcatccgagtgctctaaagcaaggtggagtcccactggtagcatgttgcattgctgctgcagaacaatccagtgtgcctatcagtgtccactatgaccacggcatttccaagtcagacttgcttcaagctcttgaagcgggatttgattcagtcatggtggatggttctcatctaactttaggggataacatcttatacacaaagagcatatcttccttggctcatgcaaaaggtttacttgtggaagctgagttgggtaggctctcaggctctgaagatggcatgaccgttgaagaatatgaagcaagatttactgatgttgcccaggctgaggaatttattgatgagacaagcattgatgctctagcagtttgcattggaaatgttcatggaaaatatccacctagtggaccaaaccttaaattcgacttgctaaaggaccttcgtgcattaacattaaagaaaggagttagcttggtcctccatggagcatctggtctatctcatgagctcgtaaaggagtgcatagacttgggcgtgagaaaattcaatgtgaacaccgaggttcggaacagctacctggcgtccctcagaaagccagaaaaggacttgattcaggtgatggcgtctgctaaagaggcaatgaaagctgttgtagcagagaagctgcgcctgtttggatcgtgtgggaaagcctgagcgaagtacttgcgttgcgccggcaacatgcagtacaagaccgactgcatcatcgggttcgtgatgctgctgctactgtgcagttgcttacagttacagctcattgcgttgaacagctgaagtggttattgtactttgcagtgtagcgcaactaaggctaattcataaatcgtaataatgtatgtatgctgccccgctgtaaaaatgctccgtcgttaataaatgccatcgcgcttgctgtgcctttgtttacaaaaaaaaaaaaaaaaaaaaaaaaaaaaaaaaaaaaaaaaaaaaaa

SEQ ID NO: 99172 - DNA, 624 bp, Zea mays
  Clone ID: MRT4577_21957C.1
cgccacgcgtccggtttgagactttgattaaaaaaaaaaaatataaaaattataaaaaaaaaaaaaaaaaaaaaagagctatgtttatttaaaataccaagcttaccccctctctccatacaactattatatcttcttttattttcgtcctctaaattcaattcacttggccttcatttttcatcatccttaattgttaaacccctttctttacccaacttaattctctttcaccccattcccctttctccatctttctttttatgcaaatatgctccctacccatcccccttcccaacattttctcatacttaaataccatttggacccccccttttacttcttattaaacccctccttttttctttcttcccctcatatttattttttccctttcccagcgccctttctcccactcctttccctttattccctttttttttcccccctttttccttctttttccctcaatcttttaatttttgccccctcttaagttttcccttttatttctttaccgcaccttttccccctaaaatattttttattttcattttttccccatctggtcccttttccctccttaacctttttttaccccttttctttttatttccccttttt

SEQ ID NO: 99173 - DNA, 503 bp, Zea mays
  unsure (1)..(503): unsure at all n locations
  Clone ID: MRT4577_21958C.1
cctaaaggacaaaactgnactcgaggccgtttttttttttttttgggggaggggggtcataatgtgtcggatggggcattgctgctcgttcctcgttgcgctttcgctttacagactatataaactcagacttgggacggcctacagccctactcctcaccaggaggatccacccctcgcctggcccgttagaggtggatcaaggcgtcgttgcaccttccatgtgatggcgcgctgcacaccggtgccgccaacatttaggccgatttttccggcggcgcctccggcgtctcctaaatcgtcctcagccatcttttctgcgccgttgacagtacatcccatgatagcggtcgaatcgcctgccgcatgagagggcttttctctattctcagccctgatttcctgctggtcctagattgtttggtcgcaggaagggccggacacatgttctgtttttgtggtgcgcatcctgaaaccttcgggcgagttgaaagaggtgtccc

SEQ ID NO: 99174 - DNA, 540 bp, Zea mays
  unsure (1)..(540): unsure at all n locations
  Clone ID: MRT4577_21959C.1
ttgcccacgnncgtccgaaaaaaaaaaaaaagagagaaaaaaaaaaaaaaaaaaaaaaaaaaaaaaaaaaagaaaaaaaaaaaaaaaaaaaaaaaaaaaaaaaaaaaaaaaaaaaaaggggggtcggtttttgggggtccgggttttaaggggctccttgttttccgttgcctttgggttgttttttaattgactttttggggggggtgggctgaaccttggtttacctgcgggcgggcttgggaaaacctgggttgggaccaactttgcttttctccatttaattccctttttaacagtttgctttttggcggttgggctcatatggaactgctttcccccttttggtttccttgattggcgagtgggtcaggccttatgggggccttttttgcgggggggttttagggtttacgtgcttttttttcacttccctttgcgtccgtttttttggcctttcttttaggttctttcctttggttttccgccctttccttggggggcccccgtccggttttaactggggggtttcttttgggg

SEQ ID NO: 99175 - DNA, 610 bp, Zea mays
  Clone ID: MRT4577_2195C.1
tccggactgacgagctcgccatggcctccctctcctctgccgccgacaccgccccttccttcgccgcaccaacgccaacccgcgccgtgcccagaaggaggaccttcaccgtgcacgcctctctccgcaaggccaccggcaccgccgccgtgagaatggctgccagtgccctgcttgccggagatgccatgtcccaggaggtgctgctgggtgcaggagacagagtgcctcgcccttctcagcccagaacagtatcacactgtcaaggctcgctgcacgccaatcacaattcaatgaaacaacgcactggcttgccccgcacaacagtcaaccattacgacataaataccgaaggatgcacgcagcgcatgtcgcatacctccatatatatatgaataggaccacgtccgcgcccgactttggacctataccagccaacactacgggatggattattattattattattgcgatatcacatacatgtacccctggtacctgaagatggatgtgtatcaagttatctaattaacacacctgcagcaaaaaagtatatatgtgtgcgttcctgctttgtactccgccgatctgtgaatctctacatgttttc

SEQ ID NO: 99176 - DNA, 191 bp, Zea mays
  Clone ID: MRT4577_21960C.1
cttaaaaaaaaaaaaaaaacaaaaaaatggagataaaaaaaaaaaaaaaaaaaaaataattaaattttttgggtaaaataaaaacatactgttttataataaccctcttggccctgaccccccttagggctacttttgctcatttccatcgcactgtgggttgcttcgacctgcttctaaagggcccaatt

SEQ ID NO: 99177 - DNA, 280 bp, Zea mays
  unsure (1)..(280): unsure at all n locations
  Clone ID: MRT4577_21961C.1
ccggcgcgggnatccatcacagctagactacacataggaacgaatactcactcctgtagcatactaacacgcagcgagcaggtatatgaccccggcaatacgggcgcttgctgctcctgcagccaggctcagctatgtcaacgacgtcgacgggtctgtgaaagcatactactgcagctggcggccgtgctggggacagcaccagtggtcaagagcgctgagcaggtgactgtgcgtgtggccccaagccggggatacgcgatggacagaacggggagag

SEQ ID NO: 99178 - DNA, 665 bp, Zea mays
  Clone ID: MRT4577_21962C.1
actaccacttaccagcccaactggttagtcttctcctttgtcaccctttcgaccagggatcgaatccctgcgggcgcaacattctttaactaatctcattgcctgttgccacccacccaccggctccaccttccgaatctcggacgcctccgcgccggccgcagggcacgcgacttccgttccggcggcgggggaagagatggcggcgaacctcgaggacgtgccgtcggtggatctcatcaccgaggtgctccgccgcgccaagtgcagctccaagcccgacaagcgcatcatcctcgtcggtccacctggctctggaaagggtacgcagtcgccccttattaaggatgaatactgcttgtgccatttagccactggtgatatgctgagagctgctgttgctgctaagactcctctggggatcaaggctaaagaagctatgaacaagggagagcttgtttcagatgacttggttgttgggattatcgatgaagccatgaagaaaccctcatgccagaagggttttatccttgatggcttccctagaactgttgttcaagcacaaaagcttgatgacatgctggcaaagcaaggcgctaaagttgacaaggttttgaacttcgcaattgatgatgcaatattggaagaacgaattactggccgct

SEQ ID NO: 99179 - DNA, 449 bp, Zea mays
  Clone ID: MRT4577_21963C.1
cgggcagacccactcgtccgcccacgcgtccgttctgatgttgatagcttcgtttgaaggaaaggtgagagcagaatcgtggggagaatctggtattgtgtcctggctgttgttttcgcgatcaaaacgatgtcgtcgccggacattgtctcgatattggataactcgaaggagctcgatcgggttaggaaagaacaggaggatattctgtcggagatcaacaagcttcacaagaagcttcaagcaactcctgaagtggttgagaagcctggggataactcattggcaaggctgaaatttttgtatactcaagcaaaagaactttcagaaagtgaagcaagtatttccaacttactgataaaccaaattgatgccctactgcctacgggtccacaagggcaaacacgaagaagaataggaaaaggtaatgagcagaaaaggaaacgagt

SEQ ID NO: 99180 - DNA, 391 bp, Zea mays
  Clone ID: MRT4577_21964C.1
agccttccgggcattcttgttaaagccgtcaatggggccccccgtgccggaggccaaggccagggccacccgggaccagttggccggttccagggtaaagttcttcaaccgccggatccccccttccgggcccggaataatgttcttttccggcggccattcggaggtggaggcaacccaaaacttaaacgccttaaacaaggggccaaaccgggggaacgtgtccttttcttacgcccgggcgctgaaaaaaacctgcttaaaaacctggggcggccagccgaccagggtaaaggcggcccagaacccgctgttgttgcccgcaagggccaactccttggcgcagttcggcaggtccacttccaacggcaaggccgccagggccaaggag

SEQ ID NO: 99181 - DNA, 444 bp, Zea mays
  Clone ID: MRT4577_21965C.1
actacaccaaactggggcgaggttctgttcaatgggaacggctgtaccgattgagcatagtcttgccggatcatgctgcgccttatggacttccggcccatcctgctggcggtgcgctgcaggatcaaggacatctgcttgaggatgcgtgctcgaggggtgggaatgacgacggaaatatactcgatccgccaggacgcatgcaatgggctagccgactactaccagaagctatgtgcacaaggccgacaagcacgagatgaggggcatcttcagccggtacgagcgtacccttctcttcctcgactacatgggctgcgagcataagaagttcggaggaggctgcgtgtgcgctaggtgccataatcctaccgtatagcactcgtctggacgtggctgccgaaccgttgcctgtgttgaccgaagctggcagctccaaggctg

SEQ ID NO: 99182 - DNA, 279 bp, Zea mays
  Clone ID: MRT4577_21966C.1
gaacattactgctaaaacagctagcaagagatctgtgcatcagtgaacggagaatcctgtatcgcatacaatatatattgcgtagaagattgagggacatgagaggcggcgaacttagagctctgtcacttttcaacgggctgagaaaactctttaaataaatggatcggctatcttatcttggcaatgattcagaagcagtacaataactccctagatgagctgtcataactatacttatgtttaagaaacagcctacatcttaggtcacttatgttt

SEQ ID NO: 99183 - DNA, 326 bp, Zea mays
  Clone ID: MRT4577_21967C.1
gaggggggaaccccattccaaccattaggacccaatcgacagcagttcctgttgctttcgacaggaactctgtcaagggctgctcatcaataaacaagttgaccagctgggttattcacgtcccgctgaggacacggacctaatgggctttgctacaggtggggcttaccacttgggaccacagactctgagatggtgtctcacgacacaccgagatgattattgatctgctgtggcatgtacccattctattatacgagtcgggagacctgattattcaaactgtcattctagttcatcaacatcttggtcattgctatcagatt

SEQ ID NO: 99184 - DNA, 1061 bp, Zea mays
  Clone ID: MRT4577_21968C.1
cccacgcgtccgcccacgcgtccgcaagctttccattccgtcgtatcgtgtgatcccgcctccggtatgaatgattcgcgtattttgatttcgatctgatccgtcgcactgtttgactcggccccggccgggtactgagggatccaaatccaagggaatggatcaggcggcagccatgagccccagcccacgcgccgccgccgccgccgccggcatccactgggaggcacacgggcggcttctcacggcgtgcctcgtcgtgctcaacgtcctcctcgtcctcctcgtctacgcctacttctggcgcttcttctcgcgctcgcgcacgcgcggcggcggcggcggcggcggcggcgaggacgacgactcggccgatggggcgtcggcgtcttcggaggcctcgtcgccgccggcgtcgcccaaggcccgggaccggcgcgaggtgcagctggccatcaccgcgctgcccgtcttcgtgcactcctcctccggcgtcggcgtcggcgtcggcgggccggcggccgagtgcgcgatctgcatcgcggagttcgcggacggcgaccagggccgcctgctgccgcgctgccggcaccgcttccacgcgcgctgcgtcgacacgtggttccgctcccacaccacttgcccgctctgccgcgccactgtcctcgccgacgccgcgccggcgccggcggaaactgccaaccaaaaccaaccaccgcatcatcttcatacggatacgccgaatggtacggactccagtacagaatctccggtgtgaaaaagacagtcgcaggcagatccattcatggtttaacttgagagtactttcaaattgcgagtgatcagatgcctgtgtactgggaggaattaaaagcctgctcatgcaagcagaagcgcacttcttgatcaggtttaattgtgagtgcattagattttagacatttcaatccgtatttttgtacaactttctcgtgtaaacagtacgtgggatgagctgctagagctggctgtaaatttatgtgtgctaattgaactgctagctgattttcttgggttctgac

SEQ ID NO: 99185 - DNA, 258 bp, Zea mays
  Clone ID: MRT4577_21969C.1
ggcaagaaacacactgtactgcttttatttcacagtttgccgcgatttacaaaaatacaacgggtgtcaaaacagtgttaaaacattacaagtttaaaaacgacgtgttttccagcgacaacagtgggctggtctggacacaatcggcggggaaatttacgttaaaattaacagaagggacccgagctttatttttttgggatggaaatgattaaccgtttaagaaattttttgccagaagcccaaaactgtgtgctt

SEQ ID NO: 99186 - DNA, 357 bp, Zea mays
  unsure (1)..(357): unsure at all n locations
  Clone ID: MRT4577_2196C.1
gacccacgccggccgcggcaagctttcggcagaagccacgagggagacgcanggggngnngcncgcnngnnncggggggcggncaacacgccccnngcnacccgangcnncccccgacggaccgnnaagaaccaacccgaacaagaagagacnggacaangaagcnnngacggcngcnaaannggcgaagaaggagaggggggggggaaggncngngggngccgaccagnancncagngccccaaccgangacanagncccnnnggacaacnaccnggacacccagnacnnnggacagaacagcaacggcacgccaccacagaacnncacagngananncgacaccggaagcaccaa

SEQ ID NO: 99187 - DNA, 499 bp, Zea mays
  Clone ID: MRT4577_21970C.1
cctcgaggccggccgggccgggctattgcagcaaatgccatcgtttgagaccttgttggaatgtgtttaaacttgagtatgatcatctcaattgtgtgttgcagctgttgtaagggtgctattgaacttgatggctccttttatgtttggtcactcaattttgtagtgaaaaaaaaaaaaaaaaaaaaaaaaaaaaaaaaaaaaaaaaaaaaaaaaaaaaaacacaaaaaaacccccaaaaaaaaaaaaaaaatcccccaaaaagacaaaaaaatgcacacaaaaaaaaacacaagaacaaaaacaaaacccaacaaaaaaaaagccccccaaaccccccttcaacccaacatactatcccctaacaaaacgaaaaaagccccccacgcccaaaaagtgaccaaactcacccccagggaaaaaagttaaccccccccctttccccccaaaaaacaagccgtaaaacaaaaattaaaaaaccgggcaccccacagggaga

SEQ ID NO: 99188 - DNA, 1845 bp, Zea mays
  Clone ID: MRT4577_21971C.1
ccaaaagatgttattttttgatcgtcacaaggttggtgaattgaccggtttgttgacatctgatttgggttccttgaagagtgttgtaagtgataacatatccagagatcgtggactgagggcactctctgagatcattggtacactttgtatacttttcacactatcaactgagctagctccagttcttgggctccttatggtgtccgtctccgtgctagttgctattttcaagaggtcaactgttcccacttttaaatcttatggaatcgtgcaagcacgcatatcagactgtgcatcagagacattttcagctattcgtactgttcgatcatttggtggtgaaaaacgacaaatttctttgtttgacaatttggcacatgcttaccaaaataatggcacaaaacttggagtgctgaaatctgctaatgaatcattaactcgagtagtcgtctatgtctccctaatggcactttacattcttggcggtagaaaggtcaatgcgggcaaattatctgttggaaccatggtatcttttattggttacaccttcacattaacctttgctgttcaaggagctgttaatacccttggtgatctgcgtggcacattggcttccgtagagagaataaattctattctttcagcgaaggacattgatgattcacttgcatatggtttagccaaagaacttgatggcaaagagtttgatgattccaatggagtgtatgaaaatggatctgttaacaaacatttcatgtcagagctgaaatcatccagtagctgtagtaatctagcctggtctggtgacattcgtctgaaagaagtccatttctcttatccattgagatctaatgtggagattttaaatggccttgaccttacaattgagtgtggaaaagtcacagcacttgtcgggcctagtggtgctgggaaaagcacagtggtacaacttctagcacggtattatgagccaactcaaggttccatcactgtcgcaggagaagacatccgtgtatttgacaaaagggaatggtctcgagtagtatctctagtcaatcaggatccggtcctattctccgtgtctgttggagaaaatattgcttatggtctcccagatgatgttgtctctaaggatgagataataaaagctgctaaagctgccaatgctcatgaattcatcatctctcttccacaggggtatgatactcttgttggagagcgaggtagtctcctaagtgggggacaaaggcagaggattgcaattgcacgagccctcttgaaaaatgctcctattctaatacttgatgaggctactagtgcactggacgcgacaagtgagcgactcgtgcaggaagctctcaatcacttgatgaagggaaggacttctctggtcattgctcacaggttgagtaccgtacagaatgcacatcgaattgctgtttgttcagagggcaggataactgaactggggacacaccgagaactggttgctaagggaggcagttatgcatcacttgtcgggacacagagacttgctttcgagtaatcacacgtcaactgcgaggaacggatcgactgcaatgtaggggattctatatattactctattttccttcagggcccatcggaacataggaattctcgtggaaatcagaatgaatttcatgggtaaaatatagaaaacagaagatgaaaaaaaacccaccttctgaatgtggccttggttataggttgtttcttatccacagaagcaacacatgaatcagaaaacacatgtatgtatcgaactttataatatattaacctaaacaaaggacaacaaacttcttatcctcacttgcg

SEQ ID NO: 99189 - DNA, 459 bp, Zea mays
  Clone ID: MRT4577_21972C.1
ggaaagaaaaggccctggggttaaataaaaaaaaaaggccccaaggggcaggggcaccgcccatggaaacagggggtttgcccaaccctaacaaaaacataaagcccccctaaaaataaaaatggcccttttagaaaatttaaaaagaaaaagtttaagggggcccccttttgggggggaaaaatttttggggaaaaaaaaaaagaggaaaaattccccctttggagggccgggggccaaaaaattcccaatttgggggttaggggccgggaaaaaattaaacccccccggcccaaggggcccctccaaaaatgaaaagaaaaccaaggggcctgaaacccaattaggggagccggttaacgggggagccccctgaatttttggggcccccccaggaatttggaaatccccctggaaggcccccggaaaaaaaaaagccggtttctgggaaattttttt

SEQ ID NO: 99190 - DNA, 680 bp, Zea mays
  Clone ID: MRT4577_21973C.1
cttgggcattttgctcaggcacatcaagtctcacagggacctcgggaaagagtgtatctgaagctgatattctgagccctcaatttggaaagaaacttggaaatgtttttgacttgcgggaaaggctatccccttctgaacattttactcgtcatgccttggtggatcatgtggatctaaatccttcactagacctgacatctggctctctacaccctggactaaagcgtggtaaataactattgaatgtaaaaagcagggtggcattttttgagttttttggctgctatgaccattcaacgactgcaactgtatcatagtatcagaaagattgacaatttctttagaagctaatggttggcaatggatgggatctttgttgtcatcaatgcaattcaagtcaacaaagtcatttgcagattcggtgtcatacctttctagctgctgggaacttgtagtgttaatgcagcattgtgttagatgttggtctgctatcgtcttatatgtgtggttcctgcagctatgcacctgtttgtcaattgttatatttatcaagcatgtgcagagatttgcttgcacctgctttgcgtttcaactttagcttattgaacatgataccaaagtttgttaaacaaaagaatatcatgttgttctgtgaattgcagattctgcctattcct

SEQ ID NO: 99191 - DNA, 429 bp, Zea mays
  Clone ID: MRT4577_21974C.1
ggggaaaagcggtaggaaagggacccccaaagccccttaaaaggggggccaaaaatggaaaaaacaaactttttggagttctggaagaacaaaaaaaggggcctactgggaaaaaaggcaccccctacgttattccaagccaggggtgactatgggctatggcattcgaaaaaacccgcccattacattacgatgggggggaacagtttcatcacaggggggaagctcacccataattggcgcctttaaaaggggggacacccccacactcataaatccattcactatataaaacaaaaggcccagggggggcattaacaggggggctgaagttttcccgacaaaatctaaaaaaagcttcgccaatcaaaatcttcatgggaattggggactcaacactacccccggggttgcaaaatgggcaagaaa

SEQ ID NO: 99192 - DNA, 782 bp, Zea mays
  Clone ID: MRT4577_21975C.1
cagacgcgtgggcaacgactgcctaagcgaacattcgcccagctgccacggcccacacgcacgcgccgttcaaaagcccaagctagcgcccaaggccggccggcggcctaacaagctcgatcttccagtccactacttaattggatagatcaagctccaccggcggctgagcgcgcgcgcgcgcgccatggctttgtcgtcgaggcagctcgcggcggccctcgtcgccgtgctggtggcgctcgccttccttactgcgtgcgcgagcgccgcaaggccggcgcctgcagcgagcggcggcggcggcggggaggaggaggaggccacggccacgacgacgcccgcgtacctgcggcaggtgtacccggcggtggtggagacggtggagatgctcttggccaggctgccggccgggcccagcccgaagggccccggtcactagcgtacgtacgtacgtattggccaagcattagcgagcagatggtggcgtacccccgtacgtatggagcttttgtatagatattgtctctctgctagctgtgatgatagtataaatatgattgtactaaagtgctaattaagagcacgcacttatacactagatatgattctttcatacctttgtcgtcgtcgtcgtcactagatcgacacgtactgctagctagtagctagtgtatatatatgttagcctgtgtatgcgcaaacgctttggtttgtactttcttttacattattatttcctctgaagttctgttatgaaagttagtattgttctgctaaaa

SEQ ID NO: 99193 - DNA, 412 bp, Zea mays
  Clone ID: MRT4577_21976C.1
cctcccgatcccccctcccctcctcttcctctgctccggacaccccatctccgtcgaaccggacgccccatccacctctggacggccctccacctctacgggtggcggcggcgtcggcgtcggcgtcggcgtagcaaggtcagtgagaaatggcgccgcccgggtcgcgccggtgggcgtacgtgcggatcatggccggcaccatcctcggcggcggcctcggcttctacgtcatgcaccgcatcgagacctcctacaaggtgaggatggaggagaggctgcggaggtacgaggcgcacacgctcgccaaggagaaggaggcgcagcagctccaggacgaggggcgccgcgaggaccaggcgcaggtcttgccggactcgtgatttcctctcaactctcatcctcatgctca

SEQ ID NO: 99194 - DNA, 923 bp, Zea mays
  Clone ID: MRT4577_21977C.1
gtgctgcgctcgtggcggccgggcggaaatctcgataggggtgcgcgaggacgaggagaaaaaacagaggaggaaaaaatatcaccttctcttcctgcattcccctgctcgatccccggcgaggaattcgcccccgaatccatcgatttgctcagtccagtccgccgatccgtggatcgattcgtgcgtgggctctgtcctccccggggttccgatctggtcctcgcctcgccggaggaggagctggaggagatgaacggcaccgggggcagccaccaccagcagcagcacaggctccggcagcagcagcagcagcaggcgctcctgatgcagcaggcgctgcagcagcagcagcagcaacatcagtaccagtccggcgtcctcgccgccgcggcagccgcggccatgacccagatggaacctatttccaatggcaatcttccacctggctttgatccttccacttgtcgcagtgtgtatgttggaaacgtgaaccctaatgtcacggagagccttttgattgaagttttccagagtgctggccttgtggaaagatgcaagctcatacggaaagagaagtcatcctttgggtttgtggactactatgatagaaggtctgctgctctagcaatcatgacccttcatggccgtcacatatatggacaagcaatcaaggtgaactgggcatacgcaagtacacagagggaggatacgtcggggcatttccatatttttgttggtgatttaagttctgaagtgaatgatgcaactctttatgcctgtttctcagcatatccttcttgttctgatgctcgagtcatgtgggacaacaaaactggacgttccaggggttatggttttgtctccttccgtaatcacaggaagctgaaactgctataactgaaatgactggaaaatggctt

SEQ ID NO: 99195 - DNA, 620 bp, Zea mays
  Clone ID: MRT4577_21978C.1
ggtaccctcgacgccggccgggagtcgccctcttgggccttggcttggcttctaccctaccctgcaaacacacgctctctcctccctcgtggcctcgtcacttcttctcgcactcgtgaaacaacaacaaaaaaaggttcgattttttcccccttcgatcgatggagaacgcgccgacgtcacacgctcatggcgtcagcctcgacctgcgcctggacccatctccgctccatcgctccgccgcggtgcccgtgcccgcgccgcccttcgctgccgaccaccgcccgggggaggccttcgcctgcaactactgccaccgcaagttctgcagctcccaggcgctgggcggacaccagaacgcgcacaagctcgagcgcaccctcgccaagcgcagccgggacatcctcgccgcgcctccaccgtcgtccccgccaccaccggccccggccgtagccttccatgctgccgcgccggaaagcaacagaaggagcgggctcgtgccgaccgcgtactacggcgccacgaggctcgcgagggaggaggacgccatggcgcagcaggcggcgccaccgggcttcgcgatgggctggggtgcagacactgcggccctcgagctccag

SEQ ID NO: 99196 - DNA, 862 bp, Zea mays
  unsure (1)..(862): unsure at all n locations
  Clone ID: MRT4577_21979C.1
gccggccggngtgcaaccttcttttcctgcgttcccctgttcgatccccgacgagaattcgctcccgaacccatcgatctgctctccgcagtccgccgatccgtggatcgatccgtgcgcgggctcggtccgccccgggttccgatctggtcgccgcctcgcctgaggagatgaacggcgccgggggcagccaccaccagcagcagcagaggctccggcagcagcagcagcaggcgctcctgatgcagcaggcgctgcagcagcagcagcagcagcagcagcagtaccagtccggcgtcctcgccgcggcggcggcggcggccatgacccagatggaacctgtttccaatggcaaccttccacctgggtttgatccttccacttgtcgcagtgtgtatgttggaaatgtgaaccctaatgtcacggagagccttttgattgaagttttccagagtgctggccttgtggaaagatgcaagctcatacggaaagagaagtcttcctttgggtttgtggactactatgatcgaagatctgctgctctagcaatcatgacccttcatggccgtcacgtatatggacaagcaatcaaggtgaactgggcatatgcaagtacgcagagggaggatacgtcaggtgagatattttttttaaaaaaatatattcttgttgtctctttcttttcatattataatccttgtttggttaaccgtgccaattgaattatttccagggcatttccatatttttgttggtgatttagttctgaagtgatgatgcactctttatgcctgtttctagcatatcctcttgttcgaagacctttttgatcatgatgcatctatgacgagcttacctgcag

SEQ ID NO: 99197 - DNA, 1196 bp, Zea mays
  Clone ID: MRT4577_2197C.1
tttttttttttttttttttcttgctctatatagcagcaaaatgagtgaggagtgagaaaataatggactagctctttctcgaaccaaacaccctataaaagaatgcaccgaaaatttctcatttttcagcatcatcaaaaatcagctccaaaaaggttaaattaatctgcagaatacaatgaactcatacaggcatttactcagctagtgaaaatgttttggtgatgtctctctcggacacggcaccataaaaacatatcttcatgttcccttctcggatctttggatctaggtaacctttgtacaggtcccagaactcattgcttgaccttgtggttaaaattggtaaacaaggtgaagggaaccttttggttgtcattcccttctggcatgtcaagtaccactagtttcaagcgtgaaaaggacaaagcttccatgtcaattagttttttgatcctgctcggtgtaccacaggcaatatttactcgagcattaagcatcgccacctgctcctccactttcaagtgtttggcaaagagctttactggtcggcattctttagtaaacatcttcaaacccctcagtaggtctaaagatcgcaaagcagatgagctgataaccagaagtgttgggctgcccacggcgatctcaccatcgatgtgatttccctcacagagctcttccttccacgaagagccgaacaccccttttacatgatcaccgaagctctcgacgtcctgggctgctccctccgcaagctgcaccatgcagccctctgagtaggaatcgagttcgagaggagagaggcgcatcttagaggcgcgctcgaagctacggaggagaaactcgagctgccgcgacggctgcatcaatgccgacagtaggaccgttgcccctgcgccgccatctccgatggtggcggcgatttggtccggctcggcgggttttagccgcgacttcttctccttttgcttatgcttctctttcttcttcttcgcgtatgcccgtttgggatccgcggatttcttcgcgatgattttggagggcccgtgcggtttcttgcgcttgcggccggcggccgctgcggtcggttccggcgccggtgccattttgggggttccggtgtgttaagcacgtctccatggccattgtgtctctggtggacgaacgtgagtagtgatcccggcccggccggc

SEQ ID NO: 99198 - DNA, 2477 bp, Zea mays
  unsure (1)..(2477): unsure at all n locations
  Clone ID: MRT4577_21980C.1
ccggccgggactacctcaagcataacttgcatagactattgattaagaaagctattgtcattgatttgctagctccaacaatgggttctagcagattatcattcattttagtacttgtgcttgtaaccttttcatccatgatcattgactcaagggttgcagaggcacgtatcctgccaaaatcagccttattgccttccaaagttgatatacctactgttgttcctcttccactggtggcaccactgccaaatttgcctgttactctccctccagtgcctgaactacctgcagtacctaaagtaccaattcctgaagtaatagttaataacgccaaaataatcccttgagtacctatgatctatccagtcactactacttattttgtcacttgctaaattaacttgttgttgccatcccagggtggttctggttctgttggggtttaatttctgtcattcaattacatgctatgttcagtttatatgttgcttcagtcagttgaacttcagcatattatttattgtgacctgtgtaatgtaatgtatcaacttatcttctagttcaataaattctggaatttctgaanaacccacgcggccgcccgcgccccccgcgccccacgcgtccccgggggaaaacaacgaggaggaaaaaaacacccaaaaaaccaccttcttttcctgcgttcccctgctcgatccccgacgagaattcgctcccgaacccatcgatctgctctccgcagtccgccgatccgtggatcgatccgtgcgcgggctcggtccgccccgggttccgatctggtcgccgcctcgcctgaggagatgaacggcgccgggggcagccaccaccagcagcagcagaggctccggcagcagcagcagcaggcgctcctgatgcagcaggcgctgcagcagcagcagcagcagcagcagtaccagtccggcgtcctcgccgccgcggcggcggcggccatgacccagatggaacctgtttccaatggcaaccttccacctgggtttgatccttccacttgtcgcagtgtgtatgttggaaatgtgaaccctaatgtcacggagagccttttgattgaagttttccagagtgctggccttgtggaaagatgcaagctcatacggaaagagaagtcttcctttgggtttgtggactactatgatcgaagatctgctgctctagcaatcatgacccttcatggccgtcacatatatggacaagcaatcaaggtgaactgggcatatgcaagtacacagagggaggatacgtcagggcatttccatatttttgttggtgatttaagttctgaagtgaatgatgcaactctttatgcctgtttctcagcatatccttcttgttctgatgctcgagtcatgtgggacaacaaaactggacgttccaggggttatggttttgtctccttccgtaatcaacaggaagctgaaactgctataactgaaatgactggaaaatggcttggaagcagacaaataaggtgcaattgggcaacaaagaccaattcagaagagaaaccagaaactgacaatcataatgcagttgtactaacaaatggtagctccaccaattcagcaacagatgcaagccaggatgcaggaagtaaagagaacccagagaacaatcctgattgtactactgtatatgttggcaaccttggacatgaggttaatcgggatgagcttcaccgccacttctataacttgggggtcggggcaatcgaggaaatccgtgttcaacaggataaggggtttggatttgtgagatatagcacccatggggaagcagcattagctattcagatggccaatggattggtagtccgtgggaaatcaattaagtgctcatggggaaacaagccaactccacctggcaccacctccaagcccctaccccctccagttgcttcataccagcctgctgtagcaatgtcaggtgtcccacaaggtttcacagcagccgaacttcttgcttaccagaggcagcttgccttaagccaggctgcagcagggcagattgctggccagcatggtctcgcgggtcaggtttctgcaggtcttcttgctgctgctggttctcaggccctctacgatggctacccgaaccagtcatcagcccagcagcttatgtactacaactagagttcaagaggacggcgttggccatcgtcgccctgttttttattttgtggttcatgtactatttgtgtgagagttcttgatctcttgtcgccgcggaattgtgttactatcttattactgtaccattgaccatttttcttgtgagattcatttgagtagtcactttaacagagtaagagatgtattctatgtgacttcgcgattgattaatgtaatgctcccctgtgcatcggctttggtcgctggggtaaaaggcccctaaaaaaaaaaaaaaaaaaaaaaaaaaaaaaaaaaaaaaaaaaa

SEQ ID NO: 99199 - DNA, 374 bp, Zea mays
  Clone ID: MRT4577_21981C.1
gccggccggtttccaaagcgggatagagccgtcagaccttctaccttccaccaagcctttttgacttcctgatgtaaatggacactagcactcatcgatcagccctttgtcttgcgttcgttgcagccagtgcagtgcaggacgaactcgacatgggcactctcccctacctcttgcttgtcgtgctgtcgctcgtcccccgcgccgccgcgtactcggagtactcgtgcaacggtaccacgggcaacttcacggcgcacagagcgttcgaagccaacctggcccgcctcgtcgcggcgctgcccgcaaacgcctcctcctctccgtcgctcttcgcctcgtcagccgcccggcgcggctccggacacggccta

SEQ ID NO: 99200 - DNA, 2248 bp, Zea mays
  Clone ID: MRT4577_21982C.1
ggtataggttaggaattcccggctcgacccacacgtacgtaatttctcatgcttcaaatctctatttttcttgatatatttggactcacatttttttgtgaataattttataatgctattttgtcattactgtctaaattctaaaatgttcttgtgagacttcattggttgtgcacctgattacactttatctggcttcttttgtcatgcatagttaaatttcaaactgtattgtattagtttgtatttcatataccgtacacatgaagtttgagtatgaactggcatttccatcagcattacagttgcttacttgtgctatctgtttgctggtgcaaaaaaaacacccaaaaaaccaccttcttttcctgcgttcccctgctcgatccccgacgagaattcgctcccgaacccatcgatctgctctccgcagtccgccgatccgtggatcgatccgtgcgcgggctcggtccgccccgggttccgatctggtcgccgcctcgcctgaggagatgaacggcgccgggggcagccaccaccaccagcagcagaggctccggcagcagcagcagcaggcgctcctgatgcagcaggcgctgctgcagcagcagcagcagcagtaccagtccggcgtcctcgccgccgcggcggcggcggccatgacccagatggaacctgtttccaatggcaaccttccacctgggtttgatccttccacttgtcgcagtgtgtatgttggaaatgtgaaccctaatgtcacggagagccttttgattgaagttttccagagtgctggccttgtggaaagatgcaagctcatacggaaagagaagtcttcctttgggtttgtggactactatgatcgaagatctgctgctctagcaatcatgacccttcatggccgtcacgtatatggacaagcaatcaaggtgaactgggcatatgcaagtacgcagagggaggatacgtcagggcatttccatatttttgttggtgatttaagttctgaagtgaatgatgcaactctttatgcctgtttctcagcatatccttcttgttctgatgctcgagtcatgtgggacaacaaaactggacgctccaggggttatggttttgtctccttccgtaatcaacaggaagctgaaactgctataactgaaatgactggaaaatggcttggaagcagacaaataaggtgcaactgggcaacaaagaacaattcggaagagaaaccagaaactgacaatcataacgcagtcgtactaacaaatggtagctccaacaattcagcaacggatgcaagccaggacgcaggaagtaaagagcccccacagaacaatcctgattgtactactgtatatgttggcaacctcggccatgaggttaaccgggatgagcttcaccgccacttctataacttgggggtcggggcgatcgaggaggtccgtgttcagcaggacaaagggtttggattcgtgagatatagcacccacggggaagcagcactcgctattcagatgtccaatgggtcggtagtccgcgggaaaccaatcaagtgctcatggggtgtcaaaccaactccaccggggacaggctccaagcccctaccccctccagccgcaacgtaccagcccgctgtggcaatgccaggcgtcccgcaaggtttcacgacagcagaactccttgcctaccagaggcagcttgccctgagccaggccgcggccgggcagcagcatgctggtcttgcgggccaggtttctgcagcaggccttcttgctgctgccggttcccaggccctctacgacggctacccgaatcaatcgtcagcgcagcagcttatgtactacaactagtagagctcaagaggaaggaaggcgtctgtagtgttcagcttgtttttgcgcaaacttgggtcatcctcgccctgtttttttctttattattttgtggttcatgtactatttgtgtgagagctcttgttctctcttctcagccgcgggattgtgttacttactgtcttcttactgtaccattttccttgtctaattctgttgagtaagaggtgtattctatgtgactttgcgattgattaatgtaatgctcccctggggatcggctttggtcgctgggctggttcatgatccggtgttcggggcgaattggccgacaaaaaattaaaaaaaaccacccaaaaaaaaagggcggccccggttgtgagctgtcgtccaagaaatattcaggaccggac

SEQ ID NO: 99201 - DNA, 524 bp, Zea mays
  Clone ID: MRT4577_21983C.1
ataataccgggtctggctcattttttcatgataaaatgtcaccatgccgagcacaggcgtttaatgggtagtgtgagaagacaggtaaaatgccgtacccgaccgggtgagtgattccgatcccgaaccgcacgcccacctacacagacatgcgggggcagacgttcacgcaagggctaagtcattgctcccctttacgatgctattcacaactgagttaaccgttccgtataacccatccaccaaactaaggccagacctgcatgcattattgatgccagactgaccatgtgacattacgtatgggcctcatgcagcaccagggaaagatgcacacccttctacaccgcacatgtgaaaccccattcgcatattgaagctaccctcaacaccccatacagctcaccttcagttcttcttgagccaccaagggacaccaccgtcaggaccttactcaacatccataacagcttggctcacatacattgctgtcagatcactcatgtcactactgtagactccgc

SEQ ID NO: 99202 - DNA, 277 bp, Zea mays
  Clone ID: MRT4577_21984C.1
cggtgaaggacttcaaccgctggacctttgacggggtccaggtgaacgatatatgggtgaacgactacctgtttgttactgatgagaatgacgcgacattgctgccgcacttcggggagcgctactccatgatgcgggtccccatggcgcagtgtaccatcgtctagcgcctaaccaactctgttatgatgcacgggcgcaacaacgggaagaatgtcatggtcgaccgcatcatgaaacacaccctggagatcatacacctgctcactgacgccaa

SEQ ID NO: 99203 - DNA, 270 bp, Zea mays
  Clone ID: MRT4577_21985C.1
aattcggcacgagggtgcgggtggggaactcagcaccgaccatcgctgctgccgtggcgcttctgggctgcggcggtcctccgctggccgtccgctccgggctggggcggccgtgccccccttgggggctgggtgcccggcccccgggggtcccgtcctctgcctctgtcgcggggggtgcttcggctgcgcgggcggcctgggcctgtgctccgggtgcctgcgggcggtggtcggcccgctcggtcgggcgcggctggctgcctcctc

SEQ ID NO: 99204 - DNA, 345 bp, Zea mays
  Clone ID: MRT4577_21986C.1
tcctcagagcggccgccctaaaaaaaaaaaaaaccctccctttttggtgtgtgacacaaccctcagggggggcccaggggggaaaaagggggggcacaaaacaaaacggggaagccaaaaccccggatgcagaaacaccgtaacggggcgcaaaacaaggacaacaacccagccaaacggaacggaaaggcccccagcagaaaacaaggcaagaacagcgtaccacgcatcacgtgcaacacacccgtggacagggcggggccacccaccccgtggagtaagaagccccgccaaccgcctgcaataagttgaggccaccgccccctcggggagcaagacccgcag

SEQ ID NO: 99205 - DNA, 310 bp, Zea mays
  Clone ID: MRT4577_21987C.1
ggggggggaaacaaaaaattattcccgggccggttttaaaaaaaaccttatccccctttaccgggcccctttttaaggaaaagggtccccccccggcttgcccaattaaagtttaatttttccccccccctaaggttcattttcccaaatttattctggtgccccccccaaccatttttggctaaatatggcccaaatttgaagggcaaaattaaaacttaggccccccaagtgggcggtgttcccctctttgggctttgttccaacctttaaggcgatgttttcccccccccccttcagggtccagaaa

SEQ ID NO: 99206 - DNA, 416 bp, Zea mays
  unsure (1)..(416): unsure at all n locations
  Clone ID: MRT4577_21988C.1
ctgncctgnnaagtttanntgggcgnntcccaaaganaaaaagcatgcccttctctggnaanaatattcaaaagnnaatatccgggnagcctggnagnatcgatnngatatccggnaagnaaagnaannntggcatgtgnncccttcatgccctcannattcaaagnattggggttanntatgccccctcagggnnaatatccccgccagnnctatacctgggtttgcagaggggcganatgnanngcataagnatggggggtnntcttgtngnntaagccgcgnagnnatgcagnnncagtaccgcccgtctgggcaagtgnccaatccccaattccccgggccgcccctccgnnnaaatctnngaaagnntgacttncnncaagctgnnnagttggtgggtcgcccctggccct

SEQ ID NO: 99207 - DNA, 504 bp, Zea mays
  unsure (1)..(504): unsure at all n locations
  Clone ID: MRT4577_21989C.1
gagacaacaacaatggggtacaggttcttggggcggggcataatgcccgttcacaccgggaatggcgaatcacaaccggaaaaaaaaaaagggatcccgccggggagcaaaaacaaccaacccgggggggggggatggaacaagcaaggggcccaccctaaaaaaaaaaaaccaaatctccttggttttttgttcccccctcctttaccaacagggggagcaggttgcccgcttctgacaaatttaccatatgtacacaaaaaccgccaaacaaaaaccgggctacggggggggggcaacccaccggggaggtggccgggcccccaccaaccctaagaggaacgtgccaagccccaccccatggcggaatggtacatggcgtcgtggaaagacttcctttgggccattcgcgccccgaagttccgggcctttttcttcgtaattacccccacgaactggcttcccggggcctttttctgcgccccncccggggccggggccggg

SEQ ID NO: 99208 - DNA, 680 bp, Zea mays
  unsure (1)..(680): unsure at all n locations
  Clone ID: MRT4577_2198C.1
cccccccccaaaaacttttctccccccccccccaatttttttttttccccccattttttccctccttcccccttttttttccccccccctattcttttaaaccccccccccaaaccnttatttccccccctttttaaacccccatacccccccccattttttttttatttcccaaaaacccccctaaaaattttaaaaaaccccccccncccccttttttccccccccttttttttttcttcttttttaaaaaaaaaatttttcctttttttttttttttttttttttttccccccccttttttttttttttttttttttttttttttttttttttttttttttttttttttataaacagttcagtaaaagaatgcaccgaaaatttctcatttttcagcatcatcaaaaatcagctccaaaaaggttaaattaatctgcagaatacaatgaactcatacaggcatttactcagctagtgaaaatattttggtgatgtctctcccgtactctgcgttgttaccactgcttttcatgttcccttctcggatctttggatctaggtaacctttgtacaggtcccagaactcattgctgacttgtggtaatgtaaacaaggtgaaggactttgcatccttctgcatgtcaagtaccactagtttcaagcgtgacaaggacaaa

SEQ ID NO: 99209 - DNA, 418 bp, Zea mays
  Clone ID: MRT4577_21990C.1
cattcttattttttttttttttaagtctgtctttttcctgttcttggagacggcctgaaccctgagcccatctgcaagccccccccacgcccaacaaggcccaacgcagggggggggggggggaacgccccccgccccgcccccaaagcgggcccaaaaaccacggtgcccatattccacaaagccccagtgaaaacggggcccgggaaaaaaggaacaacgggaagccggaaacaacggacgccggggccgggagaacgacgagatcatcgaaggcccgggagctgggaacaacagcgccccgcagcccacactgccggggtagcaagcgaaaggggcacaaaggggaccaccgaaacggcaaagatgcgcgggcaccaccagcaaacgggagaggggcaacagctcggcccaggtt

SEQ ID NO: 99210 - DNA, 958 bp, Zea mays
  unsure (1)..(958): unsure at all n locations
  Clone ID: MRT4577_21991C.1
ctttgtagttattgttcacacctttgcccagtttgcactatgaatcacaaaaggaggcagacatcgctctttgctcggattgcttccatgatgcaagatttgttcctgggcactcaagcttagattttcagagagtggatggaacgaaagatggatcagacaatgatggggacagctggactcatgaggaaactttactgttgctggagggcttggagaagtacaatgataattggaatgctattgctgaacatgtcggaacaaagtctaaggcgcagtgtattcaccattttattcgtattccagtggaagatggtctgttagagagcattgaagtaccagaagcatccgtttcatctagagtacaaagcaatggattttcgtattcaaattccaatggcggcatttcaggtagcgttcctcaaagtagccaacctggacaacagcttccatttgttaattctgctaatccagtcatgtcactggttgcatttttggcctctgcagtaggaccaagaatagcagcatcctgtgcaaatgcagcattatctgttttgacaagagatgattccaggatgtgttcagaaggcaatgatgtcatgggtcaagctgctcgtccaaactatgatgcctcatcatctgtctctcccgaaaacgtcaaatacgctgcaatgtgtggcttgtcagcagcggcaacaaagtgcaaactttttgcagatcaggaggagcgtgaaattcagagattagcggccaccatcataaatcaccagttaaagagattggagttgaagctgaagcaatttgcagaggtggagaccttgcttttgaaggaaagcgagcaggttgagagggccaggcagaatctacagcccagcgtgtccggnttatgtcagctcgattgctttcctccggagtcccatgncctggagcagcagcagcaccatggcatcaaatccaa

SEQ ID NO: 99211 - DNA, 1025 bp, Zea mays
  Clone ID: MRT4577_21992C.1
cagtgcacgcctcgaggccggccgggccgcacgtccccgtcggccatcgtccacggatcctatcggtctctcctctgtcctcttcagtctccacgccgttccagaagtcgccaaccttccctcgccgccgcgccgcaacagccgcctcccctccaaggtagcccaatcgaaaccactcgcccgaccaccatggcctttgccagctcgctgcttcccgtgccgccctcccgcgtctgcgcgacccccgcgtcggaggtcgccgccttctcgccggccaagaagagcgtctcgctcgccgctgcgcgccagcgccgaggatcccgtcacggagtgagggcagaagtaaatgaatctggaagtgttttggctgttgatgcactctcgcaagttaaacatgttctgcttccagtccttgatcgcaacccttacctttctgaaggcacaagacaggctgcagcaacaaccgcttccctcgcaaagaagtatggagcagatattactgtagttgttattgacgataaaccaaaggagtctgtcccagagcatgatactcaaatgtcaagcattagatggcatctctcagaaggcggattttcggagtttagattgatggagcgtcttggggaagggcagaaaccaacagttatcatcggggaagttgctgatgagtgggacttagacctggttgtgctaagcatggaggcaatccactccaagcatgtcgatgggaatttgctcgctgaattcatcccttgccctgttctactgctcccgctctgacatagagctgatttgcatctgtcatgtttttttgagacaaatgatctgtttgtccttgaagatgtaactcccgcatgttccctggatacgaggggtttgcgtcagctgatgattctattatgttgatgcagtttttttcgaatttgtgtgcctgtgaatattgctaagaaaattatgttactcttttctttatttcttctgaatgagcagtttcaggcaaataaaaaaaaaacaaatttgcggcc

SEQ ID NO: 99212 - DNA, 274 bp, Zea mays
  Clone ID: MRT4577_21993C.1
ctgggatcacactttttttatagccattcggtacttctcaaagtgcactgaaaaacagcccatgggcaaatatttactcacgttagtgcgggaaccaacacagtagtgtagagagcttttcttggtgtgagtcctccatcaaatgtcgaaatatggtgccgatgagctcctagaaaaacaaactttgttgaccaaaatgccttaatcggggacatgcatgttgcggtgaactgagtccttgctcggagggccaacctggttctgtaagtaacac

SEQ ID NO: 99213 - DNA, 430 bp, Zea mays
  Clone ID: MRT4577_21994C.1
gctgacttaacagcggatggcgcataaatagaatcacataagccaatcatacataccaccagtagaacaactttaacatactagcgcgatgaatgaagtctaaataaccagggagaaaagcaggggatgggaacgccgggcgtagacttctaaacttaaactagctatgtaaatcgacgtccctaaaatacgacccacggcccaactttgacaacaaacacataatgactggggggaggcctgcaaagctccatcctacgaccctggcgcctggggtgcccgaggacgctgtatgtgtataacctgccgtccatgatggagcttgaccagacccattattattggactacccttaggacgctactgtcgcggttgcaggcgcctcatcccagtaacagacactggggcgtgagcatcttgtaaacagcat

SEQ ID NO: 99214 - DNA, 292 bp, Zea mays
  unsure (1)..(292): unsure at all n locations
  Clone ID: MRT4577_21995C.1
cacacacacaagtacacaacacaactcgtaggcagcgagcgtctctcctcttcctctcccacgcaccgcgccaaggaagacagagagagatcgccgctcctcttctctgcgtcggnggtaggccccncctcngccgctccatgtgccttatgccaggctggcgcatgccatagggtattgtttcccgtgtcaggaggaggttcagggttggagggggggtgcccagcattggttatggttctgtcaggttgaccaggctctacctccccatcttgttcaggatgtttgtggt

SEQ ID NO: 99215 - DNA, 321 bp, Zea mays
  Clone ID: MRT4577_21996C.1
tcgagccggtcgtgttcactcctcacacccacagggctgcctccacagcacctcggatatcatagcagagcggcttccacctctttcatcctcgtcgtcttctgccatgatctaggacaagtaccacaagcaccagcaccacctgcgtcgttgctgcgattgcatggcgtcttgcctcctggcgctggtcctcatcgtggccttcgtctcgctggtggtgtacctggcgatgcccccctcaaatccttccctctacctgcaggagtctgtagctgcgcaggcccatctctatgggcgacccgtctcatgacgagcctcgcg

SEQ ID NO: 99216 - DNA, 277 bp, Zea mays
  Clone ID: MRT4577_21997C.1
cacagactggctggagatggcatgctcgggttccgatctccaggacaactgcacggagagcgcacaccgctgatatggtggcgccttataaaaggtggcctactacactcatgtaaggctgacagccctcaaggcaggagccgcccaaagctaatccgggcacactgcagcggctgttgcatcgctctaccatgcgaccgatgcaaacctggatcatccgagcgacactacgacttcgactgccagatatgaccctgggcttaccatattgaatatc

SEQ ID NO: 99217 - DNA, 273 bp, Zea mays
  Clone ID: MRT4577_21998C.1
cccttttataacgaaaggggtgaaagcccggtgccgggaatttagtttaagcacgcggggcacgggttccttgggtttctttccaggaagggcttctcccggcaccgcgggaaggggaaatgaattcccagggatgaccccaaaaagccctggcattttacttgctttcttgggtaccagggttggatgacttacaatggccgcgagggtgtgaaacccggatccaaacttcataaaaaggaaacttgtgagggtggtaccatattgaaaccc

SEQ ID NO: 99218 - DNA, 846 bp, Zea mays
  unsure (1)..(846): unsure at all n locations
  Clone ID: MRT4577_21999C.1
ccttgccttctccgcctccgcttcccccgaccctctccccttcgcctcaaacgccaccgccgccgcccccgccgccgcgacccaccttcgctcctcagccatgccgtcctacgcgcaccaccacagctctctggtaaggagggagggagattaccggggcgaaagagatagagagaaagagagaatcttttgttgatttttattataagttttcttcggacaagacggaagaaaacgagcgctctttctctttctctcgacttgtggttcttggttcctggaattgggaatttatgattttcctgtgtgtatgtgtgcgccttcttttgggccgtgaagaacgagaggatggacgccctaaagggcagtagccgccaggaggagacgcccgacgaggccgccgccgaggcgccggcggcctggggcttcgccgagagggacggcttctccgtcgaggacctgctggacctcgaggagttttgcgagccggataaggacggcgccgacgagccccaggaggcgccggccgccgacgtgaaggaggagaagttgaacgacgggccccagcagcccgtcgtgtcgtatgagctcgcccctccggcgccgcccgcgccggagattgttgacctgccggcgcatgacgtcgaggaggagctcgagtgggtgtcccgtatcatggacgactcgctctccgagctgcccccgcagccggcgccgcccgcgtcgatgaatggcgtcgttggcggcacgcccgccgcagcgccggctggcgctgccgcagcggcacccacaggacggagcgtaccgtgctctgnncgtcatgtccgaccctatgcggactccgac

SEQ ID NO: 99219 - DNA, 369 bp, Zea mays
  Clone ID: MRT4577_2199C.1
cttgggcaaaaacattaaagaagggctaaaacttggggtctttccctaccccaggggctaatatatgacagggggacaggaaaggcaaaataaaaaactattcggggctatggaggttctggcagaaaagggggaaaccctttaattgggggcaccaaccccgagaaaaatggctacggaacggccccaaggccgaggcccaacaagctaaaaagctcgaagggggcccccccacaggcaaaatccaaaacccacaagttggtggcagttgctttcggggcaaaaatggggggaaaaaaaatcctctccctggttgccggattccggtttggggggaggccccgaaaaaaccgggaaatccttttcgac

SEQ ID NO: 99220 - DNA, 380 bp, Zea mays
  Clone ID: MRT4577_219C.1
gtttattgtttctcccaaataccgccgccggtccattccgtaacgcgacaccatgagggagtgcatttcgatccacatctgccaggccggtatccaggtcggaaacgcgtgctgggagctgtactgacttgagcatggcattcatgctgacggccagatgcacggtgacaagaccattgggggaggtgatgatgcttacaacaccttcttcagtgagactggtgctggcaagcacgtgccccgtgctgattatgtagaccttgaacccactgtcatcgacgaggtgagaactggcacctagcgacagctctgccaccctgagcagttcatcagtgggaaggaggatgcagccaacaactttgcctcggggcactacacca

SEQ ID NO: 99221 - DNA, 840 bp, Zea mays
  unsure (1)..(840): unsure at all n locations
  Clone ID: MRT4577_21C.1
atgttgggcttcctctactcggtgttcgacgtctccggccacgagggagaccccgccccactcctcgtctccacctccaagttccgcgcgcgcattccggacttcgccagtacggaccaggactttgatttggttgtgtgggactgccgccatggccgggttctcctcggggatgcggatttgtcttctaggctgctcgtggtttgggaccccatgacgggctgcactcggcagctggatgggccggacgatattggcaagatcgcggtgctctgcgcggtgagcggctgcgaccaccgctcgtgtcacgccggcccgttcaagctggtctgcgtcgccgtggacgatagtgtagatggtgagcatgttgcacgcgtatgcgtgtcgtcgccggacatgggtgactctgatgagtggaaggagcagtgccctggtcttgatgttgcagcggatgcattcatctatgatatacccgctgtcctcctccacgacgcactccacttcatacttgggtactacgatgataatcgtgtgggaattctcaagtacagcttggcctctgattctttatcattgattgatgtgccgtttgccgctcgtgccgatatcctcatggccatgaaggatggcagtctggggattgcacatgtggacagcaggttaaccctctacgtgtggtccagacaaatagattccaacggagttgcgtcatggactcatggntagagttgtggatcttaagaacaatatccctattaaaaatcccaagagaatacctagtctgatcggatctgtggagggcagtgatatcattttcgtgaacacgggtcattgcgtcta

SEQ ID NO: 99222 - DNA, 1303 bp, Zea mays
  Clone ID: MRT4577_22000C.1
cttgctttgtgccaccaccgtaccgtaccaaacagatcaaatcagagatggcaagtcgtagtagctctgcagaaggtgcaggcaggacgttgcctgtcaatctcaagttgatcaccgtgctgagcatcgatggcggcggcatcagagggatcatcccggccaccatcctcgccttcctggaagcgaagctccaggaactggacgggccagacgctcgtatcgcggactacttcgacgtcgtcgccggcacgagcaccggcggtctcctgacggcgatgctcacggccccggacacgaacgaacggccgctgttcgccgccaaggacctggcgcggttctacatccagcactcgcccaaaatcttccggcagaagaatgctatggggtccaagctcgtcggcaagctgaggatggcttgtgggcccaagtacgacggcaagtacctccatgcgcagctccgacggcttcttggtaatatgaggctggacaggacactgaccaatgttgtcattccgaccttcgacattgcctacatgcaacccatgattttctccagctttgaggttgcagaggacttcaaatgctacccctggtgaaggtaagagcaaatatgcttgggatttggtgtttggtgcagatggcattggtagcagttcttcaatggcactgggtgctggtctgggtgcctttggtgccagtagcagttctgggatggttcctgaactgtcaagaaggacatctgctagtgctttgcttcatgcagcaagcactcctggtatttctggttctgaactagctgcttatctagatagtgacactgttcagaagtttgatgatgaattcaatctcctagattggtggcatgatcacaaacttacttacccagtactttcaatcctagctaaagatatcatttcagttcctgtctctactgtgagttcagaatcagcatttagtcttgcaggtaggctcattgaggagcggcgtcgtcgacttggctctggaatggtggagatgctttccttgctaaaggattgggaggcagcagatgcaagaatgcagcacacaacagaagataagatccttgaagagtccttcagagatttattcattgattagtctgttctggtattctggacatgtaatgtgggttctggacatgtaacttaattctgagatgaactatgtgatgaaataatgaaaatattgagctgggctgtactcttttcctatctagggtttctcacgaggtgtgagttttacctagataggtttttaacgaggcagccattgcaccagctca

SEQ ID NO: 99223 - DNA, 470 bp, Zea mays
  Clone ID: MRT4577_22001C.1
gtggtgccgccatcgaccgtgaagcatgctgatggcagcgatcccactcctgcttctcgacttgctgctccccttgctgcttgacccccattctcaccacatgttatggatatcaatgatgggggaagagcaaccctcctgctgctccccttgttggctgacaactctcgctacgcaggcttgcttatgaaaagatgacatgctacagatccgcccacctttgggacgtacccagtaccttaggtagatctttactcctaactttaagcatgctggctgtgctacatcacgctgcttggagataccacgtcatgcttcgctgcccttaacactgttatagacctgattgcacaccctctctttgctatcagcgcgggattgccccccttcccttcactgggggtgagaaggcaccagtcgcgatacgtacagagcctctaacagaaaggctacggtcctatttagctcag

SEQ ID NO: 99224 - DNA, 296 bp, Zea mays
  Clone ID: MRT4577_22002C.1
gaaccatccagtggaatgtaccagtgcacattgttatttataaacaaccgacacatacagaaaggaagcatggaatgcaaacacgtgattactactactaaaacatccaagcgatacctttcccacgtatggagtgccgacttgaccactcgccgtctggtacacttaaacgatactaaaggcaaacaaacttactcagccccatcattgtcgaaatcacatgcaataggcgtcctgtaatagccaggccacaaatggtctaagataccaggttggtgaggcaccactcgaacggg

SEQ ID NO: 99225 - DNA, 330 bp, Zea mays
  Clone ID: MRT4577_22003C.1
ctactacaacctgtgcttggtgggattagcggagaccccctactacactggctataccaagcacatgaagttggatgtattgccctggcccaccctttgttgaagatccaagcttaagatcttggagcaagaattgatgcgctatatgacatgcatgattcctcatattgagctctgtggagagctgctcgagggcgaccaatgaatatcagctgacgataatatgtggttcttatatggatttgaggctaacaccctatctcataccatccaccccttgggttgtagcgaacccactcaacagagttattacccctctttttccaaacc

SEQ ID NO: 99226 - DNA, 895 bp, Zea mays
  Clone ID: MRT4577_22004C.1
ccgcaaaaaactagttagtaaagaagacgcctgataaaagatgaaacaatcaaaattcggaaggcaaaaagaatttgcagatagttggtcgctaaaatcagctcaagtgcgtaccaggtaacaagcggtttgtacccggtcctagactactaaacgaaaggcccaagctaactgcggcacgcaattctgcatgttgcaccaggattgtatgagctggtctaaacatgaggcactcctccagtcttgctagaaccaagctgcaggcctgcagctcacctgatagaaactctgtgcagcttcaaaacttcggaccctgaagttgcaatcaaacagggtcttcactgcttcacgtttatcaatcatgtcatggaagcctgtcaggtctagagaaggggactggcaacgcgcttgaagtagtacaaggctcgctatctcttcctcattcttcgaacagagtcatatatcggacggaacagaatggtggagatgtatctctctccaaagctggggaaaatgaccgcaatcaactttccagcattttcaggtcttttgccaacattgatagcagcaatcgctgcagcaccagaggaaataccaaccagcaggccctcttttagagcaagttcccttgcagaatcaacggcttctgctgtgctaaccttcacaacctcatcaatcaactgcacatctaatatacttggaatgtaaccagggctatcaccagaaatcacactagtttcagcaggttctaccccaataaccttaatatctttgttcatccttttcaagtaacgcccagtgccactaatggtaccgcctgttcctatgcttgcaacaagtatatcaacagaacccaacgttcttcccatattctgggcctcacatttgcctcatg

SEQ ID NO: 99227 - DNA, 314 bp, Zea mays
  Clone ID: MRT4577_22006C.1
taggggccttttttttttttttttttgcaaggacgaactgattttttttttctgatcatagattgcacaagtggtctaccgttacaaactggtttatttttttttccaaatatcaaaacgcacaccacatctacatgaaaccggaaaacggaaaaaagaaaaagaaaaaccgaggagagcaaacctcctcccagaacaactctcccaagcaagcacccactatactactaataactaatagctaaaaaacaagtgggtccgtcggtccgtgtgtgggtgggtctactacatgaccgaacaaggggtgggggtct

SEQ ID NO: 99228 - DNA, 201 bp, Zea mays
  unsure (1)..(201): unsure at all n locations
  Clone ID: MRT4577_22007C.1
cggactcctgggtactaccataactttaatgggaggttcagtcgcgtgaacaatggcgccaatcaagctgtggccgcgtaaaggcatcaaggcggtangcttacatcaaactaggaaaccataagctacattcaaatgaacttaatgccaggattattcttaataagaacattgctttcaaacaacttgggtatttttttt

SEQ ID NO: 99229 - DNA, 1846 bp, Zea mays
  unsure (1)..(1846): unsure at all n locations
  Clone ID: MRT4577_22009C.1
ggaccctcgggccggccgagaccagaccanccctgtccggcaggctgtcgtcatcgcgtggccggcactcggtgccggccggggcgcatcggatcgcatcagctgctgcttttgtccaccaagcaacgattccctttccttccgccgcccaaatgccagtggccaccttcctcctcgtcgcgcttctctcgtgcggcgcacgagccatccggacgcacggcggctatgtctccgcggtcggggaccccggcatgcggcgcgacggcctccgcgtggcatgggaggcgtggaacttctgcaacgaggtcggccaggaggcccccggcatgggcagcccccgcggtgccgattgcttcgatcttctcgagacgagctccgacgaggaggggcggccggtgtactcggtggcgcacctggtgagcgacgccgacaaccgcctgggcgcgggcgacccgttcccggggtccccgccgggcgcggcccgcgtcacggacgccgacctctacgcgccggccaaggagctgtacctcggcgaccgctgccaggtggccgacaccccggcgccgtggcagttctggatggtcatgctcaagaacggcaacctcgacaccaccgccgccgcctgcccggagaacggccgccccgcgcgcccgttcccgcagacgtcccgcttcccgtgccccgccggcgccgggtgcatgaaccagccgctgctgttccacaaccgcaccgcgctggacgacgccggccgccggctccgcggcggcctgttcgggacctacgacctcgacgccgccgcgggtctcggtgctggcgacgtctccttctactccgtgacgtgggagaaggaggtggcggcgagcggtcgcggcggcgggtgggcattccaccacaagctgcgcacgtccaccaagtacccgtggctgatgctgtacctacggtccgacgccaccaggggcttctccggcggttaccactacgacaccagaggcatgaccaagacagtgccggagtctccggacttcaaggtgcggctgaccctggacgtgaagcagggcggcgggcgcaacagccagttctacctgatggacatgggcagctgctggaagaacgacgggcgcgcctgcgacggcgacacggcgacggacgtgacgcggtacagcgagatgatcatcaacccggccacgccggcgtggtgctcgccgtcgcggatcgaccagtgcccgccgtggcacaccttccggaacggcagccgcgtgcaccgccgcgacggggcccgcttcccctacggcgcctaccacgtgtactgctcccccgggaacgcggcgcgcgcggagcagcccaccacctactgcgacgcctacagcaacccgcaggcgcaggagatcctgcagctgctgccgcaccccgtgtggggcgagttcggctacccgacggccagggggcaggggtgggtcggcgaccccagggcgtgggacctcgacgtcggcgccatgtcccaggcgctctacttctaccaggaccccggcacgccgccggccaggaggcggtggacgtcgctcgacgtcggcacggagatatacgtcagcgacagggccgaggaggcggagtggacgctcagtggcttcgacatccttgtgccggacaagtgtatcaagtcacagcaacgggccagcaacagctgctggtagacagacactttactgtcactgtacgttacgttgagtagcatagcaggccaaagtggtgtttggttccatgaaccactcactccatactagatgaggtggattatattcctcgtgttagtactaactaactataagaaataaaatgatgattgatc

SEQ ID NO: 99230 - DNA, 370 bp, Zea mays
  unsure (1)..(370): unsure at all n locations
  Clone ID: MRT4577_2200C.1
ngccaagacaagttgtttaggtcctttgnaaccagcaactggaagcttcctcgtgggagtcatcgagaccagtaagcaacatggcgggctaatctcaagtgggctcctgttctagccctcgtcgtcgtcgttgctgccatggttggcaccacgagcgccggcaacatcgcagtgtactggggccagaacggcaactaaggggggggggggggcgcctgcaactccnggctctactcctacgtcaacatcgcgttcctcacaaccttcggcatcggacagaccccagtcctcaacctcgccggactctgcgaccccggctctggcttctgcgccgggctgtgcagcgacttccatacctgcctgtcgctgg

SEQ ID NO: 99231 - DNA, 255 bp, Zea mays
  Clone ID: MRT4577_22010C.1
gtagggccaagaatctccattccttgcttaagttcaactgagaacaaatccggatatgtgcacccacacacatctgatccacagaccttgctaacagatgcatggctgtgttggagccgcagctgaacactccactaacacctgtctcaatgggtgctgacgttcaaaaacacaattgggcaaccccctacgagacgagactatgataaaccctaaaggtctagggcgaacataacgagtgcataacaggataac

SEQ ID NO: 99232 - DNA, 1727 bp, Zea mays
  Clone ID: MRT4577_22011C.1
gggaaattcggcacgaggatgagctgctgcttttgtccaccaagcaacgattccctttccttccgccgcccaaatgccctcgtgcccggcaccggcaccggcagtggccaccttcctcctcgtcgcgcttctctcgtgcggcacacgggccatccggacgcacggcggctatgtctccgcggtcggggaccccggcatgcggcgcgacggcctccgcgtggcatgggaggcgtggaacttctgcaacgaggtcggccaggaggcccccggcatgggcagcccccgcggtgccgattgcttcgatcttctcgagacgagctccgacgaggaggggcggccggtgtactcggtggcgcacctggtgagcgacgccgacaaccgcctgggcgcgggcgacccgttcccggggtccccgccgggcgcggcccgcgtcacggacgccgacctctacgcgccggccaaggagctgtacctcggcgaccgctgccaggtggccgacaccccggcgccgtggcagttctggatggtcatgctcaagaacggcaacctcgacaccaccgccgccgcctgcccggagaacggccgccccgcgcgcccgttcccgcagacgtcccgcttcccgtgccccgccggcgccgggtgcatgaaccagccgctgctgttccacaaccgcaccgcgctggacgacgccggccgccggctccgcggcggcctgttcgggacctacgacctcgacgccgccgcgggtctcggcgctggcgacgtctccttctactccgtgacgtgggagaaggatgtggcggcgagcggtcgcggcggcgggtgggcattccaccacaagctgcgcacgtccaccaagtacccgtggctgatgctgtacctgcggtccgacgccaccaggggcttttccggcggttaccactacgacaccagaggcatgaccaagacagtgccggagtctccggacttcaaggtgcggctgaccctggacgtgaagcagggcggcgggcgcaacagccagttctacctgatggacatgggcagctgctggaagaacgacggtcgcggatcgaccagtgcccgccgtggcacaccttccggaacggcagccgcgtgcaccgccgcgacggggcccgcttcccctacggcgcctaccacgtgtactgctcccccgggaacgcggcgcgcgcggagcagcccaccacctactgcgacgcctacagcaacccgcaggcgcaggagatcctgcagctgctgccgcaccccgtgtggggcgagttcggctacccgacggccagggggcaggggtgggtcggcgaccccagggcgtgggacctcgacgtcggcgccatgtcccaggcgctctacttctaccaggaccccggcacgccgccggccaggaggcggtggacgtcgctcgacgtcggcacggagatatacgtcagcgacagggccgaggaggcggagtggacgctcagtggcttcgacatccttgtgccggacaagtgtaccaagtcacagcaacgggccagcaacagctgctggtagacagacactttactgtcactgtacgttacgttgagtagcaggccagagtgttaggggtgtttggttcaaggagccactagctccatactagatgaggtggtgcatcacaagtacgatgactatatttaactaactataactataaaaaataaaatattgattgatcagaaaattctaaa

SEQ ID NO: 99233 - DNA, 1232 bp, Zea mays
  Clone ID: MRT4577_22012C.1
gctcgacaccaccgccgccgcctgcccggagaacggccgccccgcgcgcccgttcccgcagacgtcccgcttcccgtgccccgccggcgccgggtgcatgaaccagccgctgctgttccacaaccgcaccgcgctggacgacgccggccgccggctccgcggcggcctgttcgggacctacgacctcgacgccgccgcgggtctcggcgccggcgacgtctccttctactccgtgacgtgggagaaggatgtggcggcgagcggtcgcggcggcgggtgggcattccaccacaagctgtgcacgtccaccaagtacccgtggctgatgctgtacctacggtccgacgccaccaggggcttctccggcgggtaccactacgacaccagaggcatgaccaagacagtgccggagtctccggacttcaaggtgcggctgaccctggacgtgaagcagggcggcgggcgcaacagccagttctacctgatggacatgggcagctgctggaagaacgacgggcgcgcctgcgacggcgacacggcgacggacgtgacgcggtacagcgagatgatcatcaacccggccacgccggcgtggtgctcgccgtcgcggatcgaccagtgcccgccatggcacaccttccggaacggcagccgcgtgcaccgccgcgacggagcccgcttcccctacggcgcctaccacgtgtactgctcccccgggaacgcggcgcgcgcggagcagcccaccacctactgcgacgcctacagcaacccgcaggcgcaggagatcctgcagctgctgccgcaccccgtgtggggagagttcggctacccgacggccaggggacaggggtgggtcggcgaccccagggcgtgggacctcgacgtcggcgccatgtcccaggcgctctacttctaccaggaccccggcacgccgccggccaggaggcggtggacgtcgctcgacgtcggcacggagatatacgtcagcgacagggccgaggaggcggagtggacgctcagtggcttcgacatccttgtgccggacaagtgtatcaagtcacagcaacgggccagcaacagctgctggtagacagacactttaatgtcactgtacgttacgctgagtagcatagcaggccaaagtgttcttcgtactagaagaggtggtgtaggatgactatattactcatgttagtactaactaactataaaaaataaaatgatgattaatc

SEQ ID NO: 99234 - DNA, 380 bp, Zea mays
  unsure (1)..(380): unsure at all n locations
  Clone ID: MRT4577_22013C.1
ggggggggggggggaaaaaaaaaaaaaaaaatgtttgttagaattaccatttatgtagtgtttgcatgtcaagtaactggttttttcttgggccgcgccccctctgggggccaacgccggcttttttttttttttttccnnccntttgggggtttgttgggggtttttcctattcacgggtctttctttttgcggggggggggggtgtccctcctcgggtggcgggctntctaggagtggggttnnaaatgggggcggcctggcgggtttggggggtgcctgtgctgccgttacttctgttgccgtctctcttgtggttggggttgtgtccccctgtcttcctgttccctgtggggttgccccgcctgctgtggcggggg

SEQ ID NO: 99235 - DNA, 447 bp, Zea mays
  Clone ID: MRT4577_22014C.1
cacgaccaaagaacactacggcggccccccgcgggggaggatccacaggtaaattatggggtaacaaaaatgggcccccattaatgggaaaaaaaaaaaacggggggggcgcaggggcaaggccccacgggggggacaagaaaaaggaaccttgggggggaaccaaaaaaaacacccacggcatttaatggcaggcattcggattggccgaaaagagaaaactggcacccatgtttagccagcgattaagggaagcgttctttggaaaaggggaagggctcccagggcttaacgctaagggttttcctttttcaccagagccaacaggtcactaaaatatcctttgaaggggacctgctgggccgggaggccctggggggggtcctgatgcttaagggagaggcccatggcccccttgaggcgctggatgcgggcgtaaaccacctc

SEQ ID NO: 99236 - DNA, 763 bp, Zea mays
  Clone ID: MRT4577_22015C.1
acatctatttccggtgctgtggcaccatctccattaattgggcaagctagcatgacgcaccccaccttgctgttcctcctcccgctcttggccacctccatgctcctccaattccacgaccaccccgccagcgccgactgcgagccggcggcggcgtgcgggaacctcactctccggtacccgttctggctcgggagcagcagcgccaacgacacccatcacgacacgccttccccatcaccacccccatgtgcccaccaccacccgggcttcgaggtctggtgcagcgacgacggccgcgtggcctccctcaagggcacctacatccacgtcctcagcatcaactacagcgccggctccctcgtcgcctcccacgccaggatcgccggcgccggcggcgtgtgccaggccgacttcaacgtgtcctccagcatcgcgctcagcgtgttcacgtttagcccgcggaagaaccgcgcgctgtgcttcctctacgcctgcaacggcacggccccgccgagcgggccccggtacgcgaacgccacctccagctgcgccgcccccgtctacgcgttcctcgccgacggggacttctactgggacaggccgccggcggtcgcggcgggcgcgtgcaagtacagctacgtgccggtgctcgggtcggaggcggcggtcatgacggcggccaactacagccggctgctcaaggacgggttcgtcctgaactgggagggggcgggagtcgccgactgccaggactgcaacg

SEQ ID NO: 99237 - DNA, 265 bp, Zea mays
  Clone ID: MRT4577_22016C.1
agcccattgaagatgtgcttaaaattttgatcgagtgacatgtatggaaacttagggggtgtttgggaacaaagtttttctgcagttttggaagaatactgcagtattctcaaatactgcagtattatatacataatggtgtttggcaagctgggtaaaatctctgttttcaaaaaaaaaaaaaaaaaaaaaaaaaaaaaaaaaaaaatatatataaaataaaaaattaatataaatcaattaaaaagtaataaattaatttatt

SEQ ID NO: 99238 - DNA, 535 bp, Zea mays
  Clone ID: MRT4577_22017C.1
aacgcacgacaccgtccgtgcccgagctccgatcccctcgcagatccaaagatgcagatcctcgcaacgaccctgactggaaagacttcaccctcaaggtggagtcttctgacaccatagacaacgtcaaggccaacatccaggacagggagggcatcccacccggaccagcagcggctcataatttgctggcaagcaactgaaggacaggcgcacacttgaccgctacaacattcagaaggagagcaccctccaccttgtactacgactaatgggaggcatgcggatcttccgcaagaccctcactgagaaagactatcaccctcatggaggagccttctgacaccatctacaacaactaggccaagatccagtacaaggacggcatacctccagacagcagaggctcatttttgccttgaagcatgtgcaggacggtcacactctgggcgactacaacattcacaatgagagcacccttcacttggtgctgcgtctcacaggcggcatgcaaatctctgagaagactctgacc

SEQ ID NO: 99239 - DNA, 1985 bp, Zea mays
  Clone ID: MRT4577_22018C.1
caacccgcccattgcattgcatcttcctcctctcccttgctcttccacttcgttgcgcccatccgtctctcgtctcgtgctcccatcgtcgacccatcacacatccacacacaagctaccctacgacgtatacagagagaggaaaaagactagtggtacggccgtcgctagctcgactagtgatccgatccatcgatggaggcagcagacgcatcgtcagcgccgccgcctgcggaaggccgggtggtgtgggtgaacgggcccatcgtggtgggcgcggggccggggggcctgtcggtggcggcgtgcctgcgggcgcgcggtgttccgtgcgtggtgctcgaccgcgccgactgcatcgcgtcgctctggcagcgccgcacctacgaccgcctccgcctgcacctgccgcgccagttctgcgagctccccgggatgcccttccccgaccactacccggagtaccccaccaagcgccagttcgtcgactacctccaggcctacgccgagcgcgcgggcgtccagccgcgcttcaaccaggccgtcacgtccgcgcgctacgaccgggccgcggggctctggcgcgtgcgcgccgccgacgctctcgccgacgacgacgtcgccagcgccgcctccaccgagtacatcggccgctggctcgtcgtcgccacgggcgagaacgccgagcgcatcgtgcccgagttcgacggcgcccaggacttcgccggccccgtctcccacgtctccgagtacaagtgcggcgaggcgtaccgcggcaagcgcgtgctcgtcgtcggctgcggaaactccggcatggaggtctgcctcgacctctgcgaccacaatgccctcccgtccatggtcgtcagggacgcggtgcacgtcctgccccgggagatgttcggcgtcgccaccttctccgtcgccgtcttcctgctccgcttcctgccgctctggctggtggacgccgtcctcgtcctgctcgcgcgcctcttcctcggcgacctggagaagctcggcatccggcgccccgccgggggccctctcgagctcaagaacgccaggggcaggacccccgtgctggacatcggcgccctcgccaggatccgctccggccacatacaggtcgtgccgggcatcaagaggttcttccgtggcggcgccgagctcgtcgacggccgccgcgtcgctgcggacgcggtcatactcgccaccggctaccacagcaacgtccctcagtggctcaagggaagtgatttcttcacgcaggaagggtacccaagggtgccgttcccacacggctggaagggggagtccgggctctactctgttggcttcaccaggagaggcctctccggcgtttcctccgacgctgtgaaggttgcgcaggacatcgccgtggaatgggagaagcaaacctccacaagatgatgacgattgacgacgatgatgacgacgacgatggatgcccatcaacttaccagctcactcatgaccatcgttgacctctcatgcatggacctgctacgacgaccaacagatcgataccttgccatcatgcatagcatgttcagcaaaaagtgcaaaaacttgagatgatgtggccaagagttgccccaagctcaaatccagaaaccaaaagaaacagaggagaagcgcgcgtcgggatccagatcaaggctccgaaaactggagagcgaagcgagcctcctcgacgcttgggcgacaggaagaaggccggactgtgcgcgcgtcatgcagagcccagattttgctgtaccccatgggcccttatatacatgcgtagctatgtacagagtgtttttatgtagcaaagttgtgtacagtagtagcagtgcctctctagtgggttggtagagtgttagcgttgacatgcttgtgtgtttgtgtgccatcgtcgtgatgtctatgtatggagttgacaacgagaaatgacctattctatttaatttttgttcgttatt

SEQ ID NO: 99240 - DNA, 339 bp, Zea mays
  Clone ID: MRT4577_22019C.1
aaaatcccgaatgggtctgatatcttatactgggagagagacatttcatgcacctatgcacactcactggcgcagagagatcagatatgcatggtgtgtaacgatgccatatgattacatgcaccaacacaagcacaggggatccgacaccaagcatgcatggcggagagccagagtcagaccagacgacggatacatcctttattattgacacgccacaagcacaaagcagacagtgaaaaaaaggtgacatccatgcatgcacgatacgaaacaacgtacgaggatcattaagttgaggggctggacttgcagctggcaccgtagatgcttacgtga

SEQ ID NO: 99241 - DNA, 628 bp, Zea mays
  unsure (1)..(628): unsure at all n locations
  Clone ID: MRT4577_2201C.1
ccccctgggtcgaccccgcgtccgggncgccgggtgcggctgccggccgcgccgggccacaaccaggctgctgagccagctgccgtccttcctccgcccgtccccgaagccgccgcagccgccgcgcagcagctcgcgctcctcctcgggcttcttcccgtcctcggccgcctccaccgcctcctccccccgcaccatccccagcagcagctgcagggccaccaccaccaccagggcagggggaagaagcggtatgacaaaatgggcggcccgggcgcgggcgcggcggcggacgcggacgcagcgggagaagagggcggcgtgggcgtgggcgtggccgtggagaaggagtcgtccgacccgcgcgccgacttccgtgagagcatgacgcagatggtcctggagatggggctgtgcggctgggacgacctgcgctgcatgctccgccgcctgctcgcgctcaacgcgccccgccaccacgccgccatcctcgccgccttcgccgaggtctgcgcgcagctcaccaccgcggccccgccgcagccggcgtaccacgctgccgcctacgactacgactaccactaccaccactactgaaaaaaacaaaataaataaacacgggtggcct

SEQ ID NO: 99242 - DNA, 220 bp, Zea mays
  Clone ID: MRT4577_22020C.1
cccacgcgtccgcccacgcgtgctcggactcgtgggtccccaagctttgcattcgtccttctgtccttcctcacccggtcgtatgtctcgactcacccacccacccacagcatcagaaccgagggaattagggagcttcaggcggatccgtaacatccgcgaacggcgggaaccagggagcttcagtcgcctaaaaccggagctcccaatcgatccactg

SEQ ID NO: 99243 - DNA, 248 bp, Zea mays
  unsure (1)..(248): unsure at all n locations
  Clone ID: MRT4577_22021C.1
gcggggagagttgaaggagcaattgaggcgcatgggtgtggtgatagagagccgtgatgctaggagtcccttgtgcactacccatcctaagaggggctcatgggtaggcgaccggagaaggggcatagtcttgagtcgcaagggcatgagcctncacactagagagatgagtgcgtgggctacttactttggggatgagggcatcaaaggtggtttctccaatggggaggtgggtgtggggacaatga

SEQ ID NO: 99244 - DNA, 395 bp, Zea mays
  Clone ID: MRT4577_22022C.1
atttccggggcggacccaggcgtcgggcctggcctctttttttggtgaggcggaggttcattttctggccggagcgtcaggataagaaccggccgttggaaggaagttcctcttgcaactgcaagcccccgtccaagggggtccctttccccttccttcaaccttcttggaaattaaggaccgggtttctttggaaggacacttgggattcgccctggggttttcctggcgggaagagttggattggtaaaaccagtatgggaaggcagggaatttagaatgggaaggcggcccatcgaagtcccatcaaaggttacctctaacataaaaaaagcagttggtaaaagttaagggtccgctgggggagtgatctctgagctttcaaggggacttga

SEQ ID NO: 99245 - DNA, 366 bp, Zea mays
  Clone ID: MRT4577_22023C.1
gagggaggggttttttttggtggggtttttttttttttttttttttttttttttttccaaagggaaccaaagggggggctcaccaatttacccaaaattcaaaaaatacatcatgttgttgatatcctaaaggatcacctgttcaaaggaagggtttagggcaaccacacgggttaaaaaacactgggcagggatcccattggggatagcacccgcaaattgcatctttaaaatccccttttttccaagcaacggtttttaaaaacggtggacagattataacctttggacctttcaaaaataaattttttacaaaaaaaaaaacgggtaacaggccaatcccttgattttccaaatttgggattt

SEQ ID NO: 99246 - DNA, 165 bp, Zea mays
  Clone ID: MRT4577_22024C.1
tgcaaacacattttaattgacaacactagggctgttgtacaaaatagtaatgatagccatggaagttttaccttattctgtgagaagtgttcttaaacttattaagtgtctaaactaaggtttagtgctttttaaaggaaagttgtcccaggattcatcctaaag

SEQ ID NO: 99247 - DNA, 1753 bp, Zea mays
  unsure (1)..(1753): unsure at all n locations
  Clone ID: MRT4577_22025C.1
cctcgaggccggccgggggccggcgaagcaatccaaccgaacgaaccgtcctaggtcgtcgtcggctcgtcccctccgcaggaccggttcgccgtctcgtcccgatctcgccgcctgcccgccgcgccctattaccgccatggaggcgctgtggaagcaggcctccaggctcaaggaccaggtctctcggcagggtgtgttcaagcagtttggctacgggaattctgataatgcgtttacagatgagtcagaggttaaactgcaccagagattggaaaagctttacttatcgactcgtgctgctaaacattttcaaagggacattgttcggggcgtggagggctatatagtcacaggatctaaacaagtcgaaatagggaataaattgtctgatgacagccagaaatatggtgttggaaacacatgtacaagtggtgatactttgtccaaagctgctacatatttcggaaaggcacgctcagagattggaaaaggagcgtggcaatatgttgaaagcatttggcacacaggtggcagagccactgcgggcgatggttatgggtgcacctttagaggatgccagacatatggcccagagatatgacagaacgaggcaagaagctgaagcacaggctgtcgaagtatcaagacggcagaacagggtgaggtaatctactgggaatggcgatatggtatcaaaattggaagctgccgagtacaagcttgaagaactgaagtcaaacatggtgggattagggaaggaagctattgcagcaatgtcggctgttgaggctcagcagcaacggttgaccttacagcgtctcattgcactggttgaggctgagagaacttaccatcagagagttctggagatacttgacaaattggaagaagaaatggtgtctgagcgccnnnnnnttgaagcannnnngactccagcagctgaaaattatataccaccaccagcaccaccatcttatgatgaaattaatggagcatttgcatccactnnnnnnnnnnnnnnnnnnnnnnnnnnngatttcttccttggagaggcccttgattcatttaatgctgaaagtgagtttgagcttaccttgtcagctggtgacattgtaattgtccgaaaggtaacatactttttcgcaagcataggtttttaaatcttcttccatgttgttaatacaattttaatgctttttaaatgcatacctgcaccagataaacacactagcacttagcggtcattaacctaggttgcattttttatgttcatcgacgttgtgggttctgtaaaatgattaatcatttttgccagcagctccattaagaatgtgtatgatcatttggcctgcatttgtcctctcttttctctgaaacacagatctcaagcaatggttgggcagaaggtgaatgcaagggcaaagcaggatggttccctcatgcttatatcgaaaggcaggaacgtgttctagcaagcaaagttccacatatattttaggagtttctggcagtcgcattacacggttttcatttctattgttgggagctggaactgtatccatgttttcacttcctcttagtttccgcgatgtaattactggctgtcatgtgcatagattaaatttacttccctttttttagtctggaaaaggttttggatgtaacatatttttgagagaccaattggatatgggttaccttgatattgtgaaagagttaaaaactagctgttttataaaaaaacaaaacc

SEQ ID NO: 99248 - DNA, 1752 bp, Zea mays
  unsure (1)..(1752): unsure at all n locations
  Clone ID: MRT4577_22026C.1
atggnaaccatnnctcttaaatgnnggctgcaaacnnccaaatattactgnnttgctgtnnaaaagcctatggnnntttgaaagnnctactatccagnnattgnnnggatctacccaagtcttntnngcatcacncnntcgcnattacnntctgnnaagccatnntggtgcncnntacattntncctgtgcggttgtgcaanaaaatccttnnngtctcactttcatggnagaaagnnccacatnngttgacnntttgggctttaaannacttcttggnnagcagatnngtaatggcttattcctngnngtctttacagnnatttgtnntcaggagaaaancatcaagaaacnnaagtagcaagcattgtanttttgtggccccgaagacgcttagnaagnntacctataanntggatccctttcaaaagnncatcaaaaagnngcctgttgnngaattgttcgttgtgcagaaggttgtgagcaagccagagaaatctgaaaagaagagagctcgctgcacatggtcatggagacaaacccgatggcctggtacagattaggagctcggtcggtgatgggagcgaccaaggccggacttgggcgaggcctctggcagcagaggaaaccatcgcgctgctacaggggtaatggcgagctggagagggtggctagcggggtcggctcggcgagtacccgatggtgaggaggggcaccgcgaagcgaggcagtcagccgccgacaagatctccattgatgagcaggaaaggcatcggcgttggggaggagatagcaggggcgccgcgccactgagctcggccatggcggctgctggaggatgggggccgctggagaggggacccggcgtagggagctcggcgtccgagcagaggggagctgcagaccgacaacctccatggctgggcgcagaacgtagagaagggcgtcgtgtctctgattggtgtgctgcgtcgaggggtgccgagtggagggaggcgcagaggccgacggccaagggggtgcgctggggctcggcgaccatggctgaaggggagcgctgatgctggatgctgctgtgcgaaatggccagagaagggggaagacgccaggctggagcgtcggatgaggaggagatccgcctagaaccatggatccgctaggggaaggggtgcctagatgggagagcagaggcaccacgggagtaggagctcctgctggtggcgcccatgggaggcggggccttggcgcgccctggaaggtagcagggagggcgccgagctagaggaggcaggtccggccatggcaggaccctgccagcaatcctgcgcacgagcagaaagggtcgtggcacgctgctgcgggagggcaccggcgatttgctgctgtggggaggggtgccggacctagggcagaggaggccgagagggaagaagggaggtcggccatgggggactcctcgcgcgcactggaccagaggagggcccgcgccatgggaggcgccatggatgagctcggtgctcaatcctgcctgttgaccgacgccggagggagctcacgcgcctggaagaaaggaacgcgcgtggggagcttggggcttgcgcgccatggaaggagcggtggtggctggaggtgaggggcagccagggagctcctgcgcgctgggggagaaatgctcctgctctcgctgctgaattgcaagggaagcaacgacccgaccagggagcaaaggggagataaaaaggattagcggtac

SEQ ID NO: 99249 - DNA, 369 bp, Zea mays
  Clone ID: MRT4577_22027C.1
aggcttgccccaaaccccctacaaaggcccggaaaaaaaaacccgccccaagcccccgcccgggggggcgcttaaaagggccaagtccccccccccggggggcgccactaggggaccccagcccgggcccaaacggggccaaaccagggcccaagcgggaccccgggggaaatagaaatccccccacaattccaccccacaaaccaaccggaaacacaaaggggaacccccggggggcccaaagggggagccaacccacattaatgggggcgcccccaccgcccggttaccaggcgggaaacccggcgtgccaaatggaaaaaaaaaccggccaacgcccggggagaggggggtcgcgttttgggccct

SEQ ID NO: 99250 - DNA, 385 bp, Zea mays
  Clone ID: MRT4577_22028C.1
acgtcctcgttcggtcagtgctccacagagaggtcctccagcttgggcccaaaggaacccaaatggatgaaccctctgtttacgaccttggggcaccacacaaggatgaggctgactagacatgcctacctgtccactctgtagttctgaagatcgtcagtgacgaactgtttgccatagaagacctccagccgccccctggagcggcccacggtcaccctggccattgcgcgaaggacgtgggcgtccatgtactccaccagccatagggtcgccatgtacagggacgcccacagcttcggctgcttggccacctggagccacgagccgtacacgaggcccgtgcccatgatgatctccacagggctcaagcctgccgaatacc

SEQ ID NO: 99251 - DNA, 489 bp, Zea mays
  Clone ID: MRT4577_22029C.1
aggggccaagagcggttttttccttatttggctcgggggggggtgccccccctccccaggggtaatttttcgggaaaaacagaaccccttttcccccggaaagaccctcccccataacagggtggggaagcccttttccctgaaaatggccgcccccggaaaaccgggaaaaacattggtttccttttttttcaccccttcagggggtttttttttcctgggaacgcggcaaatttggggttttttttttggggcccccctgtttccttttcaggggccttttggggtgggttccccccaaagccaaaaacaatttttcctggggccttcccccaaaaaccgccctgggttgggggggcttttgaaggttttcccccgtgggcccctttatcttgtccttttgggggggaaaaggctcccccatttttttttttggaggggttcccctcaaaggcctttcctgaaccggggagggggaaaaacttgggt

SEQ ID NO: 99252 - DNA, 526 bp, Zea mays
  Clone ID: MRT4577_2202C.1
cattgggtacctcgaggccggccggggtattttttcttaagagacgcccagattggtttgcaccgcgaggtaggggatcgcgatctccccggcctaggtctattactctcgaataacgcttgtgagtacacgccggaacaagcctgagacgaaagagagcggacgtgtagtcgctgtgtcccttccagaagaaagtcatgtctttcgtgtccgacgacatcaccatgaaaatctaccgacgacctcgcagatagctgcctctacgaaacactcctcctcacacgcggcagtggttcctacccatacgtcatgtggtacgatgagcaaggcactctttcccacgcacattgaatgccctgcccttgacacagagctatctgtgtctttcctgatgaggcacataatcctgcgatgacgatttaacatctaggttgatgaagttcagatcgacgacttttcatcgctgcatatgcgtatatggtatcccggtctggccaacttattttgatgcttgctaagatatcta

SEQ ID NO: 99253 - DNA, 439 bp, Zea mays
  Clone ID: MRT4577_22030C.1
ttttgccgctcttggatcactagctagctctcgctcgtcgcaacaagcgaagagcttggtcgttttggttatggcggtgatgaagagcaggacggtcatcgtcgccgccgttctgttggcggttgtcattctgtcctcgctgtgtccatgctacgaagccggcggctgcatcgggaagccgcccaagacgccggcgccgaaaaggccctgcttctcgccctactccgaggaccactgtgaccgccagaactgccgcttcgtctgcatgtcgcacggttacagtgacggtggctggtgtgacgagagggaggtgcgcaaaatgtgctgctgctaccattagttagaataataacaatagcagcgtgtagtgttgtgtgctggtgcatgtatatggatcatccatctctgtctgtctgcctctgtgtggtgatttctgaaa

SEQ ID NO: 99254 - DNA, 607 bp, Zea mays
  unsure (1)..(607): unsure at all n locations
  Clone ID: MRT4577_22031C.1
gggtttgggttttttttttttttttttttttttttttttttttttggttttttttttttttttttgggtttgttgtttttttttttttttggttgttttttttttttttttgtttgtttttgtttttttttttttttttttttttttttggggtggtgggttgttttttctttttcttgtttggtttatccccccggggggaaaggggaaaaaagggggggcttttttttaggggaggggggggccggaatggttttttggtaaaaaggcccctttccgggaaaaaagggtggacacggaaagatattctctttttgcagacttaaagggggggacgcccccctcaatttttttaaaggtgggatcgggactaaaggggcagaatgtcaaaaccccctttttcaaatttggggtgggaaaaccgggttaaagaagctaaaacaggatttttttggtgtggcggaccccacttgggacacgggaaatgggggactttttggatttctcagcgcaggggtcgccttatgttctttaccggnagggaagcggacgcgggggggggaaaaaaaattttagaccgggtcctttttgtgtaacaggttcccct

SEQ ID NO: 99255 - DNA, 135 bp, Zea mays
  Clone ID: MRT4577_22032C.1
ggacctggcggctgaccagctactaccagcactcgcagtgccacatcaacgcgcacagaagagaggacgagatggcccggctcaaaggaacggtgctggatccaggaggagggagccaggccagcttcctgatgc

SEQ ID NO: 99256 - DNA, 455 bp, Zea mays
  unsure (1)..(455): unsure at all n locations
  Clone ID: MRT4577_22033C.1
ttttcggcacccggcataccctgcctcctctacctgtggcggttcgtagcggggctttccgtgtgactgactaccgcgccttacctctgggtgcaccggcccgcanctctaanttgccgtacgcgctggtgggcttttctgactggcgttacccactggtgccaacaccnagcgaggaataactgccgagcagagcaggtagcagaccagtcttggatcgatcgcagtcaccactgganngggtgggccctgtgtggcccggaggaactcctctcaaacctgcggggtggctacccatcgccgggcctggctgcatcnnngtggtctgccctctaccctaccagggctagactttcgcattgccggaccagccaaannactctcggatcgagtcctctgaaggggccgtcatgtacccttggtatccttccggtcaatgaaccaggtaccccaca

SEQ ID NO: 99257 - DNA, 397 bp, Zea mays
  unsure (1)..(397): unsure at all n locations
  Clone ID: MRT4577_22034C.1
gactagttctaaatcacgagcgcccatcctatcattatatcatcacccaactttacatgagggcggccgtactggagcggagctgggaactgaactgcatagcgcactaacctagcagcggagcatggtctcagcccacaaactttactacaatacatccactccactacacaacacaccctgtcctgcgggacggtacagcacaacaaaaaaacactgctctattaaatagtggggagggaactaaactgtctatcatatcagttggagaatgatactctactcaaatcaaacctctgatcccaacctttggtacgccacgccattacataatctactattctatgcattgcattttttcnaaaaaaaaaaggccaaacccaaaaaaaataactta

SEQ ID NO: 99258 - DNA, 285 bp, Zea mays
  Clone ID: MRT4577_22035C.1
tccttataaaggggcccccctttttttttttttttttcttaagacataataccccaatttatagttatattattaataaattattcgagtttatatatataacctatcttttatgcgcgctatactacacggaggccgcgtatcggcgaagcctggatccactactagaccggcctttactgatggacccgtgaccgactggaccatctatgcccttggcagcgatggaggccgcgacacaccattcacaaggtagccctaaggagcgccatttaatcgaacact

SEQ ID NO: 99259 - DNA, 2634 bp, Zea mays
  unsure (1)..(2634): unsure at all n locations
  Clone ID: MRT4577_22036C.1
gccgggnatctcccatctcattcagcaagcaggccagccggcaacattgttgccgactgccgtcctctgcttccaacaatctccttcagcatcgatccgcccgcccctccctccaccagcagcagcaatccgtttttcaccgtgcctttccactcaccaccagccgccggcccccaggccacaggcccaagccaagccgcgcggcgtcactcccaaaccctagctcgcccgcagtcgccggtgatgtcgtccccttcgtcgtcccctgcgcggaggcgggagatgggggagggcggcgagctccccgtccccgtgcccgtgcccgcctccgtcgtcggcgacgacaaggtcctggcggcggcgcagcacatcgtcaagtcgctcgccacgtccaagaacgccgccgacgacatgatccgcatcctctccggattcgaccaccgcctctcctccatcacctccgacctcttcccgtccccgtcccccgccgccgcctccgacgcggacccagccgagccccccggtgagcaggaaccctcctcctccacctcctcctcctcgctcgcagatttcgacgccgccgagcagctcatccacctctgggacaccaccccggaggcgctcgtgttcgaggcccccgaggacgacgccgcgcactacctcgccgccgtcgacgtcgccgtcgaccacctctccgcccccgccgtctccgcccgcgccggggtcgccgtgcagctcgccatgtcgcgcctcgaggacgagctccgccacctcatgctccgccactcggtgccgctcgacgccagcggcctctactgctcgctccgccgcctctccctcggctccatggacgacctcgacacctcctccgagttcgatcccgccaccccgcacagccaggacggcggcgccggcgccggcccggacaccgcccgcagcgccagcatcgcggggaacaaccccttcgaggaccaggtcttcgacctcgtgcgtccggacgccatcgatgagatacgcgccatcgctgaccggatgctgcacgcggggtatgacagtgagctcgcgcaggtatactgtgccatccggcgtgacctgctcgatgagtgcctcaccgtgctcggtgtggaacggctcagtatcgacgaggtgcagcgcatcgagtggaagcatctcaatgacaagatgaagaagtgggtgcatggggtcaagacagttgttcgctgcctgctcaccggtgagcgccggctctgtgaccaggtgcttgctgtgtccgacgagctccgggatgagtgctttgtggagtccaccaagtgctgcatcatgcagatccgtaactttggggatgctgtctctgtgtgcactcgctcgcccgagaagctttcccggatccttgacatgtatgaggcgcttgctgaggtgatccctgaactaaaggagctgttctttgggagttatgggggtgatgtcatccatgatctggagggggttcttgaaaggcttggtgacgcggtcaagggtacccttcttgagtttgggaaggtcctacaacaggagtcatcgcggcgacccatgatggctggtgagatccacccaatgacacgctatctaatgaactatctcagattgttggtcgtttactgtgacacacttgacatacttttggatgacagtggtgctggagctgtagatcataatattttacataatggcaccgatgaggatcaggagtatctgaagagtttgaccccatttggacgccgtttagtcaaactgatatcttacttggaggttaatctggatgaaaaatctaaactttatgaggatggggcactgcagtgcatattttccatgaataacacactctacattgtacaaaaggttaaggattccgagcttgggaggattttaggtgatcactggatacggagacgccgtggcaagattaggcaaaattcaaagagctaccttagggtttcatggaccaaagttttgtcttatttgaaggatgatggacatggcagcagtgggagcgggagtttcggcagcagcgggaactcaagctctaggatcaaagaaaaaattaagaatttcaacttggcctttgaggagctatacaggagccaaacagtttggaaggtgccagatcctcaactccgagaagaactcaagatttctatatctgaaaatgtgatcccagcttaccgtgcctttactggaaggtatggcagtctagttgatagtggaaggaattctggaaaatacataaaatacactccagaggatttggagaatcacctgtctgatctatttgaagggtcactagggtctgccaaccattccaggagaagatgatgatttctcatgatgagatttggctacaggtatgcttttggtacgagggacaccatatcatcaaacagctatagtgaatgtgttgaactgccatatcgcaatgtaattcagaatacgaccccctttgttttgcaatcaatatatgtgtaatactaagtgatgtacatgttcttttttctcagtatattcttatatttgcttgttttattgtccgaggctccaggtccaagatatattgattttatattatcgaacatgttataaattttcagtttcggactc

SEQ ID NO: 99260 - DNA, 571 bp, Zea mays
  Clone ID: MRT4577_22037C.1
acccccggggagccacttttttttttttttttttttttggaaaaccaaaattttttcccaaaattttttaatgcgggggaaaccttaaggaaaaaaaaagaaaaaccctacccggcccccaggggaaaaaccaaaaaaaaagggggggggaaaaaaaccccaaaaattttttttccaccgggccgccccccgttgtcctttccgggcttcttttttatttaccattccgggcaaaaaaatttcccccccctttgatccccaggccgaggtttttttaaatttccagggcggggccccttaggaccacaaaaaaatcccgcccccaaatggggggaaaaccccccaatttttcccttttttttcccaaaaatcccccctttttgttggggggaaacccccaaacccgggggggggtttattatttccggttttttcctggggcggaaaccccaaatttttaaatggctttattcgcccccccccggccggggggaaaattaccggtcccccaggttacccaaatggggctttggaccacccccgttaaaaaaacggcccttaaacgggggcc

SEQ ID NO: 99261 - DNA, 167 bp, Zea mays
  Clone ID: MRT4577_22038C.1
atagggtgggttggctactcctccccctccggttcgggtacgggttcctgaggttctgcggcactcggtttcctggatgggcggatcaaaattgtagactaagatgtcgagcccccctgtttcttaggcggcctcccctgggccaaggacgaacacttctttcaaaa

SEQ ID NO: 99262 - DNA, 197 bp, Zea mays
  Clone ID: MRT4577_22039C.1
cgacatctcatgtaattcagacatttcttagaatagattttttcttgatcatagtaaggaactactacttcagatcagtaacggttattgaatttgaagtacaatgatggaaatcttctgttaatattactaaaagaatacaagttgcggatgtcatcgttattatttaactcttgttggatttttacttcaatcca

SEQ ID NO: 99263 - DNA, 1975 bp, Zea mays
  Clone ID: MRT4577_2203C.1
aaaggatagaaaggtgattgctaggaaattaggggcaaaatgcaagggagacaaaacttgcatttgggtccctaaggatattgtcactaaccttgtaggacccaacaagagttgggtttatgcatccgggggatcaagctggattatcgacagcggatgcacaaaccacatgacgggggagaagaagatgttcacctcctacgtcaagaataaagattcccaagattcaatcatattcggtgacgagaatcaaggcaagattaaaggcttaggcaagattgcaatctcaaatgagcactctatttctaatgtattcttagttgagttgcttggatataatttgttatccgataaatctgaaacccaagggaccctcaagcgcttcctaaggagagctcaaaacgagtttgagctcaaggtgaataagataaggagcgacaatgggtccgagttcaagaatcttcaagtggaggagtatcttgaggaggaaggaatcaagcacgagttctccgctccctacacaccacaacaaaatggtgtggtagagaggaagaataggacgcttatagacatggcgaggacgatgcttggagagttcaagacccccgagtgcttttggtcggaagccgtgaacacggcttgccacgccatcaaccgggtctaccttcatcgcctcctcaagaagacttcgtatgagctactaaccggtaacaaacccaatgtttcgtatttccgagtttttgggagtaaatgctacattctagtgaagaagggtaggaattccaaatttgctcccaaagcggtagaagggtttttgttaggttatgactcaaatacaaaggcgtatagggtctccaacaaatcatcgggtttggttgaagtctctagcgacgttgtatttgatgagactaatggctctccaagagagcaagttgttgatcttgatgatgtagatgaagaagatgttccaacgaccgcaatacgcaccatggcgattggagatgtgcgaccacaggaacaaaatgagcgagatcaaccctcttcctcaacaatggtgcatcccccaactcaagaagatgaacaggaagagctaaacaacttcaagaggaatgaagtttggacactggtgcctcgtcccaagcaaaatgttgtgggaaccaagttgttccaaatggatgtgaagagtgctttcctcaatgggccaatcaaggaggaggtgtacgtagagcaaccccctggcttcgaggatgaacggtaccccgaccacgttgggaaagccgatccaactctttttactaagacatgtgatggtgatctttttgtgtgccaaatttatgtcgatgacataatatttggttctactaaccaaaagtcttgtgaagagtttagcagggtaatgactcaaaagtttgagatgtcgatgatgggcgagttaagctatttcctcggattccaagtgaagcaactcaaggatggaaccttcatctcccaaacgaagtacacgcaagacttgatcaagcggtttgggatgaaggacgccaagcccgcaaagactccaatgggaaccgacggacacaccgacctcaacaaaggaggtaagtccgttgatcaaaaagcataccggtctatgatagggtctttactttatttatgtgctagtagaccggatattatgcttagcgtatgcatgtgtgctagatttcaattcgatccaagggaatgtcacttagtggcagtgaagcgaattcttagatatttagtcgctacgccttgcttcgggatctggtatccaaaggggtctacctttgacttgattggatattcagactccgactatgctggatgtaaggtcgataggaagagtacatcggggacgtgccaattcttaggaaggtccctggtgtcatggagttctaagaaacaaacctccgttgctctatccaccgctgaggccgagtatgttgccgcaggatag

SEQ ID NO: 99264 - DNA, 106 bp, Zea mays
  Clone ID: MRT4577_22040C.1
cgggtggagtaatgtgcgcaattacatctgcgtatacatgtagagtacgttgacaccgatgaaagaggtgactggggagacgccgggatctagcctgacaatagcc

SEQ ID NO: 99265 - DNA, 703 bp, Zea mays
  Clone ID: MRT4577_22041C.1
cctccggtcttttctctccttccctctagctcgcagccgccgcgcgtgactccagatctcccgcggcgcgaccatggcggcggaaggcaaggtcccgacgctggccgaggaatattcactcccacccaaggaggtctctgtggaaaaatctgctacgagcactgtggccgaagttgttcctcagaaggatactgaaacctcaccagctgatgagaccgctgctgctgttgaggaaaaaagtgaaactcctgaggtgaaagagccagaagcggaagaaaccgttcctgctgcagaggaaagcgatgaggctcctgaggaaactgaagagaaaccagaaattgtgattgagactgctccagcagattttcgtttccccacaacaaatcaaacaagacattgcttcacgcgctatgttgaataccataggtgcgtagctgcaaaaggagatgatgctcctgagtgtgaaaagtttgcaaagtactatcgatcactatgcccaagtgaatgggttgaacgttggaacgagcaacgggagaatggcacattccctggacccctgtaagcttcagtggcgctggaaggacaaacataccatcatccccacctattctccctggtgactggacaaagttactttctgccgagaattcgtcaccttcctttcctttttgaggactacttacaaataagtttttgacttgat

SEQ ID NO: 99266 - DNA, 336 bp, Zea mays
  Clone ID: MRT4577_22042C.1
catcatatgaaatgaaaaaatacctatctttcaattcaatgtccccatgatccaacattgtcataacatatcatacataacagtactgctcaaaccaagttacagtacttactgaagaacttatcataagtcgtaagggctaacattgtgactgatttcggcattctatcatagaaggcgagtcatctagcgtgcccctataagcaagaggtttttttaaaatgtaacgtttgatctcaatttaaccttctgcgttggggagcaacactaataactcaccatgtcacaccttgcaaagcatgctacacaaccacttcttgttaacaacaggtttta

SEQ ID NO: 99267 - DNA, 764 bp, Zea mays
  Clone ID: MRT4577_22043C.1
cgaacgcatggccccgaaattgaagaaacctgaggaaccactgcggaaccgccctggaattccttgggcgacccacgcgcccggctgttcgcgcagcgcgcctacgcgcgcgcgctggccgcgtgggcgcgacggtgcctcggcatcagcaccgcggcgcggccaagtagccacgcgctgccgccggcgttcctggcgtgcatggagtgggggcgcgcggtcgacgcggccactgaggcgcgggtgatggacggtctggacttcttcgtcgccggcgtcgggtcggtgtgctcgggcgcggctgccgggatggagggcatggctgggcgcgtgctgtgtgctggcatggcagcggtcaccggcgccttggcggagttcgcggcggcgtctggcgacagctatgacgccgctgtcgcagctgtcgtcgccgcggcgcgtgcgccggagcgcgggaaagaggacggcgtgggacaagtgccggaacgctaggaaagtgctgcggccgttgccttgttggttgaccggcccccgtgacgtagagtggctctgctcaccttgtgatgacgatgggtagggtaggagatggaattaagcatgcagctacgtatgtagtcttgtgattgataagaatgctattacaaggctatctaattttgctagcgactgcttattatagtgtggtggtcctagaccgacaaatctaagcaatagcaacaattggttgtttgtgatacaagcacaagcgaatgggatggagtttgttt

SEQ ID NO: 99268 - DNA, 349 bp, Zea mays
  Clone ID: MRT4577_22044C.1
tctgttcttgctttttttgacccaacaaaactggtctaccctcgcgtcgcccgtcgcgtgggcgactgatctgacacctaaccctagccgccgccgccaccctcacctcgtcgtgccgtcgcccgagcgggctgtcggcaactcatgcggcccgcggggaaggcggcggcggcagggccctccctcctcttctctgacggattggggcaggtcctcggggggggggggggggactgcttcccgcttcaatagccgccgccacaagtgcctggcactctgggctactttgctttcggatgtggttttcggccaagacttggctgcctcgggccagggcactggctgaaag

SEQ ID NO: 99269 - DNA, 269 bp, Zea mays
  Clone ID: MRT4577_22045C.1
ggattattctttgaaaacagatgaccataattttttttaaagaagagtgacttattttgtgctattcttaagtaaagtgtgccaattaaacctgtgtggcctatataaatgaagttaataacttcatagtaagaataaataggtttaactaatgtgatagttttctaaaaggagattgtttttagacaactattatgtaactgagggaaaagcaatttttcgtatgtgattgtgaatgagaaagttttgtgctatgtgggtcatttatc

SEQ ID NO: 99270 - DNA, 807 bp, Zea mays
  Clone ID: MRT4577_22046C.1
gggaagttattggtgccggtggagagaaggccatgtgtgggagcgcaaaggaagacacagattagagaatatgacattgggggagtggtttgttcaaatcgagaaataccttctagcaaagaatgaagaggctgctgaaatggcgatatctgaagtgcaagagaaacaccggcggttttgtgcaggttaaaacgctcgagctcaaaaagggtgctgctccttgagattccatggataatctggaaatattttggacagcctagtgttggataatttgacaccatcatatatcacaatgaagacaataacgctggagcgttgcaaactgtatgtttgtggtataaccatcattagcagggtggtgacatcggaaattgtttattgcagacttaggccttgtttgataatcttgcaaagcgagctatggacctatgtattggaaactgggtacctatgctgtacaaggaaatgtagaggtcaaaaaaaagaataggggcaccatgaaaaccgggtggctttgttttgcattaagagcctgttcggttttcacggattcatggcccggaacgatggctagttcatacttcctagacagattgattatctaatttatataagatttgattagatgtcagaatgattcggagtccattcctgaacaaaggaacaaaatcctgccggggtgaggccaagccactggggtgaagacactatggtgccgtttggtttccaaaatgtaacgtaaatagtaacgataacgggttgtatttgattatcagtggtaatacgtttgaatatgctggtatc

SEQ ID NO: 99271 - DNA, 264 bp, Zea mays
  Clone ID: MRT4577_22047C.1
gactttcaagaaaagacgacatcatatatagggtacgttcttacttatctgcattgatcgatcggtcgagctggtgggttatagagtaggtaaatagaaatacgaatgatgatcacgggagggcagcgaaaccctgcaaggaagaggcaggagtcgtcgtcctacctgcttgcccttgtttacgctacatcggtgctcgacggccctgtggccggatggcagtatttactaagagtgctacacgaggggggggggggagaactg

SEQ ID NO: 99272 - DNA, 373 bp, Zea mays
  unsure (1)..(373): unsure at all n locations
  Clone ID: MRT4577_22048C.1
tgtaataatgtaatggagccgctggctagctacctacctcgctagtttactcatttaccggccatgagtaactgaccgtcacccatcaccatgggatgcacaagctagcattgtcctgaatgaaccattgacatggagcatgaataattgggggggggggaaaattttttttttttctccnnnnnaanggantatgaanattgactttgggatgcgaatgatgtgtcgcacctatgagcctgcgttgctatggctaccccagaccgcaatggatggggatctatcataagctaaactggnggctctnctgggggctgaatgaaaaaaaaaaaaaaaaaaaaggaccttggcccggaccccccctaaggcgaat

SEQ ID NO: 99273 - DNA, 329 bp, Zea mays
  Clone ID: MRT4577_22049C.1
tctcatggcatcctccagttataccccttcgaggttctctaccagagagggagttttctaactgtttaatcttcctacatataggggcctcaaagctaggcctaacttgaacgttggcatttgttgagaacatgatggatatccttcatctgttactttcttctccaatactgctcttgattacttttcttgctcccctttcaacttccctatcgctatgctagcttcatctcatgttcttgtcttatgtgcttccttactttattcaaaccttctttttgttcatctttttattaataatactactatcacatatccatattcctctt

SEQ ID NO: 99274 - DNA, 1497 bp, Zea mays
  Clone ID: MRT4577_2204C.1
atggcgagaacgatgcttggagagtacaagacgcctgagcgattttggttggaagctgtgaacacagcttgccatgccataaaccggctctatctgcaccatcttctcaagaagacctcctacgaactcctaactggtaacaaaccaaatgtttcttattttcgtgtatttgggagcaaatgctacattctggtgaagaaatgtagacattcgaaatttgttcccaaggcagtagaaagtttcttactaggatatgactcaaatacaaaggcgtatagggtcttcaacaaatcatcgggattagttgaagtatctagcgacgttgtatttgatgagactaatggctctccaagagagcaagttgatactgatgatatagatgaatatgaggtttcggctgccgcaatgcgaactatggcgataggagatgaagagctcaacaacttcaaaaggaatgaagtctggagcctggtgccacgtctaaagcaaaacgttgtgggaaccaagtgggtgttccgcaacaagcaagacgagcacagagtggtgataagaaacaaggctcgacttgtggaaaaaggttatgcccaagtcgcaggtttggattttgaggagacttttgctcctgtggctaggttagagtcaattcaaattttattagcctatgctgctcaccattcttttaggctgttccaaatggacgtaaagagcgttttcctcaatgggtcaatcaaggaggaggtatacatggaacaaccctctggctttgaggatgacaggtatcccgaccatgtatataagctctctaaggcgctctatggacttaagcaatccccaagagcatggtatcaatgccttagagatttcttaattgctaatgctttcaaggttgggaaagccgatcccactctttttacaaagacttgtgatggtgatctttttgtttgccaaatttatgttgatgatataatatttggttctactaaccaaaagtcttgtgaggagtttagcagggtaatgatgcacaagttcgagatgtcgatgatgggcgagttgacctacttccttggattccaagtgaagcaactcaaggacggcatcttcatctcccaaacaatcactcaagaccttctaaagaggtttgggatgaaggacgttaagcccgcaaagacaccgatgggaactgacggacatctcaacctcaacaaaggaggtaagtccgttgatcaaaagacataccggtcaatgataggttcattactttatctttgtgctagtagaccggacattatgcttagtgtatgcatgtgtgctcgatttcaatccgaccccaaggagtgtcatcttgtggctgttaagcgaattcttaggtatttagtttctacgccttgcttcaggatctggtatccaaaggggtctacctttgacttaattggatactcagactccgactataatgggtgcaaggttgataggaagagcacatcagagacgtgctaa

SEQ ID NO: 99275 - DNA, 768 bp, Zea mays
  unsure (1)..(768): unsure at all n locations
  Clone ID: MRT4577_22050C.1
cctttccggattccttggaatcatcgctgtttcgcacaattgtattggcgtagcagcccgagcttgcggtcttgtgagccttgagcccacaaaggttgccgagatcctcaaggatcgtccatcttggtatcgcgactgtcgttgcgttgatatcctccatgttttccctacgggtaatggtggaactatcgagttaatctacatgcagacttatgcaccgacgactttggcggcaccacgcgacttctggacactccgctacacctgcggacttgatgatggcagccttgtgatctgtgaaaggtcattgactcagtccacgggtggtccatctgggcctaacactcctggttttatcagagccgaggtgctccctagtggttatctgattcgaccatgcgagggaggcggctccatgatccacattgtggatcatgttgatttggatgcttggagtgtgcctgaagtccttagaccgctctatgaatctccgaagatcgttgcacaggagatgactattgcggcactgcgacacatcaggcaaatcgcgcatgaatcaagtggtgaaatcccctatggtgctgggcgccagcctgcagttctcagaaccttcagtcaaaggctcagcagaggcttcaacgatgctgtgagtggatttccagatgatggttggtctttgttgacgagtgatggtgctgaggatattaccattacagtaaactcatcgccaancaaagcttgtcgggtcccacataagcccttccccgc

SEQ ID NO: 99276 - DNA, 473 bp, Zea mays
  Clone ID: MRT4577_22051C.1
gaactttgggctgatttatgtgcttgtccgaaaggggagagagagagagagaagacacagagcagagagagagagagagaggagcgggagatgtgtgagaggtcgttgcgcagggattgcagatctagtgatcgtgaaggagggacaaggggacggttgggactggattgactaggtaggatcgggagttggctgccgcgtggaagaaggtatttattgttgttgttaagaaggacgagaaggttgctaatgttgtgtgttgtgttggcgtggagactgacattacgaagaagcataatgtcggcatgaataaggtggtacttagtggcatactttctaatattaagtgttctgatgatgatattgaaaattctgtttacgagtgagccttaagcgactcgaagaagaactctacgtaagtaaagtctgacaagaagtcgatataggtataatccgtctaagacgacaacgag

SEQ ID NO: 99277 - DNA, 257 bp, Zea mays
  Clone ID: MRT4577_22052C.1
tgttatttcgtagaaggcggcttgccctgcccgccgtcttggtgccgtgcgcgccatggccaatagcaagtcttccgccaaggccggcccctcgttcctcggcatgtactaagctcggccacctccttggtcggggcaacttttccaaggtataccacgctctctgtctttgtggatgcgacccatatgccgagaaggtgctggacaaggccgggctggccgtcacgggcatggtgtcgtggctcctgctcgaggtg

SEQ ID NO: 99278 - DNA, 484 bp, Zea mays
  Clone ID: MRT4577_22053C.1
ataccctagcagtacggtagtgcctcggctctcgacgtattagacgaccaacggctactcagggcacctggttgcttgtggttgcctacctgcttgttgtcgtcgcctgtaacgcgactgcttcggctgacgatgtgactgccattctggagacaggtggatgcgaaggtgacgatgaaaaaatcgaactcctgctgctgcatctgagcgagagggacatcacctgagtcattggcgggtccaagaagaagacagcttcacctgcctgacctgatggcacaggcgctgctgcaagagctgctgctggtgctggaggagctgctcctgcatgtgaggctgaccctgatacgaaggcgggaaagaaggaggagggcgatgctgatgtgcgcttcagactcttcgactatgctgcacacccatgacagcattgctccgggtagggaaaccggaggacatcctgagtcatgcccatatgttaagcatg

SEQ ID NO: 99279 - DNA, 2361 bp, Zea mays
  Clone ID: MRT4577_22054C.1
ctactatccatcacatgtctttcattggtactcgtcgccgccggctacctcctccagccgccgcgcctccctcctccacccgctgccgcctccctccaaaacttgtcgtcgtatccctccaacacccgcatctggcgcagacgaccatacacccgctctgatgctttaaatcaatgtgtatggggttccaagcgtctgacctgacaaagaccgccccaagcaacgatgattcttgaagcgattgcagagataaaattgaagtgattttatagtgatttttttgcggagacagctgatttcccattggatatagtgattttatggtgattttttttgcagagggctgatttccttgatgtgcgcttcaacgagttggagaggtgggacgccagttttttaattttttatttttgaaaataaacaggtcaacgaaggggaggtgggaactgggaagtactcaaccttacattacaatctacctatgcgttttttggactgcactcctagtgatagcaaagggaccttggatgagtcagatcgtttccttacaagtccatctgagtttgtcggcgagtacgccccctactcctgagaagtcgggacgggtgcggccgtgggcggcgacagcgtcgaaccggaaggtgctggtgttcgcgctggcgttccgcgcggccaacgcgctgctcgtgcgcacgtacttcaaccctgatgagcactggcagtgtctcgaggtcgcccaccgcgtcgccttcgggtatggtcatctcacgtgggagtggaagcggggcctgcgcagttatctccacccattgctctttgctgctttgtacaagaccctggcgctactccatatggacactccgtgggttatggtgatggctccacgtctcgtgcaatctttgtttgcagcttttggagatctatacctatataaactttccaaacttattttcaatggtcaagttgctaagtggacgttattttctcagttggttaactggttcatgtttttctgtatcacacggactctatcaaacagcttggagactgttttgaccgtggctggactctattattggtttgctgcaatagagtcttccaaggcaacctcaatcgtttcaaagcagcacgcggcctgtgaacaaagtatcccatcaagaaaagtggctcttctgatagcagccttgtcatgtgccattcggccaacaagtgctgtaacatggctatatgttggccttttggattttattcagatgaaatcaaaatgtcgctttatccttcttgatgtcattccagtgggggccattgtccttgcagtaacaacactccttgattggtggatgtatggttcctgggtcatagtgccgcttaattttttgaaattcaacttattgtcttccggaggagactactatggaacacatgtcttccattggtactttacacagggttttccatccatgatttggacattcttaccatttgcattgtgcggtattgtaaagtctcaggaatggaggctttcaggtctaattgcttgggtgttaggggtttacagcattcttggacataaagaattcaggtttgttcttccagtgctacctttagcattgatgttctcaggttactgcttagcttccatgtcacagtccaagggcaaaaatcagcataggaaaggaagtctttcaaggctgcagctttctgttattcttctcgtcataaccaatgttcccatggctttatatatgtccttattccatcaaaggggaacagaagacgttatgtattatttgtcaaaagaagcctatgatggaagagtgaggagtgttctctttctcatgccttgtcattcaacaccttactactcaaccttacattacaatctacctatgcgttttttggactgcactcctagtgatagcaaagggaccttggatgagtcagatcgtttccttacaagtccatctgagtttgtcggcgatgtttttggaaatttatctgcattcagtcacattgtattattcgagtcagaagaaagacatgttctccagttgcttctgcacaattcctttcttgagatgaggaggtttttccactcacatttcaaggttgacagagaccttcagtcggctgttgtggtttattcacggagggatgtgctatgatttagtactgatgtggcagaaaatgcctgttagctcgtgtaacaatccccacatgtttaatgttgtttcagcttttcatttgagaaatgagttgtggcattgctggatacttctgatatcttaatcctcttggaatgagatgttatgttacttttacccaaaaaaaaaaaaaaggcccctaacaatttacagttta

SEQ ID NO: 99280 - DNA, 567 bp, Zea mays
  Clone ID: MRT4577_22055C.1
cgttgctgtcggctcggttgatttcataagatcaatattcctcgtcagggagacgatccgtgagggcagaaacggcactgaagacgcgaagctgaaactggatgagctagacgcgacgaccccagcataccagaccgcggacatcgtcgtcttcaacaccggccactggtggactcactacaaaacatcaagagggtacactgtactttctggagagagtatcatatcgtcacttagtttccataatccaaacattctgaagtgcttgcttgctagtctacaggctgaactactaccaagagggcaaccatgtgtatcccagcctcgatgttctggacgcgtacaggagagccctcgtcacctgggctagatgggtggacatgaacatcgatccgaggaggactcaggtcgtgttcagaggatactcactctcgcatttcaggtaagacatcgccgccgccgctacgctggctggattccttcctggcgacttggtggggccctatattttcacttgacaatgaaaattttttgggaaccgaggggggcagggggacctaagggggg

SEQ ID NO: 99281 - DNA, 156 bp, Zea mays
  Clone ID: MRT4577_22056C.1
cagaaacacacctagcgaagcgactagcaacgacctaacaacaatgggtaaccaggtattaaccctccttggggctccttccccttttgggagcggcaaaaaagcggtcaataattcaacaatgtcaattggtcccagtggcaataattcaaaggt

SEQ ID NO: 99282 - DNA, 1335 bp, Zea mays
  Clone ID: MRT4577_22057C.1
ccacccgctgccgcctccctccaaaacttgtcgtcgtatccctccaacacccgcatctggcgcagacgaccatacacccgctctgatgctttaaatcaatgtgtatggggttccaagcgtctgacctgacaaagaccgccccactcgacgatgattcttgaagcgattgcagagataaaattgaagtgattttatagtgattttttgcggagacagctgatttcccattggatatagtgattttatggtgattttttttgcagagggctgatttccttgatgtgcgcttcaacgagttggagaggtcggacgccagtttttttttttttttgaaaaaaaacagggcaacgaaggggaggtgggaactgggaagatctgtttgataaattacagagaggatacttcgccaaccgaacaagatgatgtgccgccggaggcgttctcgcgctgccggctcgccgcctggcgacgccagtacgggtacggcccctactcctgagaagtcgggacgggtccggccgtgggcggcgacagcgtcgaaccggaaggtgctggtgttcgcgctggcattccgcgcggccaacgcgctgctcgtgcgcacgtacttcaaccctgatgagcactggcagtgtctcgaggtcgcccaccgcgtcgccttcgggtatggtcatctcacgtgggagtggaagcggggcctgcgcagttatctccacccattgctctttgctgctttgtacaagaccctggcgctactccatatggacactccgtgggttatggtgatggctccacgtctcgtgcaatctttgtttgcagcttttggagatctatacctatataaactttccaaacttattttcaatggtcaagttgctaagtggacgttatccttaaactcatttatgtacctatacaattttcttcgtgagtatatgacttcaacaaccttggacgtcggccttaacaaactgtttgcagttattttctcagttggttaactggttcatgtttttctgtatcacacggactctatcaaacagcttggagactgttttgaccgtggctggactctattactggtttgccgcaatagagtcttccaaggcaacttcaatcgtttcaaagcagcatgcggcctgtgaacaaagtatcccatcaagaaaagtggctcttctgatagcagccttatcatgtgccattcggccaacaagtgctgtaacatggctatatgttagccttttggattttattcagatgaaatcaaaatgttgctttatccttcttgatgtcattccagtaggggcaattgtccttgctgtaacaacacttctttga

SEQ ID NO: 99283 - DNA, 774 bp, Zea mays
  Clone ID: MRT4577_22058C.1
cattgggtacctcgaggccggccgggacgtccaatcgtcgccgccggctacctcctccacccgctgccacctccctcctccacccgctgccgcctccctccaaaacttgtcgtcgtatccctccaacacccgcatctggcgcagacgaccatacacccgctctgatgctttaaatcaatgtgtatggggttccaagcgtctgacctgacaaagaccgccccaagcaacgatgattcttgaagcgattgcagagataaaattgaaagggctgatttccttgatgtgcgcttcaacgagttggagaggtcggacgccagtttttttttttttttgaaaaaaaacagggcaacgaaggggaggtgggaactgggaagatctgtttgataaattacagagaggatacttcgccaaccgaacaagcctaagtgggggtgatgatgagccaccggaggcgttctcgcgctgccggctcgccgcctggcgacgccagtacgggtacggcccctactcctgagaagtcgggacgggtccggccgtgggcggcgacagcgtcgaaccggaaggtgctggtgttcgcgctggcattccgcgcggccaacgcgctgctcgtgcgcacgtacttcaaccctgatgagcactcagtctggaagttgctgtgtgcgcgctggtcgtccgtgcgcatctcgcgctgcactggcgcacgtacttgcaccctgatgagcactggcagctcctcggctgcgtccaccgcgtcgcggcgctactccatatgga

SEQ ID NO: 99284 - DNA, 523 bp, Zea mays
  unsure (1)..(523): unsure at all n locations
  Clone ID: MRT4577_22059C.1
gtaactgttacaagcagnaagtctgtgaccaggtctgaagggtgtctgtcggcacttccgctcggctcgcgcccccgggccttgcccctgtggacttgcgcatctttcgtgcggaggaacggtcacactctctgagcctgccttcagcggcaggtgcgcttgtgtatcgggccccagggtgtctgacatacaatactcgcgactggtgaacagcaatcaacgttgtgataaatagcttacctggaaacgatgtctgatatgccgctatggtttggttacctccataatggtgtcgcccggctaaactacgcagctacgatcttgcacatcagaagttatgcgggtgcttccatatcttaaaaaggcatatggaaatgccatgcaaaaggttctccatgtaggccctgatagttgcacagtagtttctaatttgttgaaagaaggaaaggttgaagcttggggagtggagccttatgatttgtaaaatactgacagtacttgcataagcctcaggggcgagagc

SEQ ID NO: 99285 - DNA, 370 bp, Zea mays
  Clone ID: MRT4577_2205C.1
ccccatgccgcagtacgaagctcgaacatcggcacatttaagaactgtgtgaggctgttatacgctacaagatctactacacacatactatcctatagctatctggcagtatagcccaggggatgcactaatgagtgagctctctcacatcactgggcttagggctcgctagaccgactatacagtctgataaacgctggcatgcctttttgagtgaggaatcagcactacatcgctgagagaggctatgcgctaaaccttggctatggcgagcaaggaactaaaatagtctacactctactagatggatgaactatctaaacctggccatggagaatagctgcctgcaaccacagtgagtgatacccat

SEQ ID NO: 99286 - DNA, 127 bp, Zea mays
  unsure (1)..(127): unsure at all n locations
  Clone ID: MRT4577_22060C.1
cgggtcgnacccacgccgttctgcttttcacgnagnatgacacagtgccatggaaaatagaggtggtggntgggagaaacacaacacgcacctctcttttccacgatgtatgacacacgtgcctggc

SEQ ID NO: 99287 - DNA, 403 bp, Zea mays
  Clone ID: MRT4577_22061C.1
tgttggtgtacacggccggagcgcaagacttgtcggagggggggaggaactacactggggaccacccagcctggggcgcgcacagagcatcctgtcacattgcgcgtaccgggcggggctcatgggatacgacaacggctaccgcgtagattggcgggctccatcaaggaaacggctcgccaaggtggaccccggagacgccttcgacccgatgagcctcggcgacgacccaaacaccgtcaacgttatcaaggtgaaggagctcaaaaacgtcgacttgccatgtatcgacatctacggcttcttggtgcaggccatcctcaccggcgagggccctatcgagaacctcttctaccacgatgacgaccctgacgacaacaagtcctgggcatactccacaaac

SEQ ID NO: 99288 - DNA, 227 bp, Zea mays
  Clone ID: MRT4577_22062C.1
ccaattcccaactcgacccactcgtcctaccacacatcctcatacttaaccaaaatgctctattttcctttacacattttacaacaacgatcatgtaatatcctcctactatctccacattttccactcaacatccttctaaccatccctcaacaaataatcacactacccatactaaccacaaatatacctacacaatccttattacaaacccttacttctcaaca

SEQ ID NO: 99289 - DNA, 316 bp, Zea mays
  Clone ID: MRT4577_22063C.1
attcaaaataacaccaagcgaagctcactgtatacaacctaacaacactggctggggggagattatctctccttgcgcttcttgcgcttttcgcgagcgcagcaaatgcaacaatcataccagaatgttaagttgattctaattccattatttcacagttccttccaccagacatttcaatggtctgggaacacccaactgagcaagcctatctgctacaacaagcgattgccgcgagcgttgtacaataacaaatcgctctatgtcaacaccaattctaagctgatctaacaatacagaccatggcatcgtaaca

SEQ ID NO: 99290 - DNA, 616 bp, Zea mays
  Clone ID: MRT4577_22064C.1
ccggcctgttcgtcgtcttggagcgagagccggtgctcgcacatggagtgcgcgctgatgacctacagcatgtgtcagaggactacaggggggagctgggcagcatactactagcaaaggccaagactgtaggtggtggatggtcaatggtacagacggagatggggagagtgacggagtaatgcgggcgtgtgaggaagatgcctgggcatattcttgagtagcatccgttgctggaggcacggcggtggaagtgcacgcacactcaggagtagtctaagtgtggaacgggaagatgtgctttgctgcttatgaagacatgcgattaggacagggctactgcttatggcttgtaaaggcgaacagttccagccaatcgtcaggctaggtcagattcacactcaagccggaggagatggatccttgcgcaatgaagacatgcatggctggcgaggttgacaagagcgaacatgacagcacctagttgcatgtcatatttgtgccaagggagagcctgtagattcggatagcagattggcacatgacatatacagcaggatgcttaacggtaatgctgccactgacgcagtcggagacgacgctcgtgctcactgcc

SEQ ID NO: 99291 - DNA, 540 bp, Zea mays
  unsure (1)..(540): unsure at all n locations
  Clone ID: MRT4577_22065C.1
ccggagtcaattcggcacgagggtgggatcctgctgatttccatggcaattggcaacttcgcaaacacattggatacattgatggccaagtctcggttcaaagcgaagatgaagaaatcaaagggcaaacgggatcttgacacgtgcccctcaccaacaggttcgtcgccgacagattcagcaaccagagcatgaaaaggtcaagagggccagttgcttaccctatgaccattgcccgtgtttaaccagggctggtcaccattgtaaatcattagtgttttctggccatcagcccctaatccttactgtctctgtcagagctcatactcatgtaagcatcaggcaactaggttgctgatggtcctaggctgaaaaaggatactgagaataaacttctggtgtttgtttatacctatatcctgaacatggagtggagtagatgagctttaggactgcaagtcttagcagaaaatttcccagtatagttgngaagctgtgagacatttgtcacaatgcgaagctgtatacaggttgaggcac

SEQ ID NO: 99292 - DNA, 1974 bp, Zea mays
  Clone ID: MRT4577_22066C.1
ggctaatgctgttcttcaatgtctcatgtgcacgaaagccactgatgatctaccttcttctgagattgcattctaaagattgtaataccataatttcaaatagctgtccccaccccctccttgaaatattgatgtgtactttatatttctttttatttgaccgcagttattattttataggttgttcaaaaaattggtgccttatgtgtgaacttgagcaatatgcttcaactttacgtgaaagtggtggacccttatctccaagtagaatcctttctaatctgaggaatattggatgtcgcttgggtggtggaactcaggaagatgcccatgagtttctaaggcatcttgtgatgtctatgcaagcagcttgcttggatgggctgggtggtgagaagcacgttgagccaagtttgcaggaaacaacactgatacaacagatgtttggtggccgtcttaaatccaaggttaagtgcctcagatgctatcacgagtctgaaagatatgagaatataatggatcttactttggagattcatggctgggtagagtccttgcaagatgctttgacacagttcactgctcctgaagatttagatggtgataatatgtataaatgtggaaggtgttctgcctatgttaaagctaggaagcaactgagcgtgcatgaggtgccaaacattttaacagttgttcttaaaagatttcagtcaggaaaatatggcaagatcaacaaatgtgttactttccctgatatgttggacatggttcccttcgtgactgggtctggtgacaatccccctctttatttcttgtacgccgtggttgtacatgtcgatacagaaaatgcatcattctctgggcactatatatcatacgtcaaagatatgcagggtacatggttgagaattgatgattcagaggtccaggttgtatcagtgaatcaagttatgtcagaaggtgcatatatgcttttctacatgaggtctttcccccgaccaccaaggatatacatcgagaaggggctgccggttacatccgcaaagcggcacacgtcgaaatcttccaagggctctaaacacgatcgcaagcagacagagttactctttcctgcaaacgatcaggcatatggcgtctatgatttcagacccgatggcgaaggctatgcccaagatcagcatgcagagctgaggtccagagctttccatcacgccgacgatgcctttgcagactcggttagcgcggacttctcggaagcgacatcaagtgaatggtcgctgtttaccagctccgacgagtcctcgttcaccaccgagagcacaagggattcgttcagcgtcgtggactacggagacaacgccggcctggatccgatttcctccatattcgggccaagctatgctccggagcacggtgctcccggcagtttcgtctcgcgcacaaggttctcaccttccagtccacagacaaggtacttctcggagagcacaggctttgtctcggactcttccatgccggcccacccccacggcattgtacatagaggaaggtatccggatagtagggcgtgcgcctcttctgcggaaccgcttgcgtcggcggcgcatcagcggagcgggtatggccggtacccccttagtcgagatggttttgttcaaacatctggtttttgccaaatgtaatcggctcacatttcattagctgtagctggtgcatcggcagttgcggttcttagcactgccgttaatgctgcctcatgttcttttatttcagatgaggcttattgaatttttagctacatgtcgtttctaggggtagctcgattcgatgtagcgaaaaaaagttagattatgtctatatgcaggtgaaattttagagcatggtgacaagctctgtggctaaaaaaaaaaaaaaaaaaaaaaaaaaaaaaaaaaaaaaaaaaaaaaaaaaccggagagggggcccgggaacccc

SEQ ID NO: 99293 - DNA, 501 bp, Zea mays
  unsure (1)..(501): unsure at all n locations
  Clone ID: MRT4577_22067C.1
cccgaatgaaccatggacctgcggataccttgcatgagcgtacgtcattttgatagtcatcaagaaggggagaacattgatgggagcaacgaacagacctaacgtaaggacaaacgacgtgaaacgagaaacatactgatcagctctctcttccaacctctgtgtaaaactgaacatagagactacctaatgatatgatgcagatcggacggcgcaggtgctacaggcgctgatggagaacgtgatggcacggatgtgggacaagaacatcctacatggggacgacatcaagggaggttctcacaacgagactggagactacatgttctgatatgactggtcaacatgaagtaacctccacacccattcactatcgaattaggctggtgaatgatacagactatggtctcatgatggtatgagntataagcttacgtaacctctaccgagaataatgagaacatagagatgcatatatgatcagagctggaaacatgctat

SEQ ID NO: 99294 - DNA, 434 bp, Zea mays
  Clone ID: MRT4577_22069C.1
cacacataaataaatattatgctatagtaaccactattcttaaaccacacataaaaaccatataatgactgtgatatagagaatatactaccagaagttccattgaatgattattgtattcaatatactaaaaacaataaatcttttgaataagctagaaagaacaaatggaattatacatatagataacaacctataacactcagagctaatatcatttaactgaatgaagacagttgaataacatgctaagcactacactacatatgtctgaacaacacttacctaggcttataatatgaaagatatatgaacctagtccggtacttttcgataatacgtgacgaactctatagatatacataccactgtgtgacgatcaaacatgcttgatatatgacacagaacatgtatacctagttccaaaacaatag

SEQ ID NO: 99295 - DNA, 4719 bp, Zea mays
  Clone ID: MRT4577_2206C.1
tcaatccaagttccgcgaatctaagacatttagctcactacgcagcctgcaaaaggtcgactcatctagaggcttggtaaagatatcggctagttggttctcggtgctaacataaaacacttcgatatttcccttttgctggtggtctctcaaaaagtgatgccggatgtctatgtgcttggtgcggctatgttcaacaggattatccgccatgcggatagcactctcattatcacataggagtgggactttgctcagattgtagccaaagtccctgagggtttgcctcatccaaagtagttgcgcgcaacactgtcctgcggcaacatacttggcctcagcggtggatagggcaactgaagtttgtttcttagaactccacgacaccagggaccttcctaagaattggcacgtccccgatgtactcttcctatcgaccttacatccagcatattcggagtctgaatatccaattaagtcaaaggtagacccctttggataccagatcccgaagcaaggcgtagcgactcctttgttgaggtcggtgtgtccgtcggttcccattgcagtctttgcgggcttggcgtccttcatcccaaatcgcttgatcaagtcttgcgtgtacttcgtttgggagatgaaggtcccatccttgagttgcttcacttggaacccaaggaaatagcttaactcgcccatcattgacatctcaaacttttgagtcatcaccctgctaaactcttcacaagacttttggttagtagaaccaaatattatgtcatcgacataaatttggcacacaaataagtcaccatcacaagtcttagtaaaaagagttggatcggctttcccaaccttgaaagcattagcaattaaaaagtctctaaggcattcataccatgctcttggggcttgtttaagtccatagagcgccttagagagcttacacacgtggtcggggtaccgttcatcctcgaagccagggggttgctccatgtacacctcctccttgattggcccgttgaggaaagcgctcttcacatccatttggaacaacttgaaagaatggtgagtagcataggctaacaatatgcgaattgactctagcctagccacaggagcaaaggtctcctcaaagtccaaacctgcgacttgggcataaccttttgccacaagtcgtgccttgttccttgtcaccaccccgtgctcgtcttgtttgttgcggaacacccacttggttcccacaacattttgcttgggacaaggcaccaatgtccaaacttcatttctcttgaagttgttgagctcttcctgcatggccaacacccagtccggatctagcaaggcttcttctaccctgaaaggatctccaatcgccatggtgcgcattgcggccgttggaacgtcttcttcatttacatcatcaagatcaacaacttgctctcttggagagccattagtctcatcaaatacaacatcgctagagacttcaaccaaacccgatgatttgttgaagaccctatatgcctttgtatttgagtcataacctaacaaaaacccttctacagctttgggagcaaacttagaattcctacctttcttcactagaatgtaacatttgctcccaaatacacgaaagtaagacacattgggtttgttaccagttagaagctcatatgaagtcttcttgaggaggcgatgaaggtagacccggtttatggcatggcaagccgtgcttacggcttccgtccaaaaccgttcgggcgtcttgaattcaccaagcatcgtcctcgccatgtctagtagcgtcctgttcttcctctctaccacaccattttgctgtggtgtgtagggagcagagaactcatgcttgattccttcctcctcaagatactcctccacttgaaggttcttgaactcggacccattgtcgctccttatcttcttcactttgagctcaaactcgttttgggctctccttaggaagcgcttgagggttccttgggtttcagatttatcttgcaaaaagaatacccaagtgaagcgggaaaaatcatcaactgcttgacaagctgcacaaggtctatctttttcgaaagttacattagttagacctatcacgtgttctccctttagaagcttgtgaaggttcttcatccccacatgtgctaaacggcgatgccacagccagcccatgctagtcttagcaattaagcaagcatctagaccgacctcctcttttgcaaaatcaactaaataaagtttgccgtctagtacacccttaaaagctaatgaaccatcacttcttctaaagacagatacatctacatttgtgaataaacagttatatcccatattacaaagttgactcacagacaacaagttatatccaagcgattcaactaagaacacattagaaataaagtgctcggatgaaatagcaatttttcctaaccctttcaccttgccttggttcccatcaccgaatatgattgaatcttggggatccttgttcttgacgtaggaagagaacatcctcttctcctccgtcatgtggtttgtgcatccgctgtcgataatccagcttgatcccccggatgcataaaccttcttatcctttctacaaatagcaaaggaagcattgcaagcataataaattgtagaaggttcattcattattttcctaggaacatgaacaatatttcttctaggcgtatgatgaacaacatttttcttagccaaatttctatcatgcataatagaagaactagaagcaatcatggcatgagcatcataacttctataaacattcctagaatgtctcctatcatgatacatgaaagcatggttcttttgagcactactagccataggggccttccctttctccttggcggagatggaagccatatggcttgttaagttcttgacttccctcttgaagccaagaccatccttgattgaggggtgtctaccaattgtgtaggcatcccttgcaaattttagtttgtcaaattcactcttgctagtcttaagttgggcattaagactagccacttcatcattcaaattagaaattgaaactaggtgttcactacaagcatcaacattaaaatctttacacctattgcaaattgcaacatgttctacacaagatgttgatctattagctatttctaacttagcattcaaatcatcatttatgctctttaagctagaaatagagtcatggcatgtagacaattcatcagaaagcatttcattccttttaatttctaaagcaagggatttttgtgcctctacaaacttatcatgttcttcatacaaaagatcctcttgcttttttaataacctatttttatcattcaaggcatcaattaattcattaatcttatcaaccttagttctatttaggcccctgaataaacatgaatagtctatttcatcatcgctagattcttcatcacttgaggacgcgtaagtactagtatcacgagtgcttaccttcttttcccttgccatgaggcaggtgtgatgctcgttggggaagagggccgacttgttgaaggcggtggcggcgagtccttcgttgtcggagtcggacgaagaacaatccgagtcccactcctttccaaggtgtgcctcgcccttagcctttttgtaagccttcttcttttccctcttgttcccttgttcctggtcactatcattatcgggacaattagctataaaatgaccaatcttaccacatttgaagcatgagtgcttccccttcgtcttggtcttgttgggatgctccttgcgaccccttagcgccgtcttgaaatgcttaatgatgagggccatctcttcctcattgagtcccgccgcctcaacttgtgccactttgctaggtagcacttccttgctcctcgttgctttgagagcgacggtttgaggctcgtggattgggccattcaaggcatcgtcaacgtatcttgcctccttgataatcatccgcccgcttacaaactttccaagtatctcctcggacgtcatcttggtgtacctaggattctcatgaatattgttcacaagatgtggatcaaggacagtaaaagaccttagcattaggcggacgacgtcatggtccgtccatcgcgtgcttccatagctccttattttgttgacgagggtcttgagtcggttgtatgtttgggttggctcctcgcccctgatcattgcgaatctcccaagctcgccctccaccaactccatcttggtgagcatggtgacgtcgttcccctcatgtgagattttgagggtgtcccaaatctgcttggcgttatccaagccgctcacttggatggagagagaacaagtggctacgcattttgtgactccaaaatccatagtcctctccatcaaagtggggggtttaccgaggggaatagaaagcaaatgagcattggaactttgcggaatacgagaataatcaaaggaaaagtttgagttaaccgtcttctttttctcgtagtcgttgtcattgtccttttgggaagaggaagatttgtcgctgtcgtagtagactatctccttgatgcgccttgttttcttcttcctcccgttttttcttttgtggcccgagcctgagtcagtaggcttgtcatcctttggatcattgacgaaggactccttctccttatcattgaccaccatccccttgcccttaggatccat

SEQ ID NO: 99296 - DNA, 1419 bp, Zea mays
  Clone ID: MRT4577_22070C.1
cccacgcgtccgcccacgcgtccggcggaagacaggtcgcttgttctacttctacctggcctcgcaggcttcgcaaggcggccacacgccgatacctcctccttcacccgctccgtcgtcccccacagccggccacgccaccatgctgccaccggccgcgcgccttgcggcccgccgcctcctcggcctcgcctccgcatctgcgtcggaagccgccggccgccgggtagcttcctctccgatcgcttccgcaggctactccgccgccgcgtccaggggctccgtctccagcaccaggcccttctccacggctcttaactaccaccttgattccccggagaacaagccggacatgaaatgggagttctcacaggcgaatatgaagaaggtcaatgagattctgtctcactatccaagcaactacaagcaatctggtattattccgctgcttgatcttgcacagcagcagcatggtggatgggtgccagttgcagcaatggatgctattgctaaaatcgtcgaagttgcaccaatcagggtttatgaagttgcaaccttttataccatgtttaacaggactaaggttggtaaataccaccttctggtgtgtggaactacaccttgtatgattcgtggttcacgtgaaatcgaagagacgttgttggagcaccttggagttaaacgaaatgaggtgaccagtgatggtttattttctgttggagaaatggagtgcatgggttgctgtgtgaatgctcctatgattgctgtggctgactactcgaaaggctcagagggttacacatataactactatgaggacctcactccaaaacgagttgttgagattgttgagatgcttagaagaggtgaaacaccccctcgaggtacacagcacccagagcgaaaaaactgtggccctgccggggggaacaccaccttgcacggagagccgaaacctcctccatgcagggatctggatgcctgctaggtttgcttcggagcattacgagcacgcgcataacttggctcgtactgtaaggtgtgcaaactgcacacagcggaggctgtgttatttgtattctgaagctttcttgtgtttcgtcaagaaagcttctctaacttttatcctgcactatcagataaacggtaaattgatagagaataagatgttttcgagctcatgtttagtggcaaacgctttatatttttggcaagctgtgaaggagctgaaccagtgacaactcgaagaattcattttgttgtattaagtcttcttgttagcccattaaacgatgagatcgtatacttgaaattctcgaattttacaaatcaaaaaaaaaaaaaaaacaatgacagaaaattgtgagcgtacaaaaaacgaaaaaaaaaaaaaagaaatgtaagaaaagagatgatgta

SEQ ID NO: 99297 - DNA, 214 bp, Zea mays
  Clone ID: MRT4577_22071C.1
cacaaacaactcgggaacgtatattcataacttcctgccctcccctacaacctttccaaccacatcaatagaacacctcatcttcaactcttcaaatacaaacatatccattcacaattcaacacacattgtaaacaaatcatattacactatcttaaaacaccaacttcattaatacatatcatatctatctacaaaccctcaaaatcatttt

SEQ ID NO: 99298 - DNA, 323 bp, Zea mays
  unsure (1)..(323): unsure at all n locations
  Clone ID: MRT4577_22072C.1
ctgccctgcacatgcacagtacactccatcagtactgcaggaatgtgtctgtctggcaacaacatgtgtcaagggtttcgtcattctccagcctcagcctctgcaccaaccagtttaaagattcattaacctctctcggtctacttgcactctaaccgttacagttaaccaaccattggacgagtcctgtagccgaccatcctaattctcggacgtcacggcgtttggccgccggaacacaagcagccaactgcattcattgttgaataattagacaaattccagtttaaattccgaatatnagaaaaaaaaaaaaaaaaaaa

SEQ ID NO: 99299 - DNA, 232 bp, Zea mays
  Clone ID: MRT4577_22073C.1
cacgcggcggagcttgatcctttaacggccgccctcctcttttttatatttacttttttaatagggattttcaacaagggtttttttattacccccactctattaggggttgcacacaatatactaattccaaagctaatcccgggatctatgtattctatttaatatattacttattcaaaaaaggtatatctctatatccgtcaaacattttcacttaaattacttttca

SEQ ID NO: 99300 - DNA, 461 bp, Zea mays
  Clone ID: MRT4577_22074C.1
gaaagatctgaaacagcgaacacaacagagagacttcttctcggtatcttgtcttcactgggtggaaactaaagaaaattggaaaagggctgacttttttggtttggtgaagttcgtcgtggggactcgggacaatataataaagatgagtcctcgcttactctgagtgttatctatgtagttgcttcaatttttgtcactcatttgccttcgattcctccttaagaaactgacgattcttctattgggaatcggtcaacgtcctcaagtttatcagagatcttagggtttctaatcagatatttgattcatcaaaatcaccaactagggtttacaaagtccatgcttttcgatcattgatcagagagctttcaagaaatatttgcaagaaaatggcaatggctccagtaataaagctggtcttaggttcagttgcctttgccattttctggatattagca

SEQ ID NO: 99301 - DNA, 563 bp, Zea mays
  Clone ID: MRT4577_22075C.1
cccaccatcccgcgcccaccaccagtccaccgccgtacggccgagcttgcgtaggatccgggcgagaaaagctccgtccggtcgaggcccccaaggaaggacacaaagcccacccgccaccccgctccaccaccaaagcgtcgcatgcctcgctccctcgccggcgacctcaccgacccggagatggcgcagccctacatgaagaaggacgacgacgactccgacatcgagtactcgccatttttcgggattgagaagggggctgttctgcaggaggcacgtgctttccatgacccccagcttgatgccagacgatgctcgcaagttatcaccaagctattatatttaattaatcaaggagagtcatttacaaaggttgaggccacagaagttttctttgcagttacgaagctattccagtccaatgatgctggtctcaggaggctggtgtatttgatgataaaagagctttctccatcatcagacgaggttttcatagtcacaagctcattgatgaaagatatgagcagtaagacagatatgtaccgtgccaatgcaattag

SEQ ID NO: 99302 - DNA, 180 bp, Zea mays
  Clone ID: MRT4577_22076C.1
gaaattcctggggagttatacatttgtgtattgataagaccattcacaatttcttgaagctcgatctcccccccagatgaaccatatagccaagagaaaccatgaaccagaatagaagagcttgccccacccatgagtaaatatttcatagtagcctcattagaccgcggatctctcttt

SEQ ID NO: 99303 - DNA, 250 bp, Zea mays
  Clone ID: MRT4577_22077C.1
acttggcgtatccttgcctgacatgtctagtctgactatcaatgggaaaaccttacttagagcttgcagagcacttgattttacagcaccaagtgcatcatgcacgaccactagatttctagctgctctatcaatgggcaaacacttgatctctgaagagcactcgatctgtacggcatggcacattggagtacaacattgaaatgctctgaaacaatgatggtccttcagaaataactagcaccgatgg

SEQ ID NO: 99304 - DNA, 321 bp, Zea mays
  Clone ID: MRT4577_22078C.1
ccggcacgcgcccgcggactgtaccggctggacccacccagtccgttcgattgttggaccaaggtgaactacctacttactgggacgagtatgagacatctagacggcggctatgcacggtaaggtggagcacgcgagcgatgggggggctggcgtcactcgaccgaggaggagcagggaccacactgattctgccacacatggagacatggaccagaacacttggggcatcctcatgagggagttcctatcttggtctttccgtgggcctatcaccactgaactgcttgctcccggtaatcatgttcaacaaggcttcct

SEQ ID NO: 99305 - DNA, 722 bp, Zea mays
  Clone ID: MRT4577_22079C.1
tatcgctgttgtctctgaggagaagaaaagacttgttgcttaccatgaggctgggcatgctttagttggtgcacttatgccggagtatgatccagtggccaagatatcgattattccacgtggccaagctggtgggctcacctttttcgctcctagcgaagagaggctagagtccggattgtatagcagaagctaccttgagaaccaaatggctgttgcacttggtggaagggttgcagaagaggtgatctttggagacgagaatgtgacaaccggagcatcaaatgatttcatgcaagtgtcgcgggtggctcgccaaatggttgagagattcgggttcagcaaaaagattggacaagttgcagttggtggagcaggaggaaaccctttcttgggtcaaagtatgtcatcgcagaaggattactcgatggcaacagcggatgtggttgatgcggaagtgagagagctcgttgagaaggcgtacgtgagagcgaaagagatcataacaacacaaattgatatcctacacaagcttgcacagctccttattgagaaagaaactgtggatggagaagagttcatgagtcttttcattgacggacaagccgagttatatgtttcttaaaatcaactaattggcttgtaataataccaattagcttcgatctatacatactgtatgttaatatacattgacatgttcagagacttttctttttctt

SEQ ID NO: 99306 - DNA, 295 bp, Zea mays
  Clone ID: MRT4577_2207C.1
agaagagctatgacgtcgcatgcacgcgtacgtaagctcggaattcggctcgaggtcgagttctggacacccctattgcggagaactcgtttactcgcatgcgcagtaccagcgggaatgaaacgagctcaagcccgtccgtgaacgcatgaacatgggattcctgctacttgcttacaaccagatctcaaataactcgggcatgcttgattacacttccgggggacagctcaaaatcccacttgtgattcgtggtccagacgacgtggatcgtcagcttggagccgaacactct

SEQ ID NO: 99307 - DNA, 661 bp, Zea mays
  unsure (1)..(661): unsure at all n locations
  Clone ID: MRT4577_22080C.1
tcgcggacgcctgggcacgcttaccgacgccacaacttgggccccccccatgggaccttggggtcgggccttccttggtccttcaacaaccggccgtcgcggggcttccccagaaatgggcagcagcgggcgtcgtcgtcgttggtctccttctnctnctcttnctccttcctcgtcggcaagacgctgctgaggcaggccgaggcagcccggccgtcgttcgccgtgcgcgccgcggcggattccgacaggccgatctggttccccggcagcacccctccgccgtggctcgacggcagccttcccggcgacttcggctttgatccctggggcctcggatctgacccggagagcctgcggtggaacgtgcaggcggagctggtgcactgccggtgggcgatgctcggggcgccgggtatcttcatcccggagtgcctgaccaagatcggagtcctcagcacgcccttctggtacaccgccggcgagcacgagtacttgcccgacaccaccaccctcttgatctatcgagctcatcctcatcggctggtacgagggccgccgttgcggtgacatcatcaagtgcaacagcgtcaagaccgatcccatcctgcacagcaacgagctcgtggtcaacgacatcgtggaccctgtcgtgctgtgg

SEQ ID NO: 99308 - DNA, 298 bp, Zea mays
  Clone ID: MRT4577_22081C.1
aatttcgatggcgcaccctttactatccacaccactaacgcggtggttcactcaatggatggcgaaaaccttacgcagataaaagcaggcattcgctagcgcttaactctcgctgccctacggatctgtttgggagtggataactcagtatggggcgcccgaagaaccaagatcaaaattattgagaactctaccaacccccaagtgaccttctccaaactccacaccggactggtcaataaggcacggaagatctcctttctatgaaacacctaagtccgcgtaatcatcttctcca

SEQ ID NO: 99309 - DNA, 2376 bp, Zea mays
  Clone ID: MRT4577_22082C.1
cattgggtccctcgaggccggccgggacccctcaccacagtctccagtctccactgcatctaaaaaaaaacgtaaaacccccaccacgccgtagcggagagaagagaagagaggagcgcgcgatcgatgtcgggctccggcgatcgtcgcggcggcgggcctccaggttcccatagtggctgggaaaccatggggaagaagtcgaagaaacccgggcaagccggggggagacagtgggcaccatggagttccacaaatgtgacacctaacacagcaagaccagcatggggtggcagtggttcctcgcacccttctggaaccagctgggctcaagctccagatcatggtgctgctaccagaggcaatcctagaccgccatcacaaacatcgcgccctgttctggctccacctctggcaaatggttggcagtggcaatccaggcctcgcccatctggatctgaagtcaagaaggatgatgctcctccatctggttctgtccctgaggtggagaatgttgatggcaacaatacatcagatgatgatgatgatgatgacgatgatttgagtgatgatatcagtgatgactatgattctgacgcaagtgagaaaagttttgagactcgaaaaacgaacaagtggttcaaagagttctttgaagtattgaatacattgagtttggaacaaattaatgaacaaactcggcaatggcattgcccggcatgcaaaaatggacctggggcgattgactggtacaaagggctgcagcctttagtgagtcatgctagaacaaagggttctacaagggttaaacttcacagggaattggctgcattgctggaagaggagctttctcgcaggggaacttcagtgttaccagcgggtgaacaatttgggaaatggaaaggactgcaagaaagcactgatcgtgagatagtgtggccaccaatggttattgttatgaataccttcttggaaaaagatgaagatgataagtggaagggcatgggaaaccaagagctccttgattattttggagaatatgaagcaagtaaagcacgtcatgcctatggtccctctgggcaccgtggtatgagcgtgttaatatttgaaagctcagctgtgggctacatggaagctgaacgtctgcataaacactttgttaatcaaggtacagacaggaattcatggcacctacgcaaggttcgatttgtgcctggtgggaaaaggcaactatatggtttcttagcaaacaaagaggatatggaggcatttaacaagcattgccatggtaaaagccgtctgaagtatgagatgaggtcttacaatgagatggtggtgattcaaatgaaacagatgagtgaagacaaccaacaactgaattacctgaagaacaagatggttaagacagagcagcgatctaaagcagtagaagaatcattgggtgttgttacccagaagctacgtgagactattgaagaaaatatatttgttaggagtaaagcaaaagagaagcacatggagtacgaggaagagatgaagtcccaggaggaaatttttcatggtctaattgaggatattcacaaggccacagaggataaagaaaagcagtttgagaagttgttgcaggaagagcgctcaaaggccagacgctttgatgttgattctggaactatgaaagatcgtcagctaaggaaggaatatgtgcagaagttcattgattgccaagtcaaggatgtggcagagtttgaagttgagcgagatgagctgatcaaagtccacgaggacaagaagttgaagctcaagaaagaatacatggatctggagctggagctggagaaggagtttgacgcagccctgacgggcctgatggagaagcataagccagataccttcgaggcctccagctcgtaagggggcttcagcggctaagcgctttccttaggccccagctaagcttggagcagtctcgtacatgctcctgcttgcttatccatgaaataatgcctggacagtctgtagatgttgcgaaaacatggtgccccctgtggttgccgcgtgtgtagtaagtatctctcagtcgtagtgtggttgaagcatctgaactcttgagcggtttgcctgtgatggcatatgggtcaaactacaactggagtgtgatatctagtttatatggtccagcgctcttgttgactgcgggtggtggtttgccccggataatttactgattatgtctgctccgatcgtcaaaaaaaaacattaagatttttttaaaaaaaaaaaaaaaaaaaaaaaaaaaaaaaaaaaaaaaaaaagaaaaaaaaaaaaaaaaaagcggccgacggatccagaggactcacgcacgcgtgcagtggggcg

SEQ ID NO: 99310 - DNA, 1826 bp, Zea mays
  Clone ID: MRT4577_22083C.1
aattatgaaattactatgttgaataggtaaaaagtaattagcatcattgtgtttcatagtggagtatgatgttcattgccattactaacagatacatgctgatattaatttatctgaccctgcataatggtaccctgcatacagatagtggctgggaaaccatggggaagaagtcgaagaaacccgggcaagccggggggagacagtgggcaccatggagttccacaaatgtgacacctaacacagcaagaccagcatggggtggcagtggttcctcgcacccttctggaaccagctgggctcaagctccagatcatggtgctgctaccagaggcaatcctagaccgccatcacaaacatcgcgccctgttctggctccacctctggcaaatggttggcagtggcaatccaggcctcgcccatctggatctgaagtcaagaaggatgatgctcctccatctggttctgtccctgtttattgaaatgtgaagccttccaagtccaagtggagtgtctttgaaatacagacatcaagctgtagtagttatgttgcatctaccgagcaggacgccgaagaatttaatagctaactatatttttatcttcactataatttcaggtaaaagccgtctgaagtatgagatgaggtcttacaatgagatggtggtgattcaaatgaaacagatgagtgaagacaacccaacaactgaattacctgaagaacaagatggttaagacagagcagcgatctaaagcagtagaagaatcattgggtgttgttacccagaagctacgtgagactattgaagaaaatatatttgttaggagtaaagcaaaagagaagcacatggagtacgaggaagaggtaataaggttacccaagtggttatattttctactaatgaacatgcgtggatcaacaattttcatctgtgccaatgatagagtttgctgtttcttggagggtcacacttatattttgcactttgatacttctgtgataagattgatgctgccagctttcaatttgaccacctgttgttgaccacttgaccttgatgttgccatctttcgatttcactacctgtcgttgaccttgtttccatgctttgcagatgaagtcccaggaggaaatttttcatggtctaattgaggatattcacaaggccacagaggataaagaaaagcagtttgagaagttgttgcaggaagagcgctcaaaggccagacgctttgatgttgattctggaactatgaaagatcgtcagctaaggaaggaatatgtgcagaagttcattgattgccaagtcaaggatgtggcagagtttgaagttgagcgagatgagctgatcaaagtccacgaggacaagaagttgaagctcaagaaagaatacatggatctggagctggagctggagaaggagtttgacgcagccctgacgggcctgatggagaagcataagccagataccttcgaggcctccagctcgtaagggggcttcagcggctaagcgctttccttaggccccagctaagcttggagcagtctcgtacatgctcctgcttgcttatccatgaaataatgcctggacagtctgtagatgttgcgaaaacatggtgcccctgtggttgccgcgtgtgtagtaagtatctctcagtcgtagtgtggttgaagcatctgaactcttgagcggtcaaactacaactggagtgtgatatctagtttatatggtccagcgctcttgttgactgcgggtggtggtttgccccggataatttactgattatgtctgctccgataaaaaaaaaaaaaagcggcctttttt

SEQ ID NO: 99311 - DNA, 410 bp, Zea mays
  unsure (1)..(410): unsure at all n locations
  Clone ID: MRT4577_22084C.1
ccggccgggagggacggcctcattcttatactcaatctcacaccgactcaaccgtatcaaacaatcagcgataatgggtcactttgacgcacgagtgcagcaacttaacatacactctgagactcaaaatccattgatcgcctttcttttggtgtagttgtgtcgtcttgagcgagggaaagtcatcagggttgaccatcaaggttcgcatatgtctatccgggttctcataactcagcagacccagatatgacaatttgcgttatattagtgacgagatggagatgtacatggttaatgggcgattaggagtgtatgaatcttgattntatattgtggtgctaaaagcacctttgtaggtagcaagtgatgattgaccagtgaaaaaaaaaaaaaaaaaacccgcggcc

SEQ ID NO: 99312 - DNA, 333 bp, Zea mays
  Clone ID: MRT4577_22085C.1
ctgtgcggcgctcgaggcggccggtcgggaaaaaaaaaaaaaaaatttctctcctctttgccggttattgttgtggtgtcccttgagaccgctttagaaaatgtccaagtccaagaaccacaccgcccacaaccagaacaagaaggctcacaagaatggtatcaagaagcctaagacctacaagtaccactccctgaaggggatggaccccaagttcctgcgcaaccagaggtacgccaagaagcacaacaagaagcaggagtaagctagcagcttcagcgtgctttaacgctttgacatgagctttggcggcctgtaacgcgcaatacttct

SEQ ID NO: 99313 - DNA, 473 bp, Zea mays
  Clone ID: MRT4577_22086C.1
gtcttggttgttgggctacatgcttaccctggtacatgtagcaggtcttgataccttgccagttctcaagagctaacttcataccctaacgttcaaaaaagggggctaggaaacatgcatctgggctgccaggctctgtatataaattgaatccaataaggccgcgataaggtcggtgggcaacccatagcatgggtaactaaaccctgagatctgtgtccatgactgccgcccaatgaaaaccgccgtcaatgctcgtaatgccacgaatctgattcaactgccatcacgtatccctatggtgagacgcgattcaacaagccattgctcaccctttaaaacaaaaacgtacgcgtccatgaacaccctagtcccctaccgcaccttgcaggcgatctacgtcaccaccttgggcttctcctcctcagctcctgggcgccatcaccatacggtagcacctgtgcgaaaaggac

SEQ ID NO: 99314 - DNA, 346 bp, Zea mays
  Clone ID: MRT4577_22087C.1
gccgttcttccactactcggacgaggtcatcgttgatcccgccaccaagcggggggttctctggctcaatggcgggcctgactgctcttcattctgtgatccgaccatagcaggagatatggtcgttcccagtggacacggatggcacgacactatgcaattccaaatccgcctgtaccacaagcacaaacttgctgtacctggagagccccacggtcgtgggcttttcgtacgccgccaactcgggcttgttcaaggtgatggcccgacaacataacccgcggacgaatcgttgacgtctctgcgtaagtggatatacctgtggccggcgtacaagggctgcaac

SEQ ID NO: 99315 - DNA, 261 bp, Zea mays
  unsure (1)..(261): unsure at all n locations
  Clone ID: MRT4577_22088C.1
gagaatngggnggnntngngnnngaattgtagtntggagaggngtnntagngangganngggnnnaagttttttggaaagggangnntgggagggtgagaggggggtnnggnttgtattttgtngnannangaggngnngtnaangagtngggttgtttgggaatggagnnnaaatngggnggtaaattttgtnnaaggttaaatanaggngagaganngatagngaanaagtanttgggggggnggnnngntngaagggn

SEQ ID NO: 99316 - DNA, 266 bp, Zea mays
  Clone ID: MRT4577_22089C.1
acaacacacttccgcgaactcttggtatacaccaaacgctgacgctagggtgcggggggccaatgaagtactatctggcaaacaagatagctgcagccgacactccactttcatttcattgcctccacgccattcctcgagtacaaccacgtgtatttctcgcagattcctcgcttctttattgtcaaaaaccaggtgtttaaaacaactgctgggctcacatctctgccagatttatatgcactttagaatgccgctgcggggaa

SEQ ID NO: 99317 - DNA, 4479 bp, Zea mays
  Clone ID: MRT4577_2208C.1
atggatcctaagggcaaggggatggtggtcaacgataaggagaaggagtccaccttcaacgagccaagagacgataagcccatcgactctggctcgagtcacaaaaggaaagatgggaagaagaagaggcgcatcaagaagatagtctactacgacagcgacgagtcttcctcttcccaaaaagacgacgacgactacgagaaaaagaaaacgatcaactcaaacttttcttttgattattctcgtattccgcataattcaaatgcacatttgctttccattcctcttggtaaacctccacactttgatggagaggactacggattttggagtcacaaaatgcgtagccacttattctctcttcatccaagtatatgggagatagtagataatggaatgcaatttgatagtacggataatcccatgtttatcaatgaacaaattcacaaaaatgcacaagctaccactgttcttttagcatccttgtgcagggaagaataccataaggtgagtggcttggacaacgccaagcagatttgggacaccctcaagatctcgcatgaggggaatgatgtcaccatgctcaccaagatggagttggtggagggcgaactaggaaggttcgcaatgatcaggggggaggagccaacccaaacatacaacaggctcaagaccctagtcaacaagataaggagctatggaagcatgagatggacgaaccacgacatcgtccggcttatgctaaggtccttcactgtccttgatcctcatcttataaattctattcgtgaaaatcctaggtacaccaagatgacgcccgaggaaatactcggaaagtttataagcaggcgaatgatgatcaaggaggcaagatacgttgatgaggcgttgaatggcccaatccacgagcctcaaaccgttgctctcaaagcaacaagtagcagggaggcgctacctagcaaggtggcacaaattgaggcggtcgggctaaatgaggatgagatggccctcatcatcaagcgcttcaagacgacgctcaaaggtcgcaaggagcatcccaaaaagagcaagacgaagggaaagcgctcctggttcaagtgtggtaagattggtcactttattgctaactgtcccgataatgatagtgaccaggaagaaggaaagaatgggaagagagagaacaagaaggtttacaagaaggctaagggcgaggcacaccttggaaaggagtgggactcggactgttcttcgtccgactccgacgacgaaggactcgccgccacggccttcaacaaatcgtctctcttccccaacgagcatcacacctgcctcatggcaagggaaaagaaggtaagcactcgtaatactgttacttacgcttcttcaagtgatgatgaatctagtgatgatgaagtagactatgctagtctattcaaaggtttagatagaactaaaattgataaaatcaatgaattaattgatgctttgaatgagaagaatagattgttagaaaagcaagaggatcttttatatgaagagcatgataaatttgtaagtgcgcaaaattctcttgctttagaagttaaaagaaatgaaatgctttcatgtgaattatctacttgtcatgagtctatttctagtctaaagggtattaatgatgatttacatgctaagctagaagttgcaaataaatctagttcttgtgttgaacatgttgtgatttgcactaggtgtaaggattttaatgttgatgcctgtagtgaacatttaaattccattgctagactaaatgatgaagtggctagtcttaatgcccaacttaagactagcaaaaatgattttgataaactaaaatttacaagggatgcctacactattggtagacacccctcaattaaggatgggcttggctttcaaagggaagccaagaacttaacaagtcaaagggctcccattcccaacaaggagaaagggaaggcccccatggctaatggtagtcaaaagaaccatgctttcatttatagtgataggaaattctctagaaatgcttgtaggaactatgcttatgattctcaagctatgaccgcttctagttcttctattatgcatggtagaaatatggctaagagaaatgttgttcatatgcctaggagttataatgcttttgactcacatgccatgattgcttcgacttcaaattttaatggtaggcctaggagaaattctatgtctcatgctcctaagaatattatcgacagcggatgcacaaaccacatgacgggggagaagaagatgttcacctcctacgtcaagagcaaagattcccaagattcaatcatattcggtgacgggaatcaaggcaaggttaaaggactaggaaaaatagctatttcatccgagcattccatctctaatgtgtttttagttgaatcgctcggatgttctgtctttagaaggagtgatggttcattagcttttaagggtgtactagacgacaaactctatttagttgattttgcaaaggaggaggtcggtctagatgcatgcttaattgctaagactagcatgggctggctatggcatcgccgtctagcacatgtggggatgaagaaccttcacaagcttctaaagggagaacatgtgttaggtctaacaaatgtaactttcgaaaaagatagaccttgtgcagattgtcaagcaggtaaacaggtgggaagtactcatcatagcaaaaatgtgatgaccacatcaagacccttggagttacttcatatggacctcttcggacccgtcgcctatctcagcatcgggggaagtaagtatggtcttgttattgttgatgatttttcccgcttcacttgggtattctttatgcaggataaatctgaaacccaatggaccctcaagcgcttcctaaggagagctcaaaatgagtttgagctcaaggtgaagaaggtaagaagcgacaacgggtccgagttcaagaaccttcaagtggaggagtaccttaaggaggaaggaatcaagcacgagttctccgctccctacacaccacagcaaaatggtgtggtagagaggaagaacaggacactcatagacatggcgaggacgatgcttggagagttcaagacgcccgagcggttttggtcggaagctgtgaacacggcttgccacgccataaaccgagtctaccttcatcgcctcctcaagaagatgtcatacgaactcctaaacggtaacaaacccaatgtgtcatactttcgtgtatttgggagcaaatgttatattctagtgaagaaaggtagaagttctaagtttgctcccaaagctgtagaagggtttttgttaggttatgactcaaatacaaagatgaagatgatgttccaacggccgcaatacgcgccatggcgattggagatgtgcgaccacaggaacaaaaggagcaagatcaaccttcttcctcaacaatggtgtatcccccaactcaagatgatgaacagggtagaagaggccttgctagatccggattgggtgttggccatgcaggaagagctaaataacttcaagagaaatgaagtttggacactggtgccacgtccaaagcaaaacgttgtaggaaccaagtgggtgttccgcaacaaacaagacgagcacgaagtggtgacaaggaacaaggctcgacttatggcaaaaggttatgcccaagtcgtaggtttggactttgaggagacttttgctcctgtggctaggcaagagtccattcgcattttgttagcctatgccgctcaccattctttcaggttgtttcaaatggacgtgaagagcgccttcctcaatgggccaatcaaggaggagctctctaaggcgctctatggacttaagcaagccccaagagcatggtatgaatgccttagagattttctaattgctaatgctttcaaggttgggaaagccgatccaactcttttcactaagacttgtgacggtgacctatttgtatgccaaatttatgtcgatgacataatatttggttctactaaccaaaaatcttgtgaagagtttagcagggtgatgacacagaaattcgagatgtcgatgatgggcgagttaaactacttccttgggttccaagtgaagcaactcaacgatggcaccttcatctcacaaatgaagtatacgcaagacttgctcaagcggttcgggaagatggatgccaagcccgcaaagacacccatgggaaccgacggacatgtcgacctcaacaaaggaggtaagtccattgatcaaaaggcataccggtctatgataggttctttgctttatttatgtgccagtagaccagatattatgctaagcgtatgcatgtgtgctagatttcaatccgacccaagggagtgtcaccttgtggccgttaagcgaatacttagatatttagttgctacatcttgcttcgggatctggtatctgaaagttgcctag

SEQ ID NO: 99318 - DNA, 388 bp, Zea mays
  Clone ID: MRT4577_22090C.1
cctacgcgtccggcatcataacccctagcgccgccggtctgttcagcctcgcaggagaccggctccagcccgagtgaccgctgcagactagggttttcggaggggatggcggttaagggagggaaggatctgatggaggccaatgacgacaggcgacaagagcacctatacggacactgacaggaagaatgtccgcgcgtaccgctctttccatgcatggctccacctgctgatggtataatatacaacgccagttcaagttgcgtgcatatgtactcggacggataagctgaaccactagagaggttctgaatccttactagatgatctaaccggctggggcttggaacagtgcgtgtcatggttaggctgcctgtactaattaatg

SEQ ID NO: 99319 - DNA, 216 bp, Zea mays
  Clone ID: MRT4577_22091C.1
cgacccacgccaccgcctcaacctagtctaaagtatggtaattaaacatctcgccactatgggcgccgaaatatctagtcgacaacactttcctgaaccgtggccataccatacctcgcacggtgaaataacaagcagagtgttgtgttcaactcatatgctatgtcaagagaattagcccaaggatctttatcctcgcaccgcatgagaggatgt

SEQ ID NO: 99320 - DNA, 636 bp, Zea mays
  Clone ID: MRT4577_22092C.1
aattaccgatcccgcgacccagccgacggttttctgttcccccctctgacctgtccctccatccctcctcaattctcctccccggcgcccgccgttgacgaggccccggaggaggaggactcgagcgcgccgccgtctcctgctccgccggctgccctcgcgtggagtttcacagggtgtggaggttgtgctaggaggactgcgaccatgaaggccctcattcttgtgggaggattcggcactcgcctgcggccgctgacgctcagcgtgcccaagccgctcgtcgatttcgccaacaagcccatgatcctgcatcagatcgaggctctgaaagatgtgggagtcacagaagttgtcctggccatcaattaccagccagaggtcatgctcaactttctcaaggacttcgagagcaagcttggcatcaagatcacctgctcccaggagacagagccaatgggaaccgccggaccgctggcccttgcccgcgacaagctcgacgacgggtccggcgagcctttcttcgtcctcaacagtgacgtgatcagcgagtacccgttcgcagagctcatcgagttccacaagtcccatggcggcgaggccacgatcatggtcaccaaggtggacgagccttcc

SEQ ID NO: 99321 - DNA, 267 bp, Zea mays
  Clone ID: MRT4577_22094C.1
atccgtctcccggttcatgccatccccatacggccactaactcctacattccacagatgcgtttccgtagcaattccttgcctggtgggaaactcagggcagatttgaagactgccggcaaagatccagcgaggaggtggcgtatccatcccaaaatcgcaacatctggactaagggaaggagctgaataagcacgtatcaccctcgtcgtcctcgccgccaatgcctccacggccgaggcggcactcgtcgtcgcgcacaagaatg

SEQ ID NO: 99322 - DNA, 557 bp, Zea mays
  Clone ID: MRT4577_22095C.1
cgataaaaaaaaaaaaaaaaaaaaaaaaaaagaaaaaaaaaaaaaaaaaaaaaaaaaaaaaaaaaaaaaaaaaaaaacaaaaaaaaaaaaaaaaaaaaaaaaaaaaaaaaaaaaacaaaacactagaacgaaacaaaaaaaacaaagggggcggggggctaacccgggaccctactccaatcttccccgcgcttgcgagaaggatccccgctttcgtcttaggtgcccctcaaatcaatagaggaccccccccgggtttccccatcccaacagcctgggcaaaacccgagtggctttccccgcacttctccctgttgccggcaacaatccccttctccggggtgtggttggtaacaacgcaggggcccccgctccgctggccttccccctcacgcccgctccttaaagtgcattgcgtcccctccctttccccgccccttaaccccccccgtttggctgtaaacccccggctgcccctttggctttgataaagcccttaacccgccccttttccctttttccccgttttttttgacagttcacgcccttttcccccg

SEQ ID NO: 99323 - DNA, 166 bp, Zea mays
  Clone ID: MRT4577_22096C.1
tagactttaccttagctcagactcgctatctgagcttctttcgtgactttattattataaggagagggtttcattacgccgaagctcggtgaccatgtttttgaaatactgaaagtactatgataagaacagttgccatttgctgtgatcaacatggaatttaata

SEQ ID NO: 99324 - DNA, 390 bp, Zea mays
  Clone ID: MRT4577_22097C.1
ctattagattgggtattatatgcattatttaacacttacatggatttataccttttggtcccaaccctaaaataaccttttttttttaaaaacgaaacatcattgcaaatccccaatattccctgaccaattttatttatatccgaaaacaaaggcccttactaaacaaagcacttaaccctacggttcttaaacgaaacaaactttattcaatcaaatagctgggacatccataaaattggacagccgactaaacaaaaaaaagtttttacatcattttaaaaataaaaaaaacacatcaatggttgtatttacatgtaacgatttatgtggataatcttcctaaaaaatttcccgaactcaattttagaaattttcaactaaaacacc

SEQ ID NO: 99325 - DNA, 244 bp, Zea mays
  Clone ID: MRT4577_22098C.1
ctgccggcctgccggatctgacatgattctggctttggcttcgactttgtcggccggtgccagctgctggtttctcttcgctggaatccccctacagcgagctggaactgcagccctgtgcacatactgctgaccgatcctagactgctaggctgggtagagcaggaatggcagcatgcagctaaggctattaccatggagcgaggaagaataacgactccattattaaaagcacgcgcggtct

SEQ ID NO: 99326 - DNA, 478 bp, Zea mays
  Clone ID: MRT4577_22099C.1
tcgcggatctagactagtccctttttttttttttttttttttttttttttttttttttttttttttttttttttttttttttttttttttttcccccaaaagaagataaaatccctccctacaaatcctcgtcgggatttccaggaaaccagccccggggggggggggccttctttacccctttccagtggttcctttacagggcccgcggtcgaagcccaggcccccccccggggggggcttacccatttcccaatccttgccccaggccccgggaggccgagaaaagaaacaaactctttcacagggccccaacctgtcggttgcgggggccctgaaaaggcccccgggggtcatggtttttttgccacgttctccttttccttttggccctggtcctcctggggggggggggcgtcctggtcctgttggtcctcggcgaccaggtcgttctttttgctctgggcctcggtaaact

SEQ ID NO: 99327 - DNA, 161 bp, Zea mays
  Clone ID: MRT4577_2209C.1
cccaccctttccccctttcctcctaacccatttacaatccaattccagacccctagcccggggggacctttacatctaagcgggagttactacttacacctactgaacctactccaacctatctttcccttaaaacaagctgacatctacccaaattatca

SEQ ID NO: 99328 - DNA, 980 bp, Zea mays
  Clone ID: MRT4577_220C.1
cccattccgtcgacaccatgagggagtgcatctcgatccacatcagccaagccggtatccaggtcggaaacgcgtgctgggagctttactgcctcgagcatggcattcaggctgatggtcagatgcccggtgacaagaccattgggggtggtgatgatgctttcaacaccttcttcagtgagactggtgctgggaagcacgtccctcgtgctgtttttgttgaccttgaaccaactgtcattgatgaggtgaggactggcacctaccgccagctcttccaccctgagcagcttatcagtggcaaggaggatgcagccaacaacttcgcccgtggtcactacaccattggcaaggagattgttgacctgtgccttgatcgcatcaggaagcttgcagataattgcactggtctccagggcttcctcgtcttcaacgctgttggtggaggaacgggctctgggcttggttctctcctcctggagcgcctgtctgttgactatggcaagaagtccaagctcggtttcaccgtgtacccatccccccaggtgtccacatccgtggttgagccatacaacagtgtcctgtccacccactctctcctcgagcacactgatgttgctgtcctgctcgacaatgaggccatctatgacatctgccgccgctcccttgacattgagcgcccaacctacaccaacctcaacaggcttgtctcccaggtcatctcatccctgacggcttccctgaggttcgatggtgctctgaacgttgatgtgaacgagtactagacgctctactggcgcggcgtcgtcgggcttgtgtgccactgctatcctgtgatctgccctgagtggctcctatcgtgttatgtttctgtcggttcttatctatctgtcgttgtgtggtttacaacttacgttgtaagactttattcccccgctttgctactgggttattaagtttggcgttatgttttcttgatc

SEQ ID NO: 99329 - DNA, 506 bp, Zea mays
  Clone ID: MRT4577_22100C.1
atggtttggaaaatgtagtattataacgacaaatgaagtttcgacatcatgctcttccagtcaatcgaattacaggctgatctcaaattgcaatacacccttaaccatgaagttcgttgtaaacacttttaagtagacaggtatcaacactctagcactcatttctttccccgactaagagccttcttcttgcgcatcactcgagtccgcgcaatcaatctgtgcttcatctcggcatctgtctctggcttccggccaccctcttcctcggcctgcttactgcctctgtccttaccacccttatgagcctcatcacccctatcgcccttgcgtccgcgcttcttgtcatccctggtatgctgagcatttgtcttgggctgagcttcagcctttgcacccttgttatgttctgggttgagttgcctagacctctcctcgttggcacgtcgtcgttgaacaacttgggcgttctcgatagcgaactcaacgaccagtctctgtttctt

SEQ ID NO: 99330 - DNA, 344 bp, Zea mays
  Clone ID: MRT4577_22101C.1
aatatgaatttccaggctgaagcaaactggatttgaaatccaaatattcgaaatttctggatatgcttccagaagttttatcttgatgggacactggctctgctttacaatccttggcagactggaaaatcatttttccaaagctttcttcataagccttttttgcaagggaaatgcaggcttcacgggcagccatgggctggttgctcacgagcaagagcccagacggagactttacgggccgatacacacttgagttataggggaagcctaatttacatggaccccttattggagacattacgggccgatacccacttgaggtttagggcaagcctaattta

SEQ ID NO: 99331 - DNA, 295 bp, Zea mays
  Clone ID: MRT4577_22102C.1
ctcccttttttttttttttttccattcctcagcttcggaggcatatttaatacggtttatataaaaactgaaatccatgatgaaatacagcatataataggacatctattggcgattttactcattcttgccccccaactttttccctccaagaaaaccctcacttccttcctggaaaacacataaaccccctacctccatggcatgaacaattttaatttccattcacaccctaataaccgtgcctaaatctgccctccctctgaaacaaaaaaacctgattttccctcttttc

SEQ ID NO: 99332 - DNA, 565 bp, Zea mays
  unsure (1)..(565): unsure at all n locations
  Clone ID: MRT4577_22103C.1
tttttttttttttttatttttctattaaaaatcaattcttaaactgaattatctgatttttctgctctctggactacgcggcaaataccaaagagtttcggggctaatctataaaaattccccagactcagacttcttccaggtggaccgcgggtttgattctgtgaagttcagggacttatttgtaaagcgcctgcgccgaagtggtatcccagcatgtggattgctggatcgacagttcacgacgcggattaaaaggccgagccaaacgagccagtatcctattgatcaattcctagccgcccatcccgtgatctacgaccacgattttaaattacaagatttagcagtacgcgtttgatctcagatcgacgacccgcgtccatccaggccgaaatagtacaccattgatttaatctagatcgttgatttcttgatccacaanccatgacttcttcttctacctcccgactcggctgggcaacgacgcctcgcctcagggcaatgtccccaccggaaccagacgaaaggcccccggacgcttgcaacacggcgacaggggatg

SEQ ID NO: 99333 - DNA, 1554 bp, Zea mays
  unsure (1)..(1554): unsure at all n locations
  Clone ID: MRT4577_22104C.1
gccggccggtccgggcccaccacttgcattcacacactctattccgctgctctctccctcttcctctcccccgcggcggagccataaaccctaggcctcgccgtcgtcggaggcgccgccgcgatgtcgcactttggaaggacgggtccgccggacatccgcgacaccttctcgctgctcgtcctcaacatcagcttccgaaccacggccgacgaccttttcccgctcttcgagcgctgcggcaaggtcgtcgacgtcttcatcccgagggaccgcaggcccggcgtctcgaggggttttgcgttcgtgcggtacaagtacgccgacgaggcgcagaaggctatagatcggctcgatggccgtaatgtggatgggaggaacatcatggtgcagtttgcaaagagatgatagaaggcgaagtcgcagcaggagcaggagcaggagcagagaaagacatgtccatgatagagatagggactatcgtcgtcggagcagaagtagaagccgaagtatgagttcaagccctggccacaaaagtcatcgcagagcaagagatgatgttaagcgcaagagcagaagcaagagtagaagcaagagcaggagcaggagtagaagccgctcataccacagttcttcacctgcccggcgcagtgctagccctcccaagagcccaccgccacagaggagccccactcctgaaaagcatgccaatggaaaagattcacctctgtcacgcagtgtatctccatccccgaagcgtgcaagctcccgcagcccaggcagcgatagcaaggaataaagcttgttgatctggtgatgcttaaagagcagtcttcccatgggattgcagaacgttgagaaggctgtttgaacatgatggcagtagcaatctgcaatcaaccgctatccaaggttgctagttgttcttttaatgacttctagaattgtgttttccagttgtcaaaatatgctgttggtttgtatttcgacctctattgtcttttaatacccttgtactgcatcatctactttatgtgcatccgtttcttgactccatattaatttgttaaaacatttgtgcattttctagttaaaaaaaaaaaaaaaaaaaaaaaaaaaaaaaaaaaaaaaaaaaaaaaagaaaaaaaaaaaaaaaaaaaaaaaaaaggacgggggaccgagttcctcttctgngaaaaacctgaagggatcaatcacactgaaagcccgcacaaggatgcatgtagagggcccaatttaaagtacccagatccccattacaatgaactgaccacaatttaacaacgcggggattgaaaaaaccctactggaaaaaaccttgaaggccctaaataaaatcccttttaacacatctgccttattacagaagaggccctaacgaataggccttcccaacatggcccttccaataaatggcaaatgcacacgccctaaaggaccccctttaaagcggcgcattaagcgcttacgcgcagggggacccctacatttggcagcttactattgccagcgccttagggtcagttcctttcc

SEQ ID NO: 99334 - DNA, 1319 bp, Zea mays
  Clone ID: MRT4577_22105C.1
cattgggtacctcgaggccggccgggccggggattgtcacgtaattcgtttccctgtcctccccctctcgctgagctgagcccacctactccctcccaccacttgcattcacacactcgattccgctgctctctccctcttcctctcccccgcggcggagccataaaccctaggcctcgccgtcgtcggaggcgccgccgcgatgtcgcactttggaaggacgggtccgccggacatccgcgacaccttctcgctgctcgtcctcaacatcagcttccgaaccacggccgacgaccttttcccgctcttcgagcgctgcggcaaggtcgtcgacgtcttcatcccgagggaccgcaggaccggggactcgaggggttttgcgttcgtgcggtacaagtacgccgacgaggcgcagaaggctatagatcggctcgacggccgtaatgtggatggaaggaacatcatggtgcagtttgcaaagtacggccccaatgctgtgccaatccacaaaggaagggtcaaagagggggttgagaaatcaagagacaggtcaaggagccgtagtccaaggccaaggcacagagacagagatgatagaaggcgaagtcgcagcaggagcaggagcaggagcaggagcagagaaaggcatgtccatgatagagatagggactatcgtcgtcggagcagaagtagaagccgaagtatgagttcaagccctgaccacaaaagtcatcgcagagcaagagatgatgttaagcgcaagagcagaagcaagagtagaagcaagagcaggagcaggagtagaagccgctcataccacagttcttcacctgcccggcgcagtgctagccctcccaagagcccaccgccacagaggagccccactcctgaaaagcatgccaatggaaaagattcacctctgtcacgcagtgtatctccatcaccgaagcgtgcaagctcccgcagcccaggcagcgatagcaaggaataaagcttgttgatctggtgatgcttaaagagcagtcttcccatgggattgcagaacgttgagaaggctgtttgaacatgatggcagtagcaatctgcaatcaaccgctatccaaggttgctagttgttcttttaatgacttctagaattgtgttttccagttgtcaaaatatgctgttggtttgtatttcgacctctattgtctttttatacccttgtactgcatcatctactttatgtgcatccgtttcttgactccatattaatttgttaaaacatttgtgcatattttctagttatctgttcgtgagatgggttgctgtttactggt

SEQ ID NO: 99335 - DNA, 510 bp, Zea mays
  Clone ID: MRT4577_22106C.1
ccggccgggctctccctcccttcctcttccatccacacgagagcgagaaggagtttatcacgaccgcttgaggtactcgtcggccagagtatgggtctccacgcaggcgtcctcgtgttccttgcggccgtgctcaccgccgtcctcagtttcatcgctgctgcagcactcatctcaaataacgcactggtggaacgcggaaaccataccaccgggcggagactgttgcaggccaataaagattgcccggtgagattctaaggcaccaactacacggcgatctacgacccgctggtaagggcccgatgtaccacaccgacgatgagatggggtgcgctaaaagacttctcgagaccttactccacctacatcaactatgtgaggaccaactgcactgccaccatgttcatgatacatacaacctctacggctagtactcgccgtcgctcttcgccaatacctgcgaagacgtggacaatggcctcacgtgatccgaggacaccccgcaca

SEQ ID NO: 99336 - DNA, 627 bp, Zea mays
  Clone ID: MRT4577_22107C.1
ggaccgtccatcagggccgggccgcaccatcgccccacgcctcttgctgtcgtctccctgcaccgctcggcctccgctaccagtcgtgcccccccccccgtcgcctcataccgctctgcaacccgcacatcatctgctgcccctatggctgccacgcgtgagtgccctagtgaagtcgaccaccctttccccaccgcctttggtcgtatccctctgccctgcctctccgccaggcctctattgccccctcctccgacgcctgcagtggaaggtaaggagaaggacggcggtagccggatctggtgagcacgcgactgcaccccgcctgtggccaggcggcgcccggattcgcgtcgctttgcaaccccccgcgagtaggtctattccagggacaatcggatggctgcgcatcgcctggaggctggtatgttgttgcgctagaactcttcaaggcagtttctggaagaacatagcctcattttccaatagggcaatgattaatgagtatgacgaactaatggacacatgtcattggattatggcattgttggttgcataacaaacaatacgggtaattcatattgtgttcactgtttgaaaaaaaaaaaaaaaaaggcccctagggcc

SEQ ID NO: 99337 - DNA, 1530 bp, Zea mays
  Clone ID: MRT4577_22108C.1
cattgggtacctcgaggccgtcggggcggccggagggagccacgcttctcccccccaccacttgcattcacacactcgattccgctgctctctccctcttcctctcccccgcggcggagcgataaaccctaggcttcgccgtcgtcggaggcgcccccgcgatgtcgcacttcgggaggacgggcccgccggacatccgcgacaccttctcgctcctcgtcctcaacatcagcttccgcaccacggccgacgacctcttcccgctcttcgagcgctgcggcaaggtcgtcgacgtcttcatcccgagggaccgcaggaccggggactcgaggggtttcgcgttcgtgcggtacaagtacgccgacgaggcgcagaaggctatagatcggctcgatggccgtgatgtggatgggagaaacatcatggtgcagtttgcaaagtacggccccaatgctgagccaatccacaaaggaagggttaaagagggggttgagaaatcacaagacagatcaagaagccgcagtccaaggccaaggcacagagacagagatcatagaagccaaagtcgcagcaggagcagagaaaggcatgtccgtgatagagacaggggctatcgtcgtcggagcagaagtagaagccgaagtcttagttcaagccctgacaacagaagtcatcatagagcaagagatgatgataagcgcaagagcatgagcaagagtagaagcaggagcaggagcacgagtagaagccgctcatactacagtgcttcacctgcccggcgcagtgctagccctcgcaagagcccaccgccacagaggagccccactcctgcaaagcatgccaatggaaaagattcacctctgtcacgcagtgtatctccatcaccgaagcgtgcaacctcccgcagcccaggcagcgatagcaaggaataaagcttgttgatttggtgatgcttaaaaaacagtcttcccatggggcaaaatgattggaggactttgagtgggatgtttgaacattatgaaagcagcaatctgcaatcaaccgctatacttggttccgattcttctatccatgtttattagttgtttttttaatgcgttctagaattgatttttgtagttgtcaaaatatgctgttggtttgtatttcgacctctattgtctttttatacccttgtactgcatcatcctctttatgtgtttctgtttctttactccatcttcctctgtaaaaacatccgtgccttgaatctgttcgtgagatgggttgctgtttactggtaaaacggtattgcacgggaccaactatggtggatgatgtcttgctgtcattggtgttgatatggcaatggtgcagctgatgtgacgatgccgatgccgatgctgctgacagtgaccatcttgtttgcacaatgatcccttacaagttatgttggttcttatcgccccttctcgcagatgcttttgcatcagtgctagttggaacatggtgttgaggggtcaattatgacgggcatgggtcctgtttatc

SEQ ID NO: 99338 - DNA, 1781 bp, Zea mays
  Clone ID: MRT4577_22109C.1
cattgggtacctcgaggccggccgggaagttaaagctctccctctcgctgagccggctgttgctctccccacaaccccgcgcgcgggggagcgataaaccctagtcttcgccgtcgtcgcaggaggacccgcgatgtcgcacttcgggaggtcaggcccgccggacatccgcgacaccttctcgctcctcgtcctcaacatcagcttccgcaccacggccgacgacctcttcccgctcttcgagcgctacggcaaggtcgtcgacgtcttcatcccgagggaccggaggaccggggactcgaggggtttcgcgttcgtgcggtacaagtacgccgacgaggcgcagaaggctatagatcggctcgatggccgtgatgtggatgggagaaacatcatggtgcagtttgcaaagtacggccccaatgctgagccaatccgcaaaggaagggttaaagagggggttgagaaatcacaagacagatcaagaagccgcagtccaaggccaaggcacagagatagagatcatagaagccaaagtcgcagcaggagcagagaaaggcatgtccgtgatagagacaggggctatcgtcgtcggagcagaagtagaagccgaagtcttagttcaagccctgacaacagaagtcatcatagagcaagagatgatgataagcgcaagagcatgagtaagagcaggagcaggagcacaagtagaagccgctcatactatagtgcttcacctgcccggcacagtgctagccctcgcaagagcccaccgccacagaggagccccactcctgcaaagcatgccaatggaaaagattcacctctgtcacgctgtgtttctccattaccgaagcgtgcaacctcccgcagcccaggcagtgatggcaaggttagattgatgtctaactgcttgctatgtagtttgttgcccatgcatttgtttatgtagcttactcttgaaggcaattcacgtcaggagtaaagcttgctgatttggtgatgcctagaaaacagccttctcacggagtcacgggattgcagaaccttgagaaggttgattgagcacaatggaagtagcagtctgcaatcaaccgcgatccaaggttgctagttcttttaatggcttatagaattgtgttttccagttgtcaaaaatatgcgctggtttgtatttttggcatatactgtgtttttatacccttgcactgcatcatctactttatatatgcatcagtttctcgcatatgtttggtacggtattgcacgggaccaactatggtggatgatgtcttgctgtcattggtgttgatatggcaatggtgcagctgatgtgacgatgcagatgccgatgctgctgacagtgaccatcttgtttgcacaatgatcccttacaagttatgttggttcttatccccccttctcgcagatgcttttgcatcagtgctagttggaacatggtgttgaggggttaattatgacgggcatgggtcctgtttatcatgtggtggtgttgagtgactccttttgctatctgtggccctagctttattcattattgtaagcaaccattaataaaatccatgaactcaattattaatttgttagccgaaacgctatatacaggtgacgttgtagtcgtaagcatgtagcaatgtattgactttttggtgattgaattgatagttttttgatgtggtggtgttttgtgggggggtgtgggtgtgtggtccttgttatatttatttttttaagcaaccattattagaattcatgaactc

SEQ ID NO: 99339 - DNA, 693 bp, Zea mays
  unsure (1)..(693): unsure at all n locations
  Clone ID: MRT4577_2210C.1
tcgggnactggcgtcatacaatggtctacagccagnccagctagnaggagaatgcaagaaactgaagcttctcaaatatctgagcctcctgccagatatcatcactcaagttccaagctcaatgtctaatttgcagtgcttggagacactcgaggtgggggaggtcaatggcagggcggcagttctggtgcctatccaagtcttggaactgccacgcataaaacacctaatcggaaaatttgagcttattgacaacttcaacggactaccaattagggcttatccagatgcactagtaccaaaggcaatcaaggaaagcaacctggagacggtgtcggggttcttcacccgcagaggccaaggatttccgccactcatgcgtcacattaggcagctcaggaaggtgaagatatggttctacagggatgcagaacccaaatacctagcaagctatctcccgaaagcgattacaaaattcctcaggaatgacaacgttcatcgctccctgtcacttgacttccaggatggcccaagacaaacagaaatactgcaggcttgtgtggctgaagctagcggtaatctttactccctgaagctgtcgtccggcacaaatctgagcacgatccaactgtcggttattgccaccaacaagctgactggaatcacaaagctatgcctttcccgctggaaaac

SEQ ID NO: 99340 - DNA, 218 bp, Zea mays
  Clone ID: MRT4577_22110C.1
gttttgctgagagggacaagagaaggcgaagagagaaagtgtgctgtggagcgcaggcgctgccgatggagatgacatgcttgaggcagcagcgcatatgggctcaaaccataagcgatgaaggaactggggagagcggcgaccactactcgtatttgaatgggaccttgagcgctcatgctctgcctctaggggctagaaaccctggagtcgcgcgt

SEQ ID NO: 99341 - DNA, 3574 bp, Zea mays
  Clone ID: MRT4577_22111C.1
gtcctcgcgcagttgctcgccgtggagggcatctgtcacctgccgtcctcgcccgacctcgaccacgtggcggcagacttcatagacgctgcgcggtcgtacccgtcggcgctcgccaaccgctgcttcgccttctgccccacggacgcacagctgtcagcgaagaagagggacgatattattatgttccctccttctgatcagcaatcgctggaacttcatatgcttacaatgatccaagatctcgctgcttctttgttgatggagtttgagaagtgggtcttgcgtgcagaatccacaggaaccattttgaagacccctttggattcacaatccagtcttggctcagaggaggtaattaaggctaaaaaaagaaggcttggtcgtgcacagaagataataggagattattgcctcttggctggatcacctgtggatgctaatgcacattacaccaccgctatagagcttgcaagatggaccggtgatgttttctggcatgctggagcccttgagggtagtgtctgtgcattagtggtggataggatgggtcaaagtgaccctattttggtgcatgatgtcaaatatcgctattacaccattatccagctatacagaagagccactttacaagataatgctcaaagagtttcacctgtgagctttgagcttgaagctgccttgaagttggcaagatacttgtgcaggcgagaacttgccaaggaggtctcagatttgttaatgggagctgctgatggtgccaaggctcttattgatgccagtgatcggctcatactatatattgaaattgcaagactttttggtacacttggttataagcgcaaggcggcctttttttcaagacaagttgcacagttgtaccttcagcaagacaatgcatatgctgctatgagtgctatgcaggttctaactatgactacaaatgcataccatgtccaaagccgaaagactatgaaaatgaatcatgatccgtccaaggaacctcgtgctggcaatactgattctggaaaggtgcaccctcagtctatagtgtcattgtttgagtcacaatggagtacccttcaaatggtggttctaagagaaatattgatatcgtcgatccgggcggcagatccactctcatcatggagcgctgcagctcgtcttcttcgatcattttacccactcatcacaccagctggtcagagtggcctagcaagctcacttgcaaacgctgctgacaagcttccaacaggcacacgctgtgccgatccatgtcttccttttatcaggttgcattctttcccgcttcacccttctcaaagggatatagtaaagcggaatccacataaaaaggagtggtgggctggtgcaggtccttcaggacctttcatttatactcctttcagcaaagcaggagcttctgggacttccaagcaagaggttagttggattgtgggggagccggttcaagtcatggttgagttagcaaacccttgcagcttcgacatagttgtggagagcatctatctctctgtccattctgggaattttgatgcctttccagttagcgttagtcttccacctaacacttcaaaattagttttattatctggtattccaacaaaagtcggacaaatatcaattcctgggtgcattgttcattgctttggtgttattacagaacacctattcaaagaggttgattgtttgctccttggagctgcacaagggcttgtcctttctgatcctttcagatgctgtggctctagcaagttcaagagtgtcaactttcctagcatttctgttgttcctcctctgccattgttaattgccaatgttgtgggtggagatggttctattcttctttatgaaggagaaattcgtgatgttctgataacactgacaaatgccggaaccgtaccagttgaagaagcaaatgttgcattgtcagggaagaatcaggattctgttatttcgattgctcatagcacatggaaatctgcgctccctattaaaccgggtggagaagtgacatttgcagtgactctaagagcctggcatctcagctcagcagatttggaagcagatggcagtagatctcctgtaaattcaaggagaatagcaagagaaggaatcaatccattcttggatattcactatgctggtcctgctgcgaatcttgagaatggagatgtttctcttctacctggaagacgcctagttgttcccttgaatatctgtgttgtgcagggcatgcgtcttgtaagagcacgcccacgcgtccgggaaatacctgctcgatttactgaaacacacttaaaacctgtcagtggcaaagacataaacttattgaaggttgatccctataaaggaagctgggggctccgccttctggaacttgagcttttcaatcctactgatgtcgttttttatgttgatgttgctgtgcatttggatgacacggatgtggaccaagaagtaatttcagacggggatgctgcttgtcacaaaactagaattgatcgggactactctgccagagttctcatacctcttgagaacttcaaattgcctgttcttgatgcttccttctttgtaaaggcaagtagtagtgatgaacctcttggatccagggccgccgccatagcagaaaggaatgccaaggcagagctaaatgcgtctatcaacaacttgatttcaaaaataaaagtgaaatggcactctgggagaaatagctcaggtgagctgaatattaaagatgctatccagacggcactacaagcatctataatggacatactgttgccagatcccctgatgtttagctttaagcttgttacgaatggaactgtggtcaatgtcgattctccaaaggattctggcaatgttctgaggtgcaaagatcctatatctgctcatgaaatgacccatatggaagttcagattcgcaacaacacaaaggaaattatccggatgaaccttagcatttcatgcaaagatgttgctggagagaattgcttcgatgaaaatagtgctactgtcctctgggctggtgttcttagcgatatacacctggaagttccaccgttgcaagaggtggtacatcctttctccatgtatttccttgtaccgggtgactactcgctccaagctgcttctgttataatcgatgccacagacgttcttcgtgctcgtgcaaaggcggagtcaccagatgaacctatactgtgtcgcggatccccattccatatccgggtagtcggtacagcataggcagttcttctgagttactcctagtctagaggcctcattttactgtgacaattgtaggtgtggaaaatcttgtacaagagtgatccctggcgccctgcccctcatgcgatatgttttttgtcctttttgtaggcttctttgtaagtcatgtcatgtacagtgtacaagcatagtgagtattgtttcaagcacagaaattgtatgtcgatgattccacaatcttaatttctggtcagcttatatgattttacttaataaaaaaaaaaaaaaactcgagactagttctcttctctcgtgc

SEQ ID NO: 99342 - DNA, 902 bp, Zea mays
  Clone ID: MRT4577_22112C.1
gataaccagcaggatataaaatgtaaccctcgttatcttgtgcctgagagccttgcccttaacaaaattggacaatctcttagggcattaagcttgacattgtctccctgttggaagccaatgccatccttaatgccagggcgtctcccattatagagcatgcttctagcaaatttaaatttttcattctctatctcatgttcattgattttactagttaattgtgttatgtgatcattttgttctttaattaaagctaggtgatcatgaatagcatcaacattaatatctctacatctagtacaaatagaaacatgatcaacactagatgtagaaggtttgcaagattttaattcatcaatcttagcatgcaaaattgcattctcatttctaagattggaaatagagacattgcaaacatttaaatctttagccttagaaattaatttatcattctcaatcttaaggctagaaagtgattcgttcaaattatcaatcttagtaattaaactagcattatcatttttaagattgacaagagaatcatcacaaacatttaacttctcaaccttagcaatcaatttgacattttcaattctaaggttggagatagtgtcatgacaaatgctaagctcactagtcaatttttcatttttctctacttcctgagcataagcatttttaactttaacatgctttttgttttccttaatgagaaattcctcttggctatccaagagttcatcattctcatgaatggcacctatcaattcattcaatttttatttttgttgcatgtttaagtttgcaaaaagggcaagcaaatcatcttcatcatcactagagcttccttcatcactagatgttgtatatttagtggaggctctagagtcgacctgcag

SEQ ID NO: 99343 - DNA, 153 bp, Zea mays
  Clone ID: MRT4577_22113C.1
ttgtgttctactcgggctcagggtccggctcagggccaatttaagaactcggtttcggttcctccaggtttatctgttggcatcttaagctgagtcaggatccttttttcacacacttaacccgtctctacttctactattctctatttccta

SEQ ID NO: 99344 - DNA, 406 bp, Zea mays
  Clone ID: MRT4577_22114C.1
tctttatcctccatacctcttattagctgcaaatccaatcctactgcactatccaaatacccatacgcactactactccttgatgattctgcatcaatgtactcgactattcacctttatctgtcatgtttatgatactcatttctcgttccaactacataaatgtgcgtcgtcaccatattcccttcctactctcacctatcctttactactcactactaacgattgtccactttgccatcaacatttgttctctttcctgcacctgtcacctaaaatccttaatcacaaccctattatttctgcactgcacatcctgtatatgtatagtttcatacttctgcatgacttccactaaaaaaataatactccttattagagctgtttttctctatttctcactgta

SEQ ID NO: 99345 - DNA, 402 bp, Zea mays
  Clone ID: MRT4577_22115C.1
agcccacgcgtccggggacgtggacctgggcaaggtgtcgccatacatcagacgctgcgtcgacgttaagtacggcataaatcttgtcaatgaaagcagcggacagtggtaacatttgtctaacaaaaatggctacatcatagcgcttagttgcaaaaagattctcaaaatttaagcactggtattttccaaaacaggagtcgacaggtgattcaaatgtcaggaatccaaagttctttgagacattgcttgtgatggattaggcaagaatttaatagctacatcattccaatttctaacaaaccagcatctgttgatgcagtgaaatctcagaagcaaacatatgacagtatcgtgcctggaaaattgttacagaatggctaaaaataagccagttaacag

SEQ ID NO: 99346 - DNA, 299 bp, Zea mays
  Clone ID: MRT4577_22116C.1
tagacaatccatgctagtgggacagaaatccagcatagcttgttcccgaaacagaattccttattactctgttgtgatcattgccaatgggaaaagcacatgctatctcaaggtattgatagagccccacaattgttctgagggctacttattttcaatgcctccataatagtagaataaattaatttggaatagcgaacaagatcttgccagaagctaagacaaggattaatatgataaagaattcaggaaggatatacttatattgacgcaatacaaagataggtatatgctaaatc

SEQ ID NO: 99347 - DNA, 577 bp, Zea mays
  unsure (1)..(577): unsure at all n locations
  Clone ID: MRT4577_22117C.1
tcgagccggccgggaactaatacaaaagcggaggggancacgagtctcttcctccgtccgcgtagctctcggcttcggcagatgtcgagggcgcgagcaagggcgggcgaggggctgggcaagggcggcgccgagcgccaccgcaaggtgctgcgggacaacatccagggggtcacgaagccggcgatgccgtacggtgcgcaggaggggcggcgtcaagcgcatttctgggctcatctacgaggagacccgcggcgggctcaagatcttcctcgagaacgtcatccgacgacggcgtcacctacaccgagcacgctcgccggaagaccgtcaccgccatgtatgtcgtctactggctcgaacgccatggccgaaggctctacggcttcagaggctaggccgcctccccttctgatgctttgatatgacgggcgagggcgggtgtgtgtctagttggacggtctactgtaggttgttctggatcttcgcttctgggtggtccagtttctagcccatttggagaaatagtttcgcagggattatcaatggaaggccctcgcgtctaaacagggagaag

SEQ ID NO: 99348 - DNA, 2720 bp, Zea mays
  Clone ID: MRT4577_22118C.1
cctcgaggccggccgggccgggatcactgttcggcagtgctgtcaccgctagcaactgcagtgtgtgagttcacagcttagtgagcagctcctgaggctctcggaggtgaaaggtgacgatttcactagtatgatagagtagatcaagcacccttttgttcaatccttcgctcaaatcggatccttttcctgccatccttttcacccttccaaatcgaccaagaaagctcatccagtttttgggggggatcacctattttggagtcaccttgccgtcgtcatcagccaatttactcacacacctgacggcctgcatgccatcaatgctcgctcccctcccctgatgactgaggtgtttatcatgtgagagcctctccgttttggcgtcacaggaaacccgctctcatggtccactgctggtggagttcggctggagttcatttattcccaatatttcagcttcggcttttggaggtctacagattctcgagttgttggggaaaatctggctggcctcttattagagcccctttggcccttgctcctctttccagcagaggtttcaacttctctttccccctgaggtttcgtgagcgcagcagtaaggtttctgaaactgttcttggaggtttgctctcgccggtttccactgtccctgctttatctgcctgggacggctccaagatctgagcttgggggcgttcttggtgcaaagcggagcaatccaccaaaccgccccgggatttggagctggaataatccttccatgggttcccggtccggctgtggagcggcgatggcggcggccgcggtgttggtttcttggctgtgcttcgcggcggccggcgtcggcgcgataggggcgaactggggcacgcaggcgagccacccgctgccgccggagacggtggtgcggatgctcaaggacaatgggttccagaaggtcaagctgttcgacgccgaggagggcaccatgagcgccctcaggaagagcgggctggaggtgatggtcggcatccccaacgacttgctgtccacgatggccaccagcatgaaggccgcggagaagtgggtcgacaccaacgtctccagctacctcaacgacggcgtcagcatcaggtatgttgcagtcgggaatgagcctttcttggagacatacaacggaagcttcctgcagtccactttccccgccatcaggaacatacaaggcgcgctcataaaagccggcctgggcaaccaagtcaaggtgacatgccctctcaacgccgatgtctactcctcgacgacctccaagccttccgacggggacttccgcacggacatccacgacctgatgctcaccatagtgaagttcctgagcgacaacggcggtgccttcaccgtcaacatctacccgttcataagcctctacatcgacccgaacttccccgtggactacgccttcttcgagggggcctcgtcgccgattgtggacggctccttcacctacagcaacatgttcgacgcgaaccacgacacgctgatatgggcgctgaagaagaacgggttcgggaacctgcccgtgatcgtcggcgagatcgggtggccgacggacggcgaccggaacgccaacgcccagatggcgcagcgcttcaaccagggcttcatgacccacatcgcctccgggcggggcacgccgatgcggcccggacccgtcgacgcctacctgttcagcctgatcgacgaggacgacaagagcatccagccagggaacttcgagcggcactggggcatcttcacctacgacggcctgcccaagtaccagctgaacctggggacgtcgaacgcgggcggcggtctcgtgagagccaagggcgtgaagtacctcgagaggaagtggtgcgtgctgaagccttctgtgaacctcaacgacccgaagctcgccgacaacgtgggatacgcgtgctccatggcggactgcaccagccttggctacaagacgtcgtgcgggatgctggacatccgcggcaacgtctcgtacgcgttcaacaactacttccagaagaacgaccaggacgacgtggcctgcgggttccagggcctcgcgacgaccacgggccaggaccccagcaccgggacctgcaggttcggggtcatgatcgaggtcgactccgccttctcgtggaggctgcaggggcttgggagcaacctcctcctgttcctcctgcttggggttctccagctatccctgtccttctcttagacgcagaggttctgcgagggatgggtggggtggcagtgagcgcataaacagtctgacaacagcttgaggatattagatgtgtgttgtcagtgccattcatttagaaactctttcctctatgacccctccgcccctcttttccttttcttctctttggcgaggaaaccgcagaccgcggtttcaggcgttcttgattgattgttgctgttagctttgatccgtcagttccgttgcggcgacagcgacgagtgatgcattgacactgaacctctgcaacttgggcgagctctgcttaggtttctcagcaagtcggcagcatcgtattcgtgatccatcttccatcacgcgccgtaaccttcataagctttcgtgcccagagaagagcttggtccccctcgattatctagggttcgtttggctttaatttgtaccggtttctactatgttggctttaatatgatggacaacggggtcagtc

SEQ ID NO: 99349 - DNA, 458 bp, Zea mays
  Clone ID: MRT4577_22119C.1
tttctttacgcgcccgcgccgacgtccccgcagttgacacgtgataaaggcgatggctatgcaccgtgccggcgagctcgcactgtgccgcctctacggcgcaggggcggcagtggctccaagccctgtctgccttgcccatgtccggccgtgggaggaggcggcaaccgctaccaatgctgggaccgttatgcagtctacgaccgatgctgctgctttgcgcctgcggagcggttacacggaaagcggtggagcgggccggaaggcggtgatcgaggacgaggatgatgacgaggatgagctggaggctatggggagcgactagaagtatgacagctacttggacgacgacttcgacggcgactgcgacgactaggatctcgatgaactcgaggacgactatgatgatggatctgagcgcgaagtctggacctagcacggtagacgctgagctgtag

SEQ ID NO: 99350 - DNA, 1867 bp, Zea mays
  Clone ID: MRT4577_2211C.1
atggatcctaaagggaagggaatcgtgatcaacgacaaggagaaggagttcttcgtcaacgagccaagggatgacaagtccaacgactcgggctcgggccacagccgcaaagatgggaagaagaagaagacaagacgcatcaaggagatcgtctactacgacagcgatgagtctacttcctcccaaaaggacgacgaccacaacgaatacgagagaaagaaaccggcaacgaggagcaaggaggcgctaccgagcaaggtggcgcaagttgaggcggccgggctaaataatgaggagatggccctcatcattaagcgcttcaagacggtgcttaaaggtcgcaagggacagccaagcaagaccaagacaaaggagaagcgctcgtgcttcaaatgtggtaagattggtcatttcattgctaactgtcccgataatgaaagtgaccaggaaaaggggaacaaaagggagaagaagaagcattacaagaaggccaagggcgaggcacatatcggaaaggagtgggattcagattgctcctcctccgactccgacaatgaaggactcgccgccaccgccttcaacaagtcatccctcttccccaacgagcgtcacacttgcctcatggcaagggagaagaaagtttatgcatccgggggttcaagctggattatcgacagcggatgcacaaaccatatgacgggggagaagaagatgttcacctcctacgtcaagaataaggattcccaagattcaattatattcggtgatgggaatcaaggcaaggataagtctgaaacccaagggaccctcaagcgcttcctcaggagagctcaaaatgagtttgagctcaaggtgaagaagataaggagcgacaacgggtccgagttcaagaaccttcaagtggaggagttccttgaggaggaaaggatcaagcacgagttctccgctccctacacaccacagcaaaatggtgtggtagagaggaagaacaggacgctaatcgatatggcgaggacgatgcttggagaattcaagacccccgagcgtttttggtcggaagccgtgaacacggcttgccacgccatcaacagggtctaccttcatcgcctcctcaagaagacttcgtatgagctactaaccgataacaaacccaatatgaagaagatgttccgacggccgctatacgaaccatggcgattggagaagtgcggccacaggaacaagatgaacgagatcaaccttcatcctcaacaacggtgcatcccccaactcaagacgatgaacaggttcatcaaaaggaggcgtgtgatcaagggggagcacaagatgatcatgtgatgggggaagaagcgcaaccggcacctccaacccaagttcgagcgatgattcaaagggatcatcccgtcgaccaaattctgggtgacattagcaagggagtaactactcggtctcgattagttaatttttgtgaacattactcctttgcctcttctattgagcctttcagggtagaagaggccttgctagatccggactgggtgttggccatgcaagaggagctcaacaacttcaagaggaatgaagtttggacgccggtgcctcgtcctaagcaaaatgttgtgggaaccaagtgggtgttccgcaacaaacaagacgagcacggagtggtgacaaggaacaaggctcgacttgtggcaaaaggttatgcccaagtcgcaggtttggactttgaggagacttttgctcccgtggctaggctagaatccattcgtatcttgctagcatatgccgctcaccattctttcaggttgttccaaatggatgtgaagagcgctttcctcaacgggccaataaaggaggaggtgta

SEQ ID NO: 99351 - DNA, 1101 bp, Zea mays
  Clone ID: MRT4577_22120C.1
tttttttaaaaataatttttttttttttttttttttttttttaatcagaaggaacacaatctttagctaggtaagcacaaccgtcacagtttacactggaatcagttgaccagatgatgcaatatacatatttttcactcttcagtatgaagcaagctcgaatcaaaacttacagagcacacttccaagtaggccatgtgattttacacagttaacacttaacagaccacaccacatgatttgaacgtgtccagaacaccgatacaaccatagtatgcaaccgccatttttttccttagaagcagaaatcgacatacacacacataacatctaccatccagaaaaatctttgaactctacactagatgcagtcgcttttctcttcttgctcgaatcatcagctacaccagcacttccagtcacatcaatagaaccagcagcccgagcttttaaatacttgccaaccccaccaccagtacttgttgaaccagcaacaccagttcctgggttgctataccatgatcccaccttatcataatcctcatcctttttcttttcctcctttgccttttcttcttcctcatctggctctgtgtaaggattcacgaatatgctgacttttagaatctttatttcctccattggccggtcatcatcatcgacaggaaccctttccatcgttgaaagtgtggtcaaaccacccaccaccatgccaaataccgtgtgcttgtaatttaagtgtggtgcagacttgtacaagataaaaaattgggatccgttggtatgagggcctgaatttgccatgctgactacacctcttccagaatgtagcagctttgagtttggctcgtccttgaacggtttaccccatatggactctcctccacttcctgtgccagttggatcgccgccttggatcatgaagtttttgatgctccgatggaagataagaccattgtagtaaccattttcacaatgtgtgaggaaattttcacaagttcgaggagttatatcacaatgaagctctaaattcaaatcaccatgcgttgtatgcagctgaacgtaaccttcttttttggattccctagttctagatcgcga

SEQ ID NO: 99352 - DNA, 161 bp, Zea mays
  unsure (1)..(161): unsure at all n locations
  Clone ID: MRT4577_22121C.1
gtgatcggngcagcaactattctancctgggcaagactgcgtgccccccgtcgccataaagctcgtgcagctgggctttgccggcatgaatgtggagtgaaagctggcactggacgccggaatgagcccatacgnggtaatgggctaccgcaaagggatga

SEQ ID NO: 99353 - DNA, 592 bp, Zea mays
  unsure (1)..(592): unsure at all n locations
  Clone ID: MRT4577_22122C.1
cattgggtacctcgaggccggccgggcccgagnctccagcgcgactccgtgcgacggcgaggcttctgtcccgtcctcgtctcctcgaggcccggaggctgcgagtctgtgacacttgaccgtgaggcggacgggcggacggcgactcggaggacttcaccagcgagtccctcaagcaccgaggccgagccgcccaccgcccgccgccgcctcgcctggcgctagccgccgatgccgagcctgttcggcacatccgttggtgtgccagtacaccgatcaggctgcggacatccgaaaaccgaccccgggcgcgccaacgtatagagatgcgcatcatcgaccgtggagatcccgaacagattattcattgttctgcatccggaccccaacatcagatgcggacgccaccccatcagcgtattccttacgatgataaaacattgcatcgacacaattaacatgagctatggccgctacgagcactccagctagcggaagaacatgaggtataacagcttgagctatgcatccgcagccgcgaagggtgctgtcgtatccgggaaagaagataaactagactgagcgagctaca

SEQ ID NO: 99354 - DNA, 483 bp, Zea mays
  Clone ID: MRT4577_22123C.1
tggcaaaggaggaaagctggacaaggccgttgagatgtttgctgctgcgcaggagctgggcctgccgatcgacgagaagatgtacacgaacatgcttagcttatatgggaaagccggtcaggttcttctgccctgtgcaaagaaaacaattagagcccttctcattgatctgtttcacccaccaccgacttcagtctcctcctatccagttctaagcctgtggatttttcatgtgttcaggcaggcatcaagaggcgtctttgatgttcaaaagaatgaaggaagatggcatcagacctggaaagatcagcttcaactccatgatcaatgcctacgccacttcaggactgttcagcgaggcgaaaagcgtgttccaggagatgcaggactgcgggcacgcccccgactccttctcctacctcgcgctgatcagagcgtacacggaggctaagctgtacaccgaggcagaagaagccatccgga

SEQ ID NO: 99355 - DNA, 491 bp, Zea mays
  Clone ID: MRT4577_22124C.1
gggggcgtgcgttaagttcagtattttatggacgtacctggcctagagttatcagaagcggcaaataagattagcgacttccaactggctggcttgcttgagactggactccgagcatggcaacgcacaataggatgactgttatatctcggaccggagggaggtaaagatgacggatcatgtggatggtgatcgagcttgggatgtctcactctctgagtatgaggctagaggccccctggacactgtgttacagcttcatctatgaagatgtgtctaaaggttttcaacttcttgacgaagctcaaacgcgtagatcactccgcttaccggagtgaggaagactatgacacctaactgcattggttcttgtccattttacaaggaaagaacaagcatcagagctcaatgtgaatcaggtcttaataaatgtcaagcctctatgcaaggagatgaatcactttgtgaccaaggcccaatactacattatg

SEQ ID NO: 99356 - DNA, 565 bp, Zea mays
  Clone ID: MRT4577_22125C.1
atattacctgcaattccttcctgctgtgtttcactgaaattatttattgaattattcgatggataatgtcctctaatacttctttcatgaattgacatcctcgtctgtttgcagttgctctgttttcatttgaattggcacaaagacgaatcaccggctgaccggcccatatattagattctcttgctatgattatgattctaactgttgtgttcatttctcttgcagtgtagatgatggattcccaaccatcacattccattttgaggatgatcttgcactacatgtgtatccccatgagtactttttcgcaaatggggtaacatgacatttctctccaagtcgagtagtgtttaattcacccattgtcatgggttcatcacggtttcatcttatagcacttgaaagtggcttcagtgctctcttcttcctttctccccttatgcataaactacatgataatggtttaaataaatcacttttgtaatatcatgtgtgccattggtaattaatatgaaaaacaataactaaacttgtatatatgaatatatgatgcatatgcctt

SEQ ID NO: 99357 - DNA, 529 bp, Zea mays
  Clone ID: MRT4577_22126C.1
ggggagaacccatccgcctgaaacacatgtctgaagcgagtggagctatcacaatccgcaccaagaagttcctgaccacaggcttctgcagagaaagcaaatggtcattgaagttcttcaccctacaagagccaatgtatcaaaagatgaactccgagagaaactaggaaagatgtacaagtcacccaaagagcaggttatcgtctttggcttcaggacgcatttcggaggaggacgatcaactggctttgctttgatttatgataccaaggaggcactcaagtttgagcccaagtatcggttggtcagatttggtctggcagaaaagaaggaccaggcatcccgcaaactacgaaaagagcgaaagaacagagcgaagaagttccgtggtacacagaaggtcaaggctgcgtcggccgacaagaagaagaagtaaaagtctgtttgcagcactggcttcagtactcttctctttgcattctatcatctgggtcgactcaataccaaaaaaaaaaaaaaaaaagcggcc

SEQ ID NO: 99358 - DNA, 156 bp, Zea mays
  Clone ID: MRT4577_22127C.1
gtttttcgttaggtcgagcacagatgttgggcgggccacttttgccatccgagctgccgctacaggcacattcaagaatgacacgatgctgtagcccgacttcggaagcgtcggcgtctgcttcagggccatgtgcatcaaggtctacgtggacga

SEQ ID NO: 99359 - DNA, 1075 bp, Zea mays
  Clone ID: MRT4577_22128C.1
agtgctcttaaaattgaagttggtcgcaaaatagggataacagatactaagcaatcttgaaaggagtcttgcaaatgatgtagaacagattgctgctgaagtttctaaaactgttgtccttgactgtgagttgtattcagccatacatgtgcaaagaagtccaacaactatcaagtttggttcaacacatggaaaaaatgttgttgaagctgtgtcgactgcagttcagcaatctcagcatctgaggaatattcttcctgtcggtgtcatagttggtgtaactttggcatgtttgagaaattacttccatgttggtgtctctaagcatggtgaccatatgatagccactatgaagtcagatatttttggtgaggaagttattgttcaggacagcagcaaagagaatgttcaggatagtggaaaagcaaatacaaacgataataatattgaaaaaaccagtggggagaaccagcaggagatgacgaagtcacagggtcaagatatgatggtcggggctgtgacggctgccctaggtgcttctgctttggtagcacatcaacaaaataaggatgaaaattgcaaggattttgttgagatagaaggtgccaaacatgaggaaactggagcaggaaaagagccagaacagtttgatgagcagttttgctgagaaagccatgtctgtggcaggacctgtagttcccacaaagggtgatggtgaggttgatcatgaaaggcttgttgcagttctagctgaactcggacaaaagggtgggtttttgaggttcattggaaaaattgctctactctggggcggaattcgtggtgctatgagcttaactgataggcttatctcattcttacgtatcagtgagcggcccttatttcagaggattatgggattttctttaatggttctcatcctatggtcccctgttgtgattcctctactgccaacgcttgttcaaagttggacaataagtgcttcaacggggattatcggatatgcttgcattgttggattgtacatttctataatgatacttgtcatgctgtggggcaaaaggatacgtggcta

SEQ ID NO: 99360 - DNA, 560 bp, Zea mays
  Clone ID: MRT4577_22129C.1
attttcgttcattacatgcgtcggttgccacagacacaccgtctcgtgcagaatactaatggcaaacagcaatgcgcttgatactaccgctcgccaagtgcgatctctctctcgacatccatctcgtgcccgactggggaaccgtgtagccactggcgaggagtcgcaggtctgcatcgctgccactcgggcacgtgcttctccgagctctatcgccgccgatgatgtcctcgcagatactgaagagacagcgagcataagagtaaacaggacataaatgcccctgaccgctatgagcgtatcggcttggcagaggggaccaagaaactggcctatgacagggatacaaagattgtgaatgctgcactcattcactgtccaacgcgaagatcgcactgtacgcatactatcctccgcatgcacttgacatatacctgaatgctatctttgccgtggataagctcccgcacccactccagtagaagagcattggtacgatctgcacaacgagcctgtcctaggcgatgcagagctactacttcgatatcaatgatctagac

SEQ ID NO: 99361 - DNA, 679 bp, Zea mays
  Clone ID: MRT4577_2212C.1
cggggtgcagttaccttatcctcatcaaagcaaaccaaataaccccctcagcttgagacgttcttttccggcggcctctgatcaaattatcactatttactgtttttatacccgcaacacgatgaagtctctgatcaatagcctgattgccgtcgcgatcctaaacgatgtacaaggcgcgttattcccaaccttccccacccagactgatacctgtgccgtgctacgagactgtcaaatcaaatggttggacgattccaaccaaccttcgacaaagactatgggggagaccaccattgacttggtcatgggtagcgccaccaacttgcaagccgtgcagaaccttggtggcgtttccaacccctctgaagccaccgcaatcacttttcaacctattgccggtctctcgccaacccagaaatatgctgtccgcttcatcgccaagtccgacccatctcacccaatcttctcgacgtatttcacaattaccggaggatccggtactgccaaggctttgattactcccaactcttcactcgctggttcagtagccggcagcccctccccgatcatcggtagcaaggcccctcaggcagcagtgaactccaatgcaaccgatgtgagaactacagtcaagaacaacaccgcctctgcgaacgccgagcaatccgaagccagc

SEQ ID NO: 99362 - DNA, 980 bp, Zea mays
  Clone ID: MRT4577_22130C.1
gaaccgatgaacgatgaatagggcctatgaccaatgaataggggactatgaacgaacgatggacgatgaatagggaatatgagcgattaatagggactatgacggaacaatgaacgatgaatagggactatgaacgaacgatgaatagggactatgaacgaacggtcgaacgaacgatcagaattttagtagcataatggctgaacaaagattatttggacgaacgaacggacgaacggatgaatgaaccatgaacgatcgaacgaacgatcgaacaatcggacgaacgaacaaacaaactaagaacaggtggacgaacgatccttgtgcttgtgtgggagttggagtgggggggagacagttgccatgaaatggcttggggtggcttgagaggaggcccttgcccctctatttataggctaatggcttccgacatcggcgcggaggtggtggcggctgaagaagtcctcgtcgccgacggggtccccgccaccatccgcgctccaggcctccggctctttggctttgatagcttgtcctcgcccctcgagtggggacgtgggcgagggcattgttgtagcggcgtccgccctgaggccatcgtcgttgcagtttggccacctggagcggaggttgttgtcgctgctaccggagcgggcggcggtgagccacctggagccatgtcgccccgcgggccccccaatgtgggaggttgttcgtacccgcgggggcggaaccggagttccgtttgtaatggaaccttgaatgccggtgtttgttcattgtggctgtcggggcctgaacatcgcatcctctccaaaaggagcaggaagtttttcagtattataacaaaatcccctggactaaaccatccagactcgtccattcctgtggacacagactattcgaataggtttgaactctgcgcagaggtgtacactttacccactagttcggctctgcgatcccatggccaatga

SEQ ID NO: 99363 - DNA, 277 bp, Zea mays
  Clone ID: MRT4577_22131C.1
gcctcagcctagatgttttgtcttctcttttctgcacttaatacctgacagtatgaccgatctctgcgcctttctgggggcgggcaagctggcggtagatttgtgatgtcacagtgcaaactgcagtgactgtaaattggcctggcgtgtataaacgttttcagggaatgcagaaggtattaatgaagagacaaaacctttattccatgtgctttgcttcattctgtacatagctctttggctcgtgaacctaattgtaaactttcaggtatttttg

SEQ ID NO: 99364 - DNA, 2670 bp, Zea mays
  Clone ID: MRT4577_22132C.1
atggcgatgtggccgccggagagcgggacctcgggtatcagtcacctgagggggtcctcaaggacgtcttcactggagactctgacaccggtggcgagagcgaccgtcgcagaagttgtacgtcatgtacggcgggagctaggagctcacctcccgcaggaacgtcaagtccctgcgccacgaggtcctgtcgacgaccccaggggtcccgaaagctgcttcacattagcgatggaggagcaccactatctccttcagggcacccgactgccccgacaacatggcaggggccggaccgatgaaaacttccgtacggagaacgtccagttcgatgtcgtggaggttaacctccccttcaacgccatcattggcaggccggccgtgtaccggttcatggccattgcccattatgggtatttggtcctcaagatgccgtccccggctggggtcctcaccatgcggggcgaccgcgccgctgcggtgacggctgtcgagaagctgcacgccctggtggcagaagctgctcacccggacaatggagggagggacccctcgacctccattaccaaggcgcttgccaaggtgcagccatctggagcagaccgcgggcccgtgaagaccatccagatgcctgggatccccagggaggtgattgagcaccatctgaagatccaccccgacgccaagccggtgagtcagaaacctcggagacagtccgttgagcggcaggacttcattcgccaggaggtccggaagctgcttgacgccggcttcatcgaagaggttcatcacccagtgtggttggccaacctagtcacgttccaaagatccggatggctagggaggataggaagcataccactttttgtaacagtggatgggctctactgctttgttgtaatgctctacggtctgaagaacgccttgccaacatttgtacgggcgatgagtaagaccttcggggacctaattagggacaaagtagagatatacgtcgatgacatcatggtcaagactaggagagggtcgactctggtggaagacctgaccctggtctttgacaaactgtgggcgacacgcacgaagctaaacccggacaaatgcgtctttggtgtctccgctgggaagctgctgggattcctggactcacaccggggcattgaagcaaacccagagaagatcagggcgattgaggcaataaggcccccagcccgtatcaaggatgtccagaagcttatggggtcattagccgcccttagccgcttcatctcaaggctggctgagagggcgctacccttcttcaagctcctacggaagtctggtccattctctttgaccgaagagactgagcaagcccttcaagagttgaagcagcacctggtgtccctaccagtactggtagctccagaccctggggagccgttgtacatatacatcgcggcggccgcagaagtggtgagcatggtgctggttgtagaaaggatggcgcaagaaggccaagaacctgagggctcgggaccagctacaggggcacacagggttgtggtggtgacctccttcccgttaagggccatcctccacaactctaacgccacaggcaacatcaccaagtgggccgcggagctcactgagttccaactggacttccagcctcgccacgccatcaagagccaggtcctggcggacttcatcatggagtggacacctcctccgagcggttcctgggatccagatcccgatttggaccccacacctgcggagcccaggggtccggtcttcaccgagccccactggacgatcttcttcgatggatccgcccgtcagcaagttggcagggtcggagtggtcctcgtcgacccgatcggagatcaagtgaagtacatggtgcacctcgagttcaaggccaccaacaacatggtagagtacgagacacttatctttggcttgtctgcagccctatccctagggatccataaacttctcatgaagggggactcctatctgatcatcaagcaagtccgtggggaatgtagctgcaacgagcccaggctcgtagcttacctcctccacgaggagggccgtgagttgctcacggagatccatggaggagagtgcggaagtcattcctcataccgcacgctggtcggtaaggccttccggtatggcttttactggccaaccgccctccaggatgcagctaagatggagtattgtgagggcatcgacacccagctctgcttcgcgtctgtggctcatcctaggagcaacggccaagtggagagggcaaacgcagagatcctcaggggactcaagacacgcacctatgactgcttgaaaaagcatggtacaaattgggaacagctgcggcgtgaggacgtggacttcatcgacgagcacagatggcgagcggcgatccgaaatgcatggtacaaccaggcgctccgatgctaccaccaacggttcgtgcatagtagggagctcagggtctgggacttggtcctaaggcgagtactgaaccgagaggggctccacaaactctcccccagctgggaaggacccttcaaggtgacagaaatatgccgacccagatgtgtccgccttgcaacaactgaaggagagcctctgaccaatccctggaacatagagcatctccataagtttttcccataa

SEQ ID NO: 99365 - DNA, 2026 bp, Zea mays
  Clone ID: MRT4577_22133C.1
tcaggcgtcgcccggagaaggagccgtgccctcggcttcgtccccaccctcggcaagatccgccccggcctcggacgacggcacaagcggaaggacctctgcctcgaaggtggttgccagcaccgcgcttgggcccgcggcggccgcgtcgagcctttggacttcggccagggcagcttcatcttcgtcgggaaggcaataaccctcgctaaaccgctccagatccacgtcgtagtaggaagcgagcacggcgaaggcccgcctgacaccgtgatgcagcgcctcgcggagtctgccgcgcgcgtggtcacccaaggcctgcaagcgactctgaggggagcttcccggggggacatcgtcggaaccaaagacccgacagaaggccgagatggccttggacatagccgcgcggtcggcctccctctgctcggccgcctgggcgagtgccttggtggactcatcaagggcagactcgagctctgcgaacagccaaagcggaagactggaggatcttgggaacgtccctgcaaaggacctccaaggtcgaccggagcgaccccaccgttgcctcggcacactcacgaagcccgtcccaagactgctcctcccgctcgtcgtcaagaacgaagaggggatccaaggccccacgagtccggaaccgaagcaactggcgccgcccatcggaactgcgccgcgcagggacaaggctgccgctcgactggacgggtcgcagttccacgcccccctcctctgaggcaccgagtagtgacgcctcggccatctcagcgtcggcggcgacgggttgctccatggccaggacggcaacggcttcggcagcagccggcgccaccgcgggcagcatgtctggtgggcctgaggccacgaccgcgccggcagcctcccccagcgcgatggccgcctcgactgaggagtcagccttgggagctcgccccacggaaactggtgccgcctgagccccccgttgtggggcgtcttgcgaggaggtcagctggccggcgaggcccggcgcggcgctagctgcagaagctgacgccgtcttgaggaccttccggggagccagaccggtcgaaccgtgcctccgcttgctaaggagaaaaggaaaatcaggatcgggacatacgaaggaggagccaggacgaagatatcctaagatacttacccactctgagccatgatcaatcgtgcctgtggggaggtctctcgaacctcgatccccgagggtaccaccaaggtatgccccgctgccggcctcggtaccgtcctcgccttgggcgcccgaggcacccgagggacggactgcccagaagcagccacgacgacccgaggatcgccctctctgcggggtcacctcaactacctcggccaaggggtcaagtaccccctcggtctgcccccgctcttcggaccgggaccccgatgtcccggcccccgataccgacggcaccagcccgcttgggggctggcttgacaacccctggcccagcctaagatccgggctgaggccaaggtgggcagccatatcgtcgtcttcatcatcgtcttcatcgtcgtcgtcgtcaggcgtctccggcgacggctccctcaggagcccatccctctcctgccgacgacggagcctttccaaggcgtcccgagcccacgtccgctcgcgggcccgagccttcttcgcgtccttcttctccttcctcttctccgtggcaaccctccgcgcagctcggaccatcgtgtcctccgggaccggtggcagggaaggcttgtgatgccctacctcctggagacagacgaaaagtctcggctgtgagaaccaagggcaatccgacgcaagaagaaataaggagcggacactcactagggacacacacccgcggtcgggacgcatcaagggctgggagagggcgccggcgtccggcttccccaacgtgtcggctacccgcctgtggaggtcgtcgacgggaaggggattcgaggacatccgcaaaccctccaagtcggcccccggcgtcat

SEQ ID NO: 99366 - DNA, 3528 bp, Zea mays
  Clone ID: MRT4577_22134C.1
atgtctgaggagaagatgactgaggagaagaagataactgatgagaagaaactgtatgaagagaagaaagttgcggatcattttattgctggattttatgagtttatggtgaaaacgaatacagagaaaattactaaggagataatggagggtttgtttgaagattctaatgacagttgtcggcgtttcgagaccggggggtccctggaccgacgagtaaattgtcgccgcgtgccccagcccagatgggtcggcgcgagacggagcgcgaaggagggaggcagccggagggagacgggcgtgagaggtggaaatcccgcggccttcgtgtttgtcccgtgcccagttggcgtggcgatttggcctaggttgcttcttggcgaagactgggcctcgggcgagccgaagctttgtgctgatgggggttaccagctgagaattaggagtcttgagggtacccctaattatggtacccctaatactcgcttggaggcttttgccgcacttttttgcaaggggaccagcctttctcggttgcgttttgtttcgttctcgggctggtatgttgacgctgtcaacggtttggccggagctgggtttgcgagagcagcccccgagcctctgcacagggcgagaggacggtttttgcaacctgagagttttagccacagaaaaggaaaccgcccacccaatcctttccgccgccaccccttctgctcaatgatggccgaccgggtgaccattgtctcgtcgcgcgacccattgcctttctccacagttacggcggatgacctggaggatcttgttgctgagggtttacttcgccctctctctgatgagaggcagccggagtggattcccctcgcgagcgaagccgccccgtccccgccgtcggggtacgtcgtgagcttcgtctccttccacgagcggggattcggtgtgccggcaagccgcttcatgcgggcgatcctgcacaactatggggtggagttgcacaacctcagccccaactccatctcgcaagccgccatctttgtagcgggtggcagcgccggtggttctgcctccggaatgacggcgagatgctcccgccgttttctcagcgagtggtcaccgccgccgccgacgcttggcgctacgggaccccgcacgacaggcagaagaatctcaagccccttctcaaggccctggaggcgttgcggaaaagaagggctcaccgccgcgggagtgattgccgccattcatcgccggagggtgcttcccttggcggagcggcggttgccgctttgggaggtgacgccagaggctgacttggagggctcgcggatgtcctcggatccccttcccatcgatgttctccacgggcgggtggctgtcgcgttgggaaaaccggacgccagcgccttctcccagcccttgatgcgccccgactgcgggtgtgtgaccctagtgagtgtccgctccttctttctccttgcgccggattgcccttggtccttacggtcgagacttttcatctgtctccaggaggtagggtggcacaagccttcccggccacgggtcccggaggacgcggtggaccgagcagcgcggcgggttgccgcggaggagaagaagaagaagaaggacgcgaagaaggctcgggcccgcgagcggacgcgggcccgggacgccttggaaaagctccgtcgtcggcaggagagggacggactcccgagggagccgtcgccggaaacgcctgacgacgacgacgatgatgaagacgatgacgaggatgacgacatggctgcccgccttggcctcagcccgggtttgaggctaggccaggagtcgtcaagccagcccccgagcgggctagcgccgtcagttcccggggtcgggacgccgaggtttcggcccgaagagcgggggcagaccgagggggtactcgacccctcggctggggaagttgaggtgacctcggggagagagcgacccttaggtcgccgtggcagcgcctgggcagtccgtctcctaggcgtccaaggtgcccaaggcgaggatggtaccgaagccggcggcgaggcggacctcggtggtaccttcgggggtcaagatccgagagacctctcctcaggcacggttgatcatggcccggagcgggtaagtaccttagaacgtcttcgtcctggctcttcattcgtatgtcccgaccgcgactttcctttcctcctcagcaagcgaagccatggcctgaccgatctggctccccggaaagtccttaagacggtgtcggcttccgcagccggtgccgcgccgggcctcgccgttcagctgaccttctcgcaagatgctccacagcagggggctcaggcggcaccactcgtcgtggagcgagttcccgaggccggctcttctgtcgaagtggccgtcgcgctgggggaggcgactggcgcggacgtggcctcgggcccaccggacatgccgccggtgctggcgccagccgctgctgaagccactgccgtcccggtcggggagcggcctgctgccgccgacgctgagatggccgaggcgtcggcactcggtgcctcggaggagggggccgtggaaacgcgatccgtcccaccgagcggcagccttgtccctgcgcggcggagctccgagaggcggcgccagttcctccggttccggacccgtgaggcttcggatcccttcttcgttcttgacgatgagcgggaggagcagtcttgggacgagctccgcgagtgtgccgaagcaacggtggggtcgctccggtcatccttggaggtcttttgcagggacgtctccaagatcctccagcagggcgccgaggtggcggaccttcggttgctctgcgccgatctgagagcagaggcggcagcggcacgcgcagaggtgcaacggcggcagtcggagttcgaccaggttgccgatgagcgagaccaatctcagggccggactgccgaggccgaaagccgggctggagcccttgcagcagacctagccgtagcccaggccgcagcctcggagcagcgtgcccgagccggagagctcgagtctgcccttgatgagtccactagggcgcttgccgaggcggccgagcggagggaggccgaccacgcggccatgtccaaggccatctcggacttctgtcgggtctttggcttcggcaacgtcccctcaggaagctcccctcaaagtcgcctgcaggccttgggtgatcacgtgcgcggcagactccgcgaggcgctacaccatggcttcaggcgggccttcgccgtgcttgcttcccactacgtcgtggatctggagcgggtcagcgaggggtattgccttcctgacgaagatgaagccgccctggctgaagtccagaggctcgacacggccgccgcgggcccgagcgcagtgctggcgaccaccttcgaggcagagatcctcccgcctgcgccgtcgtccgaagccggggtggactttgccgaaggcggggacgaagccgaaggcgcggctccttccccgggcggcgcctaa

SEQ ID NO: 99367 - DNA, 321 bp, Zea mays
  Clone ID: MRT4577_22135C.1
catcggaccagagcacaatctgggtttgggaaaacatttaagctaaccacacactgaaaacatcccaaaacaatataaacttgagaccactgcccaaaaaaaaagtgatctcatcccgacacaaattggcgcgcaagacaatccatgagaatgctctaaactacagcgctcttgccctccctcctttgtagcttgaacaaggagaactcatgctctctaccctaaaggaaggacccattatctctggcaaacatgacagggcgggaagaaatgcatgccagaaaccgtccactgccaaattgttatacaatgtgtgggtca

SEQ ID NO: 99368 - DNA, 415 bp, Zea mays
  Clone ID: MRT4577_22136C.1
cccacacgtccggacgcttctcccttctcggagcctgcctcgttggttgccttctgcggacgccgccgattaggatctcctgttcagagctctccccacattgcaccacgcatcatgaggttcgtaatggtcctcacaggatagaggatgcacgcgagatagagaacgtagaggtgatgcacgagtacgaccttcacatgcagtcttgtatccacattcttggccctaggactgttccacagctgctagggagtgtgtacgtctaagaggtcatagacagattcgatggtcaactgcatggatttcaaggagctctgcagcgacttctaatacataatcatcccctacgtggagtccataatgacgtatgtcgcgacggaaacctttgggctcctcaaggataaccgcccattca

SEQ ID NO: 99369 - DNA, 164 bp, Zea mays
  Clone ID: MRT4577_22137C.1
agaaccaatagtgcttaaagcgacagactataatttcaaatgcataaactagagcagatcacacagggatgatggaaggaaacacgcaaacatttcccaggacacaaacataggtttttgaacaccacaacctgaatcgtcagccaaactgattaatgcaagca

SEQ ID NO: 99370 - DNA, 1346 bp, Zea mays
  Clone ID: MRT4577_22138C.1
cggacgcgtgggcggacgcgtggggctgacttagaaacaggacgatttgcccagacttggtgtttttggtgctgttgaaatctccgatccctttggggtgtgacccactggacatggccaatttgtcacaatttattattttgacccatgtcatgtgaaacgacgtttcgttgaagtctgcgtgcttgcgcgctctctctctctttctcgtgcggcaaactgcgaggccgccgacgcccgacggcagggtgcccaggccttcttcggtcccatcgcgaggccatagttgcatcattcgcctgagacgactgcccaccaccagtgtgaccacccgccgctgttctgcggtgttccttgacaatgagcagcataggcacaggttacgatctgtctgtcaccaccttctccccagatggtcgcgtcttccaggtcgaatatgctaccaaggccgtcgacaacagcgggactgttgttgggatcaagtgcaaagatggcattgtcctgggtgttgagaagctggtaacctcaaagatgatgctggaagggtcaaaccggaggatccattcagtgcaccggcactctggcttggctgttgctggtttagcagcagatggcaggcaaattgtttcaaggacgaagtcagaagctgccagttatgaaaaggtctatggagaacccattcctgttaaggaattggctgatcgcgtggcaagttatgttcatctttgcacgctgtactggtggctcaggccttttggctgcggcgttattcttggaggttatgatagggatgggccacagctctacatgatagaaccctcaggagtttcttataaatactttggtgctgcattagggaaggggagacaggctgcaaaaactgagatagaaaagttgaaactttcagagcttacgtgccgggaaggcattgttgaagttgcaaagataatttatggagtgcatgacgaagcgaaggataaagctttcgagttggagttgagctggatctgcgatgaatcgaaccaccagcatcagaaggttccaaatgaactgttggagcatgccaaagctgctgcccaggctgctcttgaggagatggatgccgactaagagacacgatgatttgcccaaacttggtgttttcggtggtgttgatatctctgatccctttgggggggacccactaggggtaggcacatttcaaccgaaaaccgagccgaactggaatcaaggttttttcggtttttcgattcggtgtcggttttcctttcttacgaaccgaagagatcggctcggcttcggtttctatttgctggacaccgatacaaccgaacgtcctgcagtct

SEQ ID NO: 99371 - DNA, 2529 bp, Zea mays
  Clone ID: MRT4577_22139C.1
atggccgaccgggtgaccattattccgccgcgtgacccatggcctttctccacagtcacggcggatgacctagaggccctcgttgctgagggtttacttcgccctctctctgatgagaggcagccggagtggatgcccccccgagcggagccgccccgtccccgccaccgggtggtgaccgtcaccgccgatgcttggcgctacgggaccccaaatgacagacataagaacctcgagccccttctcaaggccctggaggtgttgcggaaaggagggctcaccgttgtgggagtgattgccgccattcatcgccggagggtgcttcccttggcggagcggcggttgccgctttgggagatgacgccagaggttgacttggagggctcacggatgtcctcggatccccttcctgtcgacgtcctccacgggcgggtggccgtcgcgttgggtaaaccggacgccagcgccctttctcagcccttgatgcgtcccgaccgcggctgtgtgtccctggagaagaagaagaaaaaggacgcgaagaaggctcaggcccgtgagcggacgcgggcccgagacgccttggaaaagctccatcgtcggcaggagagggatgggctcccgagggagccgtcgtcggaaacgcctgacgatgacgacgacgatgaagacgatgacgaagatgacgacatggctgcccgccttggcctcagcccgggtttgaggctaggccaggagtcgtcatgccagcccccgagcaggctggcgtcgtcggttcctggggtcgggacgccgaggtcccggcccgaagagcgggggcagaccgagggggtactcgacccctcggctggggaagtagaggtgaccccggggggtcaggccgaggtgcctgttccccgaaaaccgtcgctcgtgccggcagagcaggagggcgaccctcaggtcgccgtggcagcgcctgggcagtccgtctcccggacgtctagggtgcccaaggcgaggatggtaccaaagctggcggcaaggcggacctcggcggtaccttcgggggtcgagattcgagagacctccccacaggcacggttgatcatggcccggagtggcaagcggagtcatggactgaccgatctggctccccggaaggtccttaagacggtgtcggcttccgcagccggtgccgcgtcgggcctcgccgttcagctgaccttctcgcaagacgccccacagcggggggctcaggcggcaccagttgccgtggagcgagttcccgaggccggctcttctgttgaggcggccgtcgcgctgggggaggcggccggcgcaaacgtagcctcgggcccaccaaacatgccgccggcgctggcgccggctgctgccgaagccgttgtcgtcctggtcgtggagcgacccatcgccgccgatgctgagatggccgaggcgtcgctactcggtgcctcggaggaggggggcgtggaaccgcgacccgtcccgccgagcggcagccttgtccctgcgcggcggagctccgaggggcggcaccagttgctcaggttccggacccgtgaggcttcggatcccttcttcgttcttgacgatgagcgggaggagcagtcttgggacgagctccgcgagtgtgccgaggcaacggtggggtcgctccggtcatccttggaggtcttttgcagggacgtccccaagatcctccaggatctgacggatttgagcgccgccaagtcgtcgttcatccaccgcgaggtcgatgtctggggttcgctgcgatccctgagaacctcgcttgccagggctaccgcgcgcctctcccagcagggcgccgaggtggcggaccttcggttgctctgtgccgatctgggagtagaggcggcagcggcacgcgcagaggtgcagcgacggcagtcggagtttgaccaggtcgccgatgagcgggatcaatctcggggtcgggccactgaggccgaaagccgggccggagcccttgtagcagacctagtcgtagcccaagccgcatcctcggagctgcgtgcccgagccggagagctcgagtctgcccttgatgagtccaccagggcgcttgctcaggcggccgagcagagggaggccgaccacgtggccatgtccgaggccatctcggacttctgccgggtctttggcttcggcgacgtcccctcgggaagctcccctcaaggtcgcctgcaggccttgggtgaccatgtgcgtggcagactccgcgaggcgctacatcacggtgtcaggcgggccttcgccgtgcttgcttctcactacgtcgtggatctggagcgggtcagcgaggggtattgcctccctgacgaagatgaagccgccctggctgaagtccagaggctcgacgcggccgccgcgggctcgagcgcggtgctggcgaccaccttcgaggcagagatcctcccgcctgcgccgtcgtccgaggtcggggtggactttgccgaaggcggggacgaagccgagggcgcggctccttctccgggcaacgcctaa

SEQ ID NO: 99372 - DNA, 605 bp, Zea mays
  Clone ID: MRT4577_2213C.1
ggggcacatcaccctcaggactccaagacgcttcttcttcggagagaagcctgtcacacgtctttggcatcaggaacccaagagagagatcccagggggtgaggctggtgctgagtatgtcgaggagtccaccgacgtattcactgacaaggacaaggctgttgcacatctgaagggaggagccaagaacgttgttatctctgcaccaagcaaatatgcacagatgctaggtgctagagtcaaagaggacatgtacacctcagagttaacattgattccaggctagctagaccacacactgctttgatacccttctataacttcattaattataacttttgcattattgaggaggttgattacaactgaccatgccatcattgtcacccacaacactgttgatggaccctacaccaaggactgaagatgaggcagaactgccagctttaacatcattgccagcagcaccggagctgccaaggcgtgatattaagggtcttcatgaattgaatgagaagctcactgacatgtccttccgggttcccaccgtggatgtgccagtatgtgacctcactgtgagaattgagaagggggactgctatgag

SEQ ID NO: 99373 - DNA, 266 bp, Zea mays
  Clone ID: MRT4577_22140C.1
gagctcacttgtttgcggccgccctttctttttttttttggttgttttaaaagcaatgaagcgcgaagcaccaataatacaaggtgtggtacaaagacccttgccaaactggcgtgaaaaagccacagggtgagccttgcatggcataaacgaactagctctctgattctcatgaattttggagggcatgacccctcttgaaagaatgtacagagaccaagtgggagggtctatctttgcgccggaacagatgaagcgcaagcagc

SEQ ID NO: 99374 - DNA, 1285 bp, Zea mays
  Clone ID: MRT4577_22141C.1
ccggccggggtccatacccgtgcgtgcgctctctctctttctcgtgcggcaactgcgaggccgccgacgcccgacggcagggtgcccaggccttcttcggtcccatcgcgaggccatagttgcatcattcgcctgagacgactgcccaccgccaggactgatctcctcactaggcgcgtagaggtgaagagaataacttgacaatgagcagcataggcacaggttacgatctgtctgtcaccaccttctccccagatggtcgtgtcttccaggtcgaatatgctaccaaggccgtcgacaacagcgggactgttgttgggatcaagtgcaaagatggcattgtcctgggtgttgagaagctggtaacctcaaagatgatgctggaagggtcaaaccggaggatccattcagtgcaccggcactctggcttggctgttgctggtttagcagcagatggcaggcaaattgtttcaaggacgaagtcagaagctgccagttatgaaaaggtctatggagaacccattcctgttaaggaattggctgatcgtgtggcaagttatgttcatctttgcacgctgtactggtggctcaggcccttttggctgcggtgttattcttggaggttatgatagggatgggccacagctctacatgatagaaccctcaggagtttcttataaatactttggtgctgcattagggaaggggagacaggctgcaaaaactgagatagaaaagttgaaactttcagagcttacgtgccgggaaggcattgttgaagttgcaaagataatttatggagtgcatgacgaagcgaaggataaagctttcgagttggagttgagctggatctgcgatgaatcgaaccaccagcatcagaaggttccaaatgaactgttggagcatgccaaagctgctgcccaggctgctcttgaggagatggatgccgactaagagacacgatgatttgcccaaacttggtgttttcggtggtgttgatatctctgatccctttgggggggggggacccactaggggtaggcacatttcaaccgaaaaccgagccgaactggaatcaaggttttttcggtttttcgattcggtgtcggttttcctttcttacgaaccgaagagatcggctcggcttcggtttctatttgctggacaccgatacaaccgaacttactgcagtctaacgtcctgtgtggcgcgcgttcaactggacctggacaatttgcagtgcagccaaaaaaaaaaaaaaagggcgaccgctcgcgatctagaa

SEQ ID NO: 99375 - DNA, 1827 bp, Zea mays
  Clone ID: MRT4577_22142C.1
atggccgaccgggtgaccattgttccgccgcgcgacccgtggcctttctccaccgtcacgacggaggatctggaggcccttgtcgctgagggtttgcttcgccttctctccggtgactcgcagccggagtggatgcctcccccgagcggagccgccccgtccccgccgccggggtatgtcgtgagctttgtctcctttcacgagcgggggttcggagtgccgacaagtcgttttatgcgggcgattctgcatgtctacggggtggagctgcacaacctcagccccaactccatctcgcaagccgccatattcgcggcggaggtagggcatcacaagccttcccggccaccggtcctggaggacgcggtggaccgagctgcgcggagtgttgccgcggagaagaggaaggagaaaaaggacgcgaagaaggctcgggcccgcgagcggacgcgggctcgggacgccttggaaaagctccgtcgtcggcaggagagggatgggctcccgagggagccatcgtcggagacgcctgacgacgacgacgatgaagacgatgacgaagacgacgatgtggctgcccgccttggcctcagcccggatctgaggctgggcctggggtcgtcaagccagcccccgagcgggctggtgccgtcggtatccggggccgggacgtcggggtcccggtccgaagagcgggggcggaccgagggggtacttgacccctcggccggggaagttgaggtgaccccggggagtcaggccgagctgcctgttctccgagaaccgtcgcccgtgtcggctgcgcaggagggcgatcctcaggttgacgtggctgcgcctgggcagtccgtctctcgggcgcctagggcgcccaaggagaggatggtaccgaaggtggcagcgaggcagacctcggtggtacctttgggggtcgaggatctgacggatctgagcgccgccaagtcgtcgttcatccgccgcgaggtcgatgtctggggttcgctgcggtccctgaggaccacgcttgccagggctaccgcgcgcctctcccaacagagcgccaaggtggcggaccttcggttgctctgtgccgatctgggagcagaggcagcagcggcacgcgcagaggcgcagcggcggcagtcggagcttgaccaggtcaccggcgagcgggaccaatctcggggccgggccgccgaggccgaaagccgggctgaggctcttggagtccagttagccgaggcatctgctcgggccggagcctttgcagcagacctagctgtggcccaagccgcatcctcggagcagcgtgcccgagccggaggtcttccgctttggctgttcgcagagctcgaggctgctcttgataagtccaccaaggcgcttgctcaggcagccgagcagagggaggccgaccacgcggccatgtccgaggccatctcggccttctgccgagttgttggcttcgacgacgtcccgtcgggaagctcccctcaaagtcacatgcaggccttgggtgaccatgcgcgtggcagactccgcgaggcgctgcatcacgatgtcaggcgggccttcgtcgtgctcgcttcccactatgtcatggatctggagcgggtcagtgaggggtattgcctccccgacgaagatgaagccgccctagccgaagtccagaggctcgacgcggccgcagcgggcccaagcgcggtgctggcaaccaccttcgaggcagagatcctcccgcttgcgccgtcgtccgaggccggggtggaccttgccgaaggtggggacgaagacgagggcgcggcgccttctccgggcgacgcctga

SEQ ID NO: 99376 - DNA, 2421 bp, Zea mays
  Clone ID: MRT4577_22143C.1
atggccgactgggtggccatcatctcgccgcgcgacccatggcctttctccacagtgatggcgggtgatctggaggatcttgttgctgagggtttacttcaccctctctctgatgagaggcggtcggagtggattccccccgcgagcggagctgctccgtccccaccgccggggtacgtcgtgagcttcgtctccttccacgagcggagattcggtgtgccggcgagccgctttatgcgggcgatcctgcacaactatggggtggagttgcacaacctcagccccaactccatctcgcaggccgccatcttcgtagcggtgtgcgaggggtacttggggatcgccccccactgggacttgtggactcatctcttttccgcggagctttttgcttcgccgatgggggagagaagggtccgcgcggcagtgcgggccggcggctgcatcctccagctgaggcagtcgcgggcgtcgctgtatattcccgccatccttgtgtcctcaaataaagggtggcagcgccggtggttctacctccggaatgacggcgagttgctcccgctgttttcccagcgagtggtcaccgtcgccgccgatgcttggcgccatgggaccccgcacgaaagacagaagaacctcgagccccttctcaaggccttggaggcgttgcggaaagggggactcaccgtcgcgggagtgattgccgccatccaccgccggagggaggtagggtggcacaagccttcccggccacgggtctcggaggatgcggtggaccgagcagcgcagcgggttgccgtggaggagaacaagaagaaaaaggacgcggagaaggcccgggcccacgagcggatgcgggcccgggacgccttggaaaagctccatcgtcggcaggagagggaggggctcccgagggagccgtcgctggaaacgcctgacgacgacgacgacgatgaagatgatgacgaggatgacgacatggctgcccgcctcggcttcagcccggtccccggagccgggacgccgaggtcccggcccgaagagcgggggcagactgagagggtacttgacccctcgaccggggaagttgaggtgaccccggggagtcaggccgaggcgtctgttccccgagagccgtcgcccgcgtcggcagcgcaggcgagcgaccctcaggtcgccgtggcagcgcccgggcagtccgtcccccgggcgtccaaggtgctcgaggcgagggtggtgccgaagctggcggcgaggcggacctcggcggcgccttcgggggtcgagatccgagagacctctcctcaggcacggttgatcatggcccggagcggcaagcgaagccatggcctgaccgatctggctccccggaaggcccttaagacgacgtcggcttccacagccggcgccgtgccgggcctcgccgttcagctgatcttctcgcaaggcgctccacagcggggggctcaggcggcaccagtcgccgtggagcgagttcccgaggccggcttctctgccgaggcggccatcgcgctggaggaggcagctagcgcgggcgcggcctcgggcccacctgacatgtcgtcggtgctggcacctattgctgctgaagccgctgctgtcccagttggggatcgacctgttgctgccgacgctgagatggccgaggcgtcgacgcttggtgcctcggaggagggggggcagggcgccgaggtggcggaccttcggctgctctacgccgatctgagagcagaggcggcagcggcacgcgcagaggtgcaacaacggcagtcggagtccgaccaggtcgccaatgagctagaccaatctcggggccgggctgccgaggccgaaagtcgggctggagcccttgcagcagacctagtcgtagcccaggtcgcagcctcggtgcagcgtggccgagccggagagctcgagtccgcccttgatgagtccgccaaggcgcttgccgaggcgcttgccggggcggccgagcagagggaggccgaccatgcggctatgtccgaggtcgtctcggacttctgccgggtctttggcttcggtgacgtcccctcagggagctcccctcaaagtcgcatgcaggccttgggcgatcacgtgcgcggcagactccgcgaggcgctacaccacggcgtcaggcgggccttcgccgtgcttgcttcccactacgtcgtggatctggagcgggtcagcgagggatattgccttcctgacgaagatgaagccgccttggctgaagtccggaggcttgacgcggccgccgcgggcccgagcgcggtgctggcgaccaccttcgaggcagagatcctcccgcctgcgccgtcgtccgaagccggggtggactttgccgagggtggggacgaggccgaaggcgcggctcctcccccgggcgacgcctaa

SEQ ID NO: 99377 - DNA, 3525 bp, Zea mays
  Clone ID: MRT4577_22144C.1
ttaggcgtcgcccggggaaggagctgcgccttcggcttcgtccccgccctcggcaaagtccatcccggcttcggacgacggcgcaggcgggaggatctctgcctcgaaggtggtcgccagcactgcgctcggacccgcggcggccgcatcgagcctttggacttctgccagggcagcttcatcttcgtcaggaaggcaatacccctcgctgacccgctccaggtccacgacgtagtgggaagcgagcacggcgaaggcccgcctgacgccgtggtgtagcgcctcgcggagtctgccgcgcacatgatcgcccaaggcctgcaggcgactttgaggggagcttcctgaggggacgtcgccgaagccaaggacccggcagaagtccgagacgacctcggacatggccgcgtggtcggcctccctctgctcggccgcctcagcaagcgcctcggcaagcgccttggcggactcatcgagggtgaactcgagctctccggctcgggcacgctgctccgaggctgcgacctgggctacagctaggtcggctgcaagggctccagcccggctttcggcctcgacagcccgaccccgagattggtcccgctcattgacgatctggtcgaactccgactgctgtagtcgcacttctgcgcatgccgctgccgcctctacgcgtgccactgccgcctcggcccttagatcggtgcagagcaaccgaaggtccgccacctcggcgccctgctggaggattttggggacgtccctgcagaaaacctccagcgacgactcgagcgaccccaccgttgcttcggcacactcgcggagctcgtcccaggactgctcctcccgctcatcgtcgagaacgaagaagggatccgaggccccacgggtccggaaccggagcaactggcgccgaccctcggagctccgccgcacagcgacaaggccgccactcggcgggacggatcgcgtctccgcgcccccctcctccgaggcaccgagcgctgacacctcggccatctcagcgttggcagcaaccggtcgctccccgactaggatggtagcggcttcagtagcaacaggtgccagcaccgccggcacgtccggtgaggccggggccacgtccgcgtcagtcgcctcctctagcacgatggctgcctcggcagaagagccggcctcgggaactcgctccacggcaactggtgccgcctgagccccctgctgtggagcgccttgcgagaaggtcagctgaacggcaaggcccggagcggcgccggctgcggaagccgacgccgtcttaagggcctttcggggagccagatcggtcaggccatggcttcgcttgccgctccgggccatgatcaaccgtgcctgaggggaggtctctcggatctcgacccccgaaggcgccgccgaggtccgcctcgccggcagcttcggcaccacccttgctttgggcgccttgggcgcccgggagacgaactgcccaggcactgccacggcgacctgagggtcgctctcctccgctgccggcgtgggcgacgactctcggggaacagacgcctcggcctggctccccggggtcacctcaactcccccggccgaggggtcaagtaccctctcggtctgcccccgctcttcgggccgggacctcggcgacccgactccggggactgacggcccccctctaggtgctctcaacggcatcagcccactcgggggctggcttgacggctcctggcctaacctcaagccagggctgaagccgaggcgggcagccatgtcgtcttcctcgtcatcatcttcatcattgtcgtcgtcatcaggcgtttccggcgacggctccctcgggagcccctccctctcctgccgacgatggagcttttccaaggcgtctcgagcccgcctccgctcgcgggcccgggccttctccgcgtctttctttttcttcttctcctccgcggcaacccgccgcgctgctcggtccaccgcatcccgcgggacccgtggcagggaaggcttgtgccaccctacctccagagtcacgcacccttggtcaaggcgcatcaagggttgggagaaggcgctggtgtccggttttcccaacgcgacggccacccgcccgtggagaacgtcgaagggaagaggatccgaggacatccacgagccctccaagtcagcctccggcgtcatctcccaaagcggcaaccgtcgctccgccaagggaagcaccctccggcggtggatggcggcaatcactcccgcggcggtgagtccccctttccgcaacgcctccaaggccttgagaaggggttcgaggttcttctgtctttcgtgcggggtcccgtggcgccaagcatcggtggcgacggtgaccactcgctgagaaaatggcgggagcaactcaccgtcattccggaggtagaaccaccggcgctgccaccctttattcgaagacgcaaggatggcgggaatatacaacgacgcccgcgactgcctcagctggaggatgcagccgccggcccgcactgccgcgcggacctttctctcccccgtcggcgaagcaaaaagctccacggaaaagagatgagtccacaagtcccagtggggggcgatccccaagtacccctcgcacaccgctacgaagatggcggcctgcgagatggagttggggctgaggttgtgcaactccaccccgtagtggtgcaggatcgcccgcataaagcggctcgccggcacaccaaatccccgctcgtggaaagagacgaagctcacgatgtaccccggcggtggagacggagcggctccgctcacggggggaatccatttcggccgcctctcatcagagagagggcgaagtaaaccctcagcaacaagatcctccagatcacccgtcgtcacggagacaccatgttcggcgcccaccgagggcaacatggcgctttcccccctcctccttgcggaaaggcggcgcaggggcgtatgtaaaaaagttgggtctgtccctgatcgtcctctcgccctgtgcagaggctcgggggctgctctcgcaaacccggcttcggccaaaccgttgacagcgtcaacataccagcccgagaacttggaacccgaccgtgcacccgggctaacagaaggatagcgccgcctgcgccacaccgactgcggtgccacttgacagagtgaggctgacaggcagtcaggcccgacctcaggcgccttaggaagctccgctccgcccgacccagggctcggactcgggctcagccccggaagacggcgaactccgctccgcccgacccagggctcggacttgggctcagccccagaagacgacgaactccgcttcgcgtgaccccagggctcggactcagccctggcctcagctgacggtctccgcctcgcccgacccgggggctcggactcgaccccggccacggaagacagaattgacctcgacctcggaggagcctccacatcgcccaacctagggcgcagaccatccacgtcgacgggaggcgccat

SEQ ID NO: 99378 - DNA, 544 bp, Zea mays
  Clone ID: MRT4577_22145C.1
actgacgcgccgcttcgatgccccccctcggagtcgcgactcgcctcctccgcgccgttccccattcatcctaaaggcctaaaccctagcctccttgctcctgcgctccggtcgccggtgcgtcccctcctccgctggccgccggcgccggtgcaatcacccgccgccgccagtgcatccgtccagggctgcacggccacctgtgcccactgggttgtgcggtcctaacgcaagttcggcgccgaccaccgccgaactgaagccgtctgcccacacccactcgcggcagcaccgccggacggctcccggcactgcgccagtgcgtgctgcctccggtatagcggctgccggatcccgccgcggcacctgcaggcactaatcactaacagttactgcactgttggtatgcgagtcctagtttgctgctcatgctctaagatatgaggaggtctgtggagggatttgaaagaaggcgtcaaaaggtccccggtcaaggctagaccatgacacaagagctaggggtcagaggcttttgagctccagg

SEQ ID NO: 99379 - DNA, 328 bp, Zea mays
  Clone ID: MRT4577_22146C.1
gctcgagcgtgcgacctcatagctctggtatagagtgaccgtaatccaatgcactggccgtccttttacaacggcctgtctgtgaaaaccgtgcagttacccaagttaatggcctggcaggaaatgctcctttaagcacctgcactcatagctaagaggccggcacccatcgcacttgcgaacagaggcgcacgctggatggagactggctcgctccctggtaacctcgcattaatctccgagagtgttgtgcttacccgcacatgaagccgtgcatttgctactactttagaagctgctcttttggatttctaccttagttttttag

SEQ ID NO: 99380 - DNA, 1586 bp, Zea mays
  Clone ID: MRT4577_22147C.1
atggccgaccgggtgaccatcatctcgccgcgcgacccatggcctttctccacagtgacggtgggtgatctggaggatcttgttgctgaggatttacttcgccctctctctgatgagaggcggccagaatggattccccccgtgagtggagtcgctccgtccccaccgccggggtacatcgtgagcttcgtctccttccacgagcggggattcggtgtgccggcgagccgctttatgcgggcgatcctacaccattacggggtggagttgcacaacctcagccccaactccatctcgcaggccgccatcttcgtagcggtgtgcgaggggttcttggggatcgccccccactgggacttgtggacccatctctttttcgcgaagcttttcgcttcgtcgacgggggagagaaaggtccgcgcggcagtgcgggccggcggctgcatcctccagctgaggcagtcgcgggcgtcgctgtatattcccgccatccttgcgtcctcgaacaaagggtggcagcgccggtggttctacctccggaatgacggcgagttgctcccgccgttctcccagcgagtagtcaccgtcgccgccgatgcttggtgccacgggaccccgcacgaaagacagaagaacctcgaaccccttctcaaggccttggaggcgttgcggaaagggggactcaccgccgcgggagtgattgccgccatccaccgtcggagggtgcttcccttggtggagcgtcggttgccgctttgggagatgactccggaggctgacttggagggctcgcggatgtcctcggatcctcttcccttcgacgtcctccatgggcgggtggccgtcgcgttggggaaaccggaccccagcgccttctcccagcctttgatgcgccctgaccaagggtgcgtgactctggaggttggttggcacaagccttccctgccacgggtcccgcaggatgcggtggaccgagcagcgcggcgggttgccgtggaggagaagaagaaaaagaaggacacggagaaggcccgggcccgcgagcggatgcgggctcgagacgccttggaaaagcttcatcgtcggcaggagagggaggggctcccgagggagccgtcaccggatacgcctgatgacgacgacgatgatgaagacgatgacgaggaagacgacatggctgcccgccttggcctcagccctggcttgaggttaggccaggagccgtcaagccagcccccgagcgggctgatgccgtcagtccccggagtcgggacgccggcgtcccggcccgaggagcgggggcaatccgagagggtacttgactcctcggctgggggagttgaggcgaccccggggagccaggccaaggcgtctgctccccgagaggcgtcgcccacgccggcagcgcaggagagcgaccctcaggtcgccgtggcagtgcctgggcagtccgccccccgggcgttcaaagcgcccaaagcaagggtggtgccgaagctgccggcgaagcggacctcggcggcgccttcgggggtcgagatccgagagacctccccccaggcacggttgatcatggcccggagcgg

SEQ ID NO: 99381 - DNA, 280 bp, Zea mays
  unsure (1)..(280): unsure at all n locations
  Clone ID: MRT4577_22148C.1
tgccnngcagcggaagnaagaagccgcaggcnngnngcngncaccaaggcgnagaccgaaccagagnngngcagggancgccgancncngcacccnaaagnnngnngnacgaggaaaaccgganncngnngaacncgcgngggcaaaaagncagngannccngagggaaacngagnngnaaaggaacagggcaangccgccggacaggnnacagngnanccngnaagaccaanncnnnnggnccnngaacaanggaangcagaccaggnnnnggncannc

SEQ ID NO: 99382 - DNA, 2784 bp, Zea mays
  Clone ID: MRT4577_22149C.1
atgcgggcgattctgcataactatgaggtggagctgcacaacctcagccccaactccatctcgcaagccgccatcttcgcagcggtttgcgaaggatatttggggatcgacccccactgggacctgtggactcatttcttctccgtggagctttttgcttcgccgacgggggagagaagggtccgcgcggcagtgcgggccggcggctgcatcctccagctgaggcagtcacgggcgttgcagtatattcccgccgtccttgcgtcctcgaataaagggtggcagcgccggtggttctatctccggaatgacgacgggaggctcccgtcgttttctcagtgggtggtcaccgtcgccgccgacgcttggcgctacaggaccccgcacgacagacagaagaacctcgagccccttctcaaggccctggaggtgttacggaaaggagggctcaccgcggcgggagtgattgtcgccattcatcgccggagggtgcttcccttggcggagcggcggttgccgctttgggagatgacgccggaggccgacttggagggctcgcggatgtcctcggatccccttcccgtcgacgttcttcacgggcgggtggccgttgcgttgggaaaaccggacgccagcgccctctctcagcccttgatgcgtcctgaccgcgggtgtgtgtccctggtgagtgtctgctccttctttctccttgcgtcagatcgcccttggtccttacggccgaggcttttcatctgtctccaggaggtggggtgtcacaagccttcccggccacgggtcccggaggacgcgatggaccgagcagcgcggcgggtcgccgcggaggagaagaagaagaaaaaggacgcgaagaaggctcgggcccgcgagcggacgcgggcccgggacgccttggaaaagctccgtcgtcggcaggaaagggacggactcccgagggagctgtcaccagaaacgcctgacgacgacgatgatgacgaagacgatgacgaggatgacgacatggctgcccgccttggtctcagcctgtgtttgaggctaggcctggagtcgtcaagccagcccccgagcgggctggcgccgtcagttcccggggtcgggacgccgaggtcccggcccgaagagcgggggcagaccgagggggtactcgacccctcggctggggaagttgaggtgactccggggagtcaggccgaggtgtctgttccccgaaaaccgtcacccatgccggcagcgcaggagagcgaccctcaggtcgccatggcagcgcctgggcagtccgtctctcgggcgcccaaggtgcccaaggcgaggatggtaccgaagccggcggcgaggcggacctcggcggtacctttgggggtcgagatccgagagacctccccacaagaacgactgatcatggcccggagcggcaagcggagccatggcctgaccgatctggctccccgaaaagtcctcaagacggcgtcggcttcagcagccggtgccacgccgggcctcgccgttcagctgaccttctcgcaagatgccccacagcggggggctcaggcagctccagttgccgtggagcgagttcccgaggctggcccttctgtcgaggtggccgtcgcgctgggggaggcggctagcgcgggcgtggcctcgggcccaccagacatgccgccggcgctagcgccagccgctgctgaagctgctgccgtcctggtcgtggagcgacctgtcgccgccgacgctgagatggccgaggcgtcgcttcttggtgcctcggaggaggggggcgtggaaacgcgacccgtcccgccgagcggcagccttgtccctgcgcggcggagctccgaggggcggcgccagttgctccggttccagacccgtgaggcttcggatcccttcttcgttcttgacgatgagcgggaggagcaggacgtccccaagatcctccaggatctgacggacctgagcgctgccaagtcttcgttcatccgccgcgaggtcgatgtctggggctcgctgcgatccctgaggacctcgcttgccagggctatcgcgcgcctctcccagcagggcgccgaggtggcggaccttcggttgctctgcgccgatctgagagcaaaggcggcagcagcacgcgcagaggtgcagcgacggcagtcggagttcgaccaggtcgccgatgagcgggatcaatctcggggccgggccgccgaggccgaaagccgggctggagcccttgcggcggacctagccgtagcccaagtcgtagcctcggagcagcgtgcccgagtcggagagctcgagtctgcccttgatgagtccaccagggcgcttgcccaggcggccgagcagagggaggccgaccacgcggccatgtccgaggccatctcggacttctgccaggtctttggcttcggcgacgtcccctcaggaagctcccctcaaagtcgcctgcaggccttgggtgaccacgtgcgcggcagactccgcaaggcgctgcaccacagcgtcaggcgggccttcgccgtgcttgcttcccactacgtcgtggatctggagcgggtcagcgaggggtactgcctccctgacgaagacgaagccgccctggctgaagtccagaggctcgacgtggccgccgcgggcccgagcgcagtgctggcaaccacattcgaggcagagatcctcccgcctgcgccgtcgtccgaggccggggtgaactttgccgaaggcggggacgaagccgagggcgcggctccttctccgggcgacgcctaa

SEQ ID NO: 99383 - DNA, 4686 bp, Zea mays
  Clone ID: MRT4577_2214C.1
atggatcctaagggaaaggggatagtggtcaacaacgagaaggagtctatcttcaacgagccgaaggatgacaagcctaccgactcgggttcaagccacaagcgcaaagacgggaagaagaagaagacaaggcgcatcaaggagatcgtctactacgacagcgacgaatcttcctcttcccaaaaggacgacgacgactacgagaaaaagaaaacggtcaattcaaacttttcttttgattactctcgtattcctcaaagtacaaatgctcatttattatctgttccacttggtaaacctcctcattttgatggagaagactacggattttggaatcacaaaatgcgtagtcacttgttctctctccatcctagcatatgggagattgtagagagtggaatgcactttgatagtacggaaagtcccatgtttattaatgagcaaatccataaaaatgcacaagctactactgttcttctagcttcattgtgcagggatgaataccacaaagtgagcggcttggataacgccaagcagatctgggacaccctcaagatttcacatgagggaaacgacgtcaccttgctcactaagatggagttggtagagggcgagcttggacgattcgcgatgataaggggcgaggagccgacacaaacatacaaccggctcaagacccttatcaacaaaataaggagctacggaagcacgcgatggacggaccacgacgtcgtccgattgatgctaaggtcctttaccgttcttgatcctcacttggtgaataacattcgtgagaatcccaggtacaccaaaatgtcgcccgaagaagtccttggaaaattcgtaagcgggcgaatgatgatcaaggaagcgaggtacgtggacgacgctctaaacggtccaatcaatgagcctcaacccgttgctctcaaggcaacaaggagcaaggaggcgttacccagcaaggtagcacaaattgaggccgccagacttaatgatgaagagatggccctcatcatcaagagattcaagacagcgcttaagggtcgcaagggacagccaagcaagaccaaagccaaggggaagcgctcatgtttcaaatgcggtaagattggtcattttattgctaactgtcccgataatgaaagtgaccaggaacacgggagcaagagggaaaagaagaaaaattacaagaaggccaagggcgagacacatctaggaaaggagtgggactcggattgctcctcctccgactccgacaatgaaggactcgccgccaccgccttcaacaagtcatctctcttccccaacgagcgtcacacatgccttatggcaagggagaagaaggtatgtagtcgaaactctacttatgcttcttcaagtgaggacgaatctagtgatgaggatgaaatagattattcatgtttatttaagggcctagatagaaccaaggtagataaaattaatgaattaattgatgccttgaatgataagaataggcttttagaaaaacaagaagatttgttgtatgaagaacatgataaatgtgtagaagcacaaaaatctcatgctttagaagttaaaagaaatgaaatgctttcttgtgaattatcttcttgccatgagacaatttctagcttaaggagcattaatgatgatttgaatgctaagatagaaatagctagtaaatcaacaacttgtgtagaaaatgttgttatttgcaatagatgtaaagactttgatattgatgcttgtaatgaacacatagcttctattgcaaagttaaatgatgaaatggctagtcttaatgcccaacttaaggctagcaaaagtgattttgataaactaaaatttgctagggatgcctacacgattggtagacacccctcaattaaggatgggcttggcttcaagagggaagccaagaacttaacaagccataaggctcccatcttcgccaaggagaaagggaaggcccccatggcaagtagtactaaaaagaaccatgcttttatgtacaatgatagaagacagtctcataggagttgtaatacttttgattcacatgcctatgactcttatgcaataaaggataggaagatagttgctaggaaattaggggcaaaatgcaagggtgataaagcttgcatttgggtccctaaggaaattgtgactaaccttgtaggacccaacaagagttgggtttatgcatccgggggctcaagctggattatcgacagcggatgcacaaaccatatgacgggggagaaggagatgttcacctcctacgtcaagaataaggattcccaagattcaatcatattcggtgatgggaaccaaggcaaggtgaaaggtttaggcaagattgcaatatccaatgagcactctatctctaatgtgtttttagttgagtctcttggatataatttactatctgtcagtcaattatgtaatatggggtataattgtctatttacaaatgtagatgtgtctgtctttagaagaagtgatggttcactagcatttaagggtgtgctagacggcaaactttatttagttgattttgcaaaagaggaggccggtctagatgcatgcttaatcgctaagactagcatgggctggctgtggcatcgccgcttagcacatgtggggatgaagaaccttcacaagcttctaaagggggaacacgtgataggtttgactaacgtgcaattcgaaaaagatagaccttgtgcagcgtgtcaagcaggtaaacaagtgggaggagcacatcacagcaagagtgtgatgaccacttcaagacctctggagctgctgcatatggacctcttcggacccgtcacctatctgagcataggaggaagtaagtatggtttagttattgtggatgacttttcccgcttcacttgggtgttctttttgcaggataagtctgaaacccaagggaccctcaagcgcttcctaaagagagctcaaaatgagtttgagctcaaggtgaagaagataaggagcgacaacgggtccgagttcaagaaccttcaagtggaggagtttcttgaggaggaagggatcaagcacgagttctctgctccctacacaccacagcaaaacggtgtggtagagaggaagaacaggacgctcattgacatggcaaggatgatgcttggagagttcaagactcccgagcggttttggtcggaagccgtgaacacggcttgccacgccatcaaccgggtctaccttcatcgcctcctcaagaagacgtcatatgagcttctaaccggtaacaaacccaatgtgtcttactttcgtgtatttgggagcaaatgttatattcttgtgaagaaaggtagaaattctaagtttgctcccaaagctgtagaagggtttttgttaggttatgactcaaatacaaaggcgtatagggtcttcaacaaatcatcgggtttggttgaagtctctagcgatgttgtatttgatgagactaatggctctccaagagagcaagttgttgatcttgatgatgtagataagaagatattccaacggccgcaatacacaccatggcgattggagaagtgcggccacaggaacaaaaggagcaagatcaaccttcttcctcaacaatggtgcattccccaactcaagatgatgaacaggttcatcaagaggaggcgtgtgatcaagggggagcacaagatgatcatggtagaagaggcgttgctagatccggactgggtgttggccatgcaggaagagctcaacaacttcaagagaaatgaagattggacactggtgcctcgtcccaagcaaaacattgtgggaaccaagtgggtgttccgcaacaaacaagacgagcacggggtagtgacaaggaacaaagctagacttgtggcaaaaggttatgcccaagtcgcaggtctggactttgaagagacttctgctcctgtggctaggctagagttaattcgcatattgttagcctatgctgctcaccattctttcaggttgttccaaatggatgtgaagagcgctttcctcaacgggccaatcaaggaggaggtgtacgtagagcaaccccctggctttgaggatgaacggtaccccgaccacgtgtgtaagctctctaaggcgctctatggacttaagcaagccccaagagcatggtatgaatgccttagagactttttaattgctaatgctttcaaggttgggaaagccgatccaactttattcactaagacttgtgatggtgatctctttgtgtgccaaatttatgtcgatgacataatatttggttctactaaccaaaagttttatgaagaatttagcagggtaatgactcagaaattcgagatgtcgatgatgggcgagttgaactacttccttgggttccaagtgaagcaactcaaggatggcaccttcatctcacaagcgaagtatacacaagacttgctcaagaggtttgggatgaaggacgccaagcccgcaaagactccaatgggaaccgacggacatgtcgacctcaacaaaggagactccgactatgctggatgtaaggtcgataggaagagtacattggggacgtgccaattcttaggaaggtccctggtgtcgtggagttctaagaaacaaacttccgttgccctatccaccgttgaggccgagtatgttaccgcaggataa

SEQ ID NO: 99384 - DNA, 3357 bp, Zea mays
  Clone ID: MRT4577_22150C.1
atggggcgagtggttggcggggcggccgttgcgcgtgcgcgagccgttcgaggaacggctgtttcgcttcgcgtttttgaatcccgtgtccggttcgggcggaacgttggaaccggtctcgccttggtctttatatacccgggagagggtctggtgacggttctttgctccgcttcctgcctccctcttaggttttcgcaacccgagagacttagccagagaagaggaaaccgcccttcctgccccttgcgccgccatcccttccgctcggtgatggctgaccgggtgaccatcatctcgccgcgcgatccatggcccttttccacggtgacagcgagtgatctggaggatctggtcggcaagggtttgcttcatcctctcaccgatgagcagcgaccggaatggattcctcccgtgggcggagtcgctccgtccccaccgccggggtacatcgtgagcttcgtctccttccacgagcggggattcggtgtgccggcgggccgcttcatgcgggcgatcctgtaccactatggggtggagttgcacaacctcacccctaactccatctcgcaggccgccatcttcgtagtggtgtgcgaggggtacttggggatcgccccccattgggatttgtggacccatctctttttcgtggagctttttgcctcgccgacgggggagaggaaagtccgcgcagcggtgcgggccggcggctgcaccctcctgctgaggcagtcgcgggcgtcgctgtacattcctgccatcctcgcgtcctcgaacaaggggtggcagcgccggtggttctacctccggaacgatggcgagttgctcccgccgttctcccagcgagtagtcaccgctgccactgacgcttggcgccacaggactccgcacgaaagacagaagaacctcgagccccttctccaagccttggaggcgttgcggaaggggggactcaccgccgcgggagtgattgccgccatccaccgtcggagggtgcttcccttggcggagcgacggctgtcgctttgggagatgaccccggaggctgactgggagggctcgcggatgtcccctgatcctcttcccttcgacgccctccaatggcgggtgtccgttgcgttggggaagccggacccccacgccttctcccagcttttgatgcgccccgaccgagggtgcgtgactctggttgctcctggttcttatgatcggggtttttccccccttcttccggaggtggggtggcacaagccttccctgccacgggtcccgcaggacgcggtggaccgagcagcgcggcgggtcgccgcggaggagaagaagaagaagaaggacgcagagaaggctcgggcccgcgagcggaggcgggctcgagacgccttggaaaagctccgtcgccagcaggagagggaggggctcccgagggagccgtcgccggaaatgcccgacgacgacgacgatgatgaagatgatgacgaggaggacgacatggccgcctgccttggcctcagccccggcttggggtttggccaggagccgtcaagccagcccccgagcgggctgacgccgtcagtccccggagtcgggacgtcggagtcccgacctgaggggcgggggcaacctgagacggcacctgacccctcggctggaggagccgaggtgaccccggggggccaggctagggcatctgctccccgggagccgccgctcgcgccggcagcgcagggaggcgaccctcaggtcaccgtgacagtgcctgggcaatctgccccccgggcgtccaaagcgagggtggtgccaaagttgccggcgaagcggacctcggcggcggttccgggggccgggatccaagagacttccctccaggcacggtggatcatggcccagagcggcaagcgaagccatggcctgaccgacctggcaccccggaaggcccttaagacgacgccggcctgtgcggccagcgccgctccgggccttgccgttcagccgaccctctcgcaaggcgttccacctcagggggctcgggcggcaccggtcgccgtggagcaggttcccgaggctggctcctctgccgaggcggccattgtgataggggaggcggctgacgctgacgtggtctcgagcccaccggacgtgccggccatgccggcgcctaccgctaccgaagtcgccgccatcccagccggagagcgaccggttgctgccgatgtcgagacggcggatgcgtcggcgcttggtgccttggaagaggagggcgtggaggcgcgatccatcccgccgggcggcagcctcgtcgctgcgcggcagagctccgagggccggcgccagttgctccggttccggacccgcgaggcctcggaccccgtcttcgttctcgacgatgaacgggaggaccagtcctgggatgagctccgcgagtgtgctgaagcaacggtggggtcgctctggtcgtcgctggaggttttctgcagggacgtgcccaaaatcctccaggatctgacggatcggagcaccgccaagtcatcgttcatccgccgcgaggtcgacgtctggggctcgctgcgatccctgaggacctcgctcgctggggctactgcgcgcctttctcggcagggtgccgaggtagcggacctccagttgctctgtactgacctgagggccgaggcgacagcggcgcgcgcggaggcggccgcggcgcgcgcagaagcgcaacggcagcggtcggagttcgaccgggtcgtcgaggagcgggaccaatctcggggccgggctgccgaggccgaaagccgggctgaaacccttgcagccgacttagccgtagcccaggtcgcggcctcggagcaacgtgcccgagccggagagctcgagtccgcccttgatgagtccgccaaggcgcttgccgaggcgcttgctggggcgggcgagcagagggaggccgaccacgcggccatgtccgaagccgtctcggacgtttatcggatccttgacttcggcgacgtcccctcaggaagctcccctcaaagtcgccttcaagccttgggtgattacgtgcgcggcagactccgcgaggcgctacaccacggcggcaggcgggccttcgccatgctcgcttcacactacgttgtggacctggagcgagttagtgaggggtattgtcttcctgatgaagacgaagctgccctggcagaagtccagcggctcgacgcggtcgccgcgggtccgagcgcagtgctggcgaccaccttcgaggcggagatcctccctcctgcgccgtcgccggaagccgagatggactttaccgaaggcggggacggagctgaaggcgcggctccttcccgaggcgacgcctaa

SEQ ID NO: 99385 - DNA, 246 bp, Zea mays
  unsure (1)..(246): unsure at all n locations
  Clone ID: MRT4577_22151C.1
cagactcntgggcgaacgcgttacgccttcctttttttttttttttccacacgacattgctgttctccaatgactcatcttaacacacctcccttatattttaacaaacatgcctccccaaccaaaattcacacctaacaatggttttccaccttatcaatctctttaaatacattcctcatagccaaacatatttgttttccactcttttcaatttacactaaccataaaattttattctaaatt

SEQ ID NO: 99386 - DNA, 314 bp, Zea mays
  Clone ID: MRT4577_22152C.1
ggggaaattagtttgctagttttgattactctgttgcccctctgtttttacacgaaataacacgttgaccgaaactgggttccttttgttaaacagaaacaagcgatttgctggccacaaggcttaaacaggccatgcaattcttttgggtttaataacaacctagcgatcaaacttgttaaagcgctccatgcttcccatggatgaacctcgtttcgaggggcgcttattaatgatgagtgaaaaaacgggtggcttttggacatgcttaaacgctgccttttcgatacgtcgcgttttggaatctccatgtt

SEQ ID NO: 99387 - DNA, 402 bp, Zea mays
  Clone ID: MRT4577_22153C.1
atggccgaccgggtgaccatcatctcgccgcgcgacccatggcctttttccacggtgacggcgagtgatctggaggatcttgttggcgagggtttacttcaccctctcaccgatgagcggcggacggaatggattccccccgtgggcggagccgctccgtccccaccgccggggtacatcgtgagcttcgtctccttccacgagcggggatttggtgtgccggcgagccgctttatgcgggcgatcctgcaccactacggggtggagttgcacaacctcagccccaactccatctcgcaggccgccatcttcgtagcggtgtgcgaggggtacttggggatcgccctgtcggtgttttgggtccgaccgcacacccggggttgcccctcaaggtgtttttag

SEQ ID NO: 99388 - DNA, 373 bp, Zea mays
  unsure (1)..(373): unsure at all n locations
  Clone ID: MRT4577_22154C.1
gacccacgcgnccggcaaggggccaggccgccagcgacacgggagccgggggacgacgacgngcnccgngcggggcagcggcncancggaccccagggcnaccncgccgccaccaaggcgcagggagaaggcnnccagaacancgcccccgagacgaacccngacaccanggncagccacgncgccgggaagagggccgnccngagcgacnngccggccggcgncagcgccagcncgnangccancnccanggaggaagcngcagagcncaagaacgggaggaagcangagcnggcggngcnnacnccngcnggcagnggcagcnaccaacaaggncaagcnggcagcgcccaacaggaggcacaaccccaga

SEQ ID NO: 99389 - DNA, 1272 bp, Zea mays
  Clone ID: MRT4577_22155C.1
ttgggtacctcgaggccggccgggggctccttgcctttgttctgttctccattcgcgaaaggctcgcagcaaaaccacgccatcgatcgccgccaccagtccagcatcctccgatcgactacgtactcccacccactccggcagcagcgaggcctctctgtctgtgcgcggcgtggctgtcgtcgatctctgcctggcgggcggccggcatggggaggtccccgtgctgcgagcaggcgcacaccaacaagggcgcgtggaccaaggaggaggaccagcgcctcgtcgcctacatcaaggcccacggcgagggctgctggagatcgctaccaaaagccgcaggtctgctgcgctgcgggaagagctgccggctgcggtggatcaactacctgcgcccggacctcaagcgcggcaacttcaccgaggaggaggatgacctcatcatcaagttccacgagctcttcggcaacaagtggtcgctcatcgccgggaggctgccgggcaggacggacaacgagatcaagaactactggaacacgcacatcaagcgcaagctcctcgcccgcggcatggacccgcagacgcaccgcccgctcgccagcgcgaccgcggggcagcagcattaccagctgcaggagccgcagaagcgagcggccggcggcggtccagcaggccatccgcaccaggaccacttggaggtcgtcgtcatctccaactcgccggacgaggcctacagccgtagcagcgacgacgagccgcggtccgccacgccgccgcggcgccacctcgacatcgacctcaacctgtccatcagcctagcggcctaccagccgccggaggaaaccggcatcatcaagcagccactggtgatgaagcaggagcaggaaacggcggcgggcggcaccaatgccgcggcggtgtgcctgtgcctcaacagcctcgggtaccggccgggcgtcgagtgcgtttgcggcgacggcagctcctcctcctcctcctggcactcccactcccactcccaccaatgggctctgaattttttacaggcggcggcgccctgctacagaggccaatagtgtagtaagagcgatcagtgacatcattaaaatgggagcgttattacgatcgagactgagggtgagggaggggggcagagctgagcagggatagtagttaactacagctagtagtagtagtagtacgtaaaagacacacatgcttaggctttaacaagtctctgaaacacgcatcatgggttatgagttgtgctct

SEQ ID NO: 99390 - DNA, 768 bp, Zea mays
  Clone ID: MRT4577_22156C.1
tgcacgtcgactctagaatactgcaagttaaataatcatatcagttgtagtataaaatatatatggtacgacaaataatactattatatgcaaaatttggtggacaaaatgcgccataatattattataaatatgccaatctaaatagacttaattgatgtcgaacaaacattatcaatatcgcacaaattatttctaaagaatcaatatagactcttttgacgaccgtacactaatctattcttttttagcgatattgattagtctctagtgtatgtttgcacaacatcaggtaatatcctcatgagaaattgagataatgaaaggttgggtttagaaaattgagtcagccaaaactgagaagaaacagctaaggttgacctcagttagtaggtagcagtggcttaacaatagcagtttttagttaccagtggcttaagctagcaaatagcagtttaccaagtttgaacaagttctcattagcaagtagtagtggcttagcagtatcagttaagcaagttgcttagtagtagcatgtttcagtttagcagtagcatgttttcgagactgatcagggcaaagcaactgattctagccaataggaggttttaaggttgcaagggaaaatgggtatgaccggtgatggtaagattctgtcaagtcaaactgaggtggatggcaaggctggtaatggtaggattccaataaagaggtgttataaagctcctgccgaagaaaaaaggcgctgtgatggagagtaatgattgc

SEQ ID NO: 99391 - DNA, 856 bp, Zea mays
  Clone ID: MRT4577_22157C.1
ctaaaagatattaagcttagtagattcatcttatcttgaaagatacttcattaccttagtagactcaggtacccttgaaaagatttcgggagatctaactgacctcaaaagattctaccttgtacttatggattcatcttgccctaataagcatattaaccccacactagtaacaaccatgatctaatccaaagtaattagatattatctagtctaatctagttataccatctaatctaatacgatccaatctaaagtgagttaattaacggactagttaatactagtgaaatagattagatcctgctggccatgttttaacttaaattagtacatcagaccaaaccacctatgaacaaataacttaccagcatattcatggtgaccacccatcccatcctagatgttgccataatacacttatcttatgccaccaacctgttaaccatctgtccttacctacaagttatcctaactatatgtccctaattcggataaagacttcaagaacgaagatcgaagatgattgacctcatccaatcaaggaaggataagattaaagctagatcttcaaaagtaatcaagatacacaatcttgaatagaatctttcctagacctaccctttcttaaccaaacctatctatgctctaaagacatcttctatcctacataataaagtggacatacatatatatacccacgctctcctaatcactcaccgaagaaaaaaaaagagaaactcttgatttttaaactaattagaaactaaaagctaaattacaaatcactcttcctataccctctttcttacaaatctcgaggacgagatttctgttaggggggtaggatttgtaa

SEQ ID NO: 99392 - DNA, 282 bp, Zea mays
  Clone ID: MRT4577_22158C.1
gcgcggcggctggtggtggtgaggataacctggagctgataccaggtgtcatggagcttctgtccatggggatatctgtcttctccggcgaggttatatccctctgccgcaggcttggttctagggtagcagcgctaggcgcttgagagtcattgcaagagagagagattggtttaataatatattcctccttcctttgcctcctgcgtacaggcctatatataggccaccggttgaccaactaggcaaccactaattaggcaagtgactaattggaattat

SEQ ID NO: 99393 - DNA, 714 bp, Zea mays
  Clone ID: MRT4577_22159C.1
cgcggcgctgcgtgggcggagcgtgggggaggccgtccggggcgacgccgagcaccggagggtggtcaacgccggcgcccacccgcggacgcccttctacggggagttcctgcgcgcggccaaggccgtgtggatgctgcacctgctagccttcgcgctggagccgccgcccagccacttcgatgccggacgcggtgcggagttccaccaggagtacatggagagcgtgaccggcgcgccaccgcacggcggcgcgggcctggtcgtcgggttcgccgtcgcgcccgggttccggctggggaacggcgccgtcgtgcgcgcccgggtctacctggtgccgcgtggtggccgaccgtgacagacccatgcatggcgtgacagaccgcgtggtagcgttgcatagcgccgcggcccacggatcacctccgagagttgttggtgggtgccaatgcgcaccctgctggagcctggagctggacctgcggagtagctgctggctggctgcgttggtgaagaacagacaaaggctcatagctactgtactagtggctccgtagattttatttcattttacttctccttgttaatctcaaaaaaagtaataatcgccatgtgtaagaggactttgaatttaattctcgcatcaacatcgtttgtaatcatcaccttgagatttgactttgtagttaagagggacagttaagttcagcagtg

SEQ ID NO: 99394 - DNA, 2577 bp, Zea mays
  Clone ID: MRT4577_2215C.1
atgacgcttataatcaagcgcttcaagaccgcgcttaaaggacacagggagtaccccaacaagaacaaaacaaggggaaagcgctcctgctttaaatgcggtaagactggtcactttattgcaaattgtcccgataatgatagtgaccagggacaagaaaagagcaggaagaaggagaaaaagaagaactacaggaaggcaaagggtgaggcgcaccttggaaaggaatgggactcagactgctcctcttccgactctgacgacgaaggacttgctgcctcagccttcaacaaatcctcactcttccccaacgagcgtcatacatgccttatggccaaggagaaaaaggtttatgcatccgggggctcaagctggattatcgacagcggatgcacaaaccacatgacggaggagaagaagatgttcacctcctatgtcaaaaacaaggattcccaggatacgatcatctttggagatgggaaccaaggaaaggtcaaaggcttgggcaagatagccatcaccaacgagcactccatatcgaatgtatttctagtagagtcgcttggttacaaccttctgtctgataaatcagaaacccaagggaccctaaagcgcttcctaaggagggctcaaaacgaatttgagctgaaggtgaaaaagataaggagcgacaatgggtccgagttcaagaatctgcaagttgaggagtatcttgaggaggaaggagtcaagcacgagttctccgctccctacacaccacagcaaaacggtgtggtagagaggaagaacaggatgcttatcgacatggcgagaacgatgcttggagagttcaacacgcccgagcggttttggtcggaagttgtgaacacagcttgccacgctataaaccggctctatctgcatcgccttctcaagaagacctcctacaaactcctgaccggtaacaaacccaacgtctcctactttcgtgtatttgggagcaaatattacattctggtgaagaaaggtagacattctaaatttgctcccaaggtagtagaagggtttttactaggggtagaagaggccttgcaggatctggactgggtgttggccatgcaggaagagctcaacaacttcaagagaaatgaagtttggagcctggtgccacgtccaaagcaaaatgttgtgggaaccaagtgggtgttccgcaacaagcaagacaagcacggggtggtgacaaggaacaaggcgagacttgtggcaaaaggttatgcccaagtcgcaggtttggactttgaggagacttttgctcctgtggctaggctagagtctattcgtattttgttggcctatgccgctcaccattctttcaggttgttccaaatggatgtgaagagtgctttcctcaacgggccaatcaaggaggaggtctacgtagagcaaccccctagctttgaggatgaacggtaccccgaccacgtgtgtaagctctctaaggcgctctatggacttaagcaagccccaagagcatggtatgaatgccttagagactttataattgcaaatgctttcaaggttgggaaagccgatccaactttattaactaaaacttgtgatggtgacttatttgtatgccaaatttatgtcgatgacataatatttggttctactaaccaaaagtcgtgtgaagagtttagcagggtgatgactcaaaaatttgagatgtcaatgatgggcgagttgaactacttccttgggttccaagtgaagcaactcaaggacgacaccttcatctccaaaacgaagtacacgcaagatttgatcaagcgattcggaatgaaggacgccaagcccgcaaagactccaatgggaaccgacggacatgtcgacctcaacaaaggaggtaagtccgttgatcaagaagcataccggtctatgataggttctttgctttacttatgtgctagtagaccggatattatgctaagcgtatgcatgtgtgctagatttcaatccgacccaagggagtgtcaccttgtggccgttaagcgaattcttagatatttagttgctacgccttgcttcgggatctggtatccaaaggggtcaacctttgacttaattggatactcagactccgattatgctggatgcaaggttgataggaagagtacatcagggacgtgccaattcttaggaaggtccctggtgtcttcgagctctaagaaacaaacttctgttgccctatccacctctgaggccgagtatgttgccgcaggacaatgttgcgcgcaactactttggatgaggcaaaccctcagggactttggctacaatctgagcaaagtcccactcctatgcgacaatgagagtgctatccgcatggcggataatcctattgaacacagccacactaagcacatagacatccggcatcactttttgagagaccaccagcaaaagggagatatcgaagtgttttatgttagcaccgagaaccagctagccgatatctttaccaagcctttatatgagaagaccttttgtaggctgcgtagtgagctaaatgtcttagattcgcgtaacttggattga

SEQ ID NO: 99395 - DNA, 397 bp, Zea mays
  Clone ID: MRT4577_22160C.1
agacaaagtgtttgagcgattttgtttattttttagcatctcaacaaatacaaggcctgaataaagcaattaataaataattaaataaataaaacaaatatgtattcatgctgataatctcggctgttgcatttatatgtgaacggttaaactgggatttgaatttggaattggatatttaaattagaacaaaaataggaaatagaaacaaggaaaggaaaaaaaaaaagaaaaagaaaagaactcttacctaggccgcaacccctatggcggcccaatatacctcacgtgacgctagcccaacccgggagagttggcgtcaactggtgggcccgtgcggaagccgctcatgccctcccgcgtaaacgcacggtggttgtatggcgggggccaccta

SEQ ID NO: 99396 - DNA, 827 bp, Zea mays
  unsure (1)..(827): unsure at all n locations
  Clone ID: MRT4577_22161C.1
ccggccgggcgaaatgctcgcccgcggcgtgcgccccacggtggtgacgttcaacacgctggtggggtcggcgtgccgggaaggggagctggccgcggcggagcggctcgtggacgagatgacgcgccggggtgtggcaccgaacgccgtgacttacgccctgttaatgcaggggctctgcgacgccgggcggtacgacgacgccaagaagctcttgttcgacatggagtaccgggattgccagcccgatgtggcgaactacggcgtgctgatgagcgcgtgcgcggcgtgtggggacgccgacggcgttaaggggctgatctccgacatgcgcaagcggaagatgaagcccgacgacgcgagctacaacgtcctgatcaggtgcctctgcgacgccggcagggtcgacgaggcacatagggcgctggtcgagatgcagctcaaggatggaacagcgccgagcgccgccacctaccgcgtcctcctcgacgggtgctgcgaagcgcgcgacttcgacctgngtctgcgagtttttaacgcgatgcttgcgagcggccactgctctctgccccccacgttcaggcggctggtgagagggctcggcgaggacggcaaggcggaggaggcctgcttcgtcttggagcagatggggcagagggggatgcggctggatgcacaagggtggcagtctgtcgctgcatgcgtttgcagcagcatcagcgcaagtgagatgaagctcgtcgatcacctgatgtcgtcgtcttgatactcagttcgagtgggccatcttcagcattcgtgtaaacgtgcaaatattttttatacta

SEQ ID NO: 99397 - DNA, 1950 bp, Zea mays
  Clone ID: MRT4577_22162C.1
ggaaaggcaaaggagaaaatttcgtagcaataaataacaaaggagaaaatttcgtagcaataaataaataaataaatagattaataaaagaaaggtggcgtagaggataggaggagaaccaaggttgcgtctcgaaggttcttgcctcgttgggaagggatggcgtcggaggtggaggacgaggcggcgacgccggtggtcgccaacggtgcagccgacgtccgccggatgagggaccaggcgaaggcaattctgtccacgcaggccgtcaggatcgccaccaaggccgagcagcatgagcgcttcatctttaaggtcacacacttgctgggtgttcctggatttagggccaccaaggacctcttgggtgagcgattcatctttatgctaacacacttgctgggtgttcttggatttgggggattttgctatctcttgggtgccagaccacaggatgtgccatatgtgtactgcctgttctatgtcatatttgttccgctccgctggatttactaccgctacaagacatggcattactaccttctggacttctgctactatgccaacacctttctccttgtaatgattctcttctacccagaggatgaaaaactttttatggtttgcttctcgtttgcagagggtccgcttgcttgggcattaattgtgtggcgttgcagcttggttttcagttcatttgacaaacttgttagtgtcctgatacatctcttacctgggattgttctattcactatccggtggtggaatccacaaacatttgctgccatgcacccagaaggaagagatgctagagtcacatggccatatgtggaggacaaatcatatctgtggacatggcttttttttgttccgctagctgcttacaccctgtggcaacttatgtatttcctcatagttaatgtcctgcgtcgacagaggttgttaagggaccctgaagtcatgacatcctacagggagctctcgaagaaagcacagaaagcgaacaacatctggtggaggctgagcggactgctgggtgaccggaaccggcaggtcatgtacatactgctccaggcgctgttcacagtggcaacaatggcactgaccgtacctatattcctgtcctaccggatgcacgtggtgttcctgatactcaaggtgtgcgcgtcgacatggaacggtggcagcttcatcttggaggtgatgcctcggcaagtagtgcagaagcagctgaagaaactggacatgaagcccatggaacaggggagctcgacacaaggtgcgccaggtggtgatggtggcacattgggtaaccaccaccagcacacatccgaggagcatatccaggagtgaggaaattgaagctggatgtaagattagattttgatgttcactgacacaacctttgttgtcatcgagtgcgctttgtgttggagtttttctttagttcttcccagtttgtgagttgtgacatctagtcatctataggtttataggctggacgatatggggtgagagattgtgcgtgcccatcttttgtcgggcttgggcaaagatatgtcgagatgtttactttctctgtagaatttcgtgaagctgttgcattgttcgtttgaagatggcgacgatgttcagatgatgcttcatgttgaaggacatatctttatttgcttcattgtacccagattttatttgcttcatgttgaaggacagactatgatgatgcgtgctgaggtgatttgcttattttatttgctgcgtgcaagaaaaggttcctgggagatgccctgtaaatgcagtgggtgaccacctgtgttgactgggaccaagtcagaaggtaaaaaataacccctccctttttttttggcttgtaaaaaatgatgtgtagaaggggaaggaagcacggcactggattcaggaacaagttgagtatccgcttctttgttttct

SEQ ID NO: 99398 - DNA, 934 bp, Zea mays
  Clone ID: MRT4577_22163C.1
cccacgcgtccgggaagaaagacgtagaatattggatgggttcagattaaaaaggcagtgaagctcgatggatgcgtgtgatgattatataaaggacattataaatcaatgggagcaaaggaaaggaaaggaaaggaaagggagaaaatttcatatagcaattgtttcgcgtataggagggagaacaaaggtcgcgtctcgaaagttcttgccttgttgggaagggatggcgtcggaggtggaggacgacgcggcggtgccgggcgcgccgctggtcgccaatggtgcagccgacgtccgccggaggagggatcaggcgaaggcgattttgtccaagcaggccgtcaagatcgccaccaaggccgagcagcacgagcgcttcatctttaaggtcacacacttgctgggtgttcttggatttgggggattttgctatctcttgggtgccagaccacaggatgtgccatatgtgtactgcctgttctatgtcatattcgttccgctccgctggatttactaccgctacaagaaatggcattactatctcctggacttctgctactatgccaacacctttctccttgtaatgattctcttctatccgaaagatgaaaaacttttcatggtttgcttctcgtttgcagagggtccacttgcttgggcattaattgtgtggcgttgcagcttggtttttggttcatttgacaaacttgttagtgtcctgatacatctcttacctgggattgttctattcactatccggtggtggggatccacaaacatttgctgccatgcacccggaaggaagagatgccagagtcacatggccatatgtggaggacaaatcatatatgtggacatggctttttttttgttccactagctgcttacaccctgtggcaacttatgtatttcctcatagttaatgtcctgc

SEQ ID NO: 99399 - DNA, 267 bp, Zea mays
  Clone ID: MRT4577_22164C.1
tcgagagctgcaacctgcatcgactgaagagcattcagctgaccaagctattatatagctcatgctagcatgccatgcatcgtatgcagattactagcagacctactcttacctggcagcttactgaacttactgcggtgagtcctaaacttagaggtgttaatgcttatatataatctaaccaaagagttacccagtatggatgtagctattgaacttttattttcttgatgattataaatcctgattttggaatctattgcgcaa

SEQ ID NO: 99400 - DNA, 285 bp, Zea mays
  Clone ID: MRT4577_22165C.1
ttcaagctatgtttccttttggcttactgcgcaagaagggtaacgcgcggacggtgatcattgctaataggcttctcccgtgtttgaaccgggtgctggtctagaaacttgtacatgccattatgactcgactactgatcctactcccaggaacatgcaagcagctgaatgctgctcaagtggtggctgttggccatgatgatcgccacactgctggcaatctaatcccacttgctcttaatgaaggtgacactgtcctcctgcctcattatgatcgcactgaac

SEQ ID NO: 99401 - DNA, 237 bp, Zea mays
  Clone ID: MRT4577_22166C.1
cctcccgtctaggcgacgacgacgacgacgaagcagcgggaggagcataagcgccgccgatcgcgagcctccgagcgtgttctcccatcatcctccgcttcgtgccgcagatccctacgtactccgtccgccagccatggcccgctcctcctcgcagtcgcagtcctccgttggcgctggcgccggcgccggcgcgcgcccggccaccgtggggccgtgcggcacggtcgcggtggt

SEQ ID NO: 99402 - DNA, 409 bp, Zea mays
  Clone ID: MRT4577_22167C.1
acgccgccccacgccccgcccctcaactgcccaacacccacccttcctaacagagcggaaatcaacaagaggaacacctcctcctctcactacccgatctccgtatccggcctcaaccacatccccaaccccaatccccatcaagcgaccaacacaacatctcgaatcccaagcctacaataaaaataaccaactctccttctccgaacaccaccaccatgccaacacacaaatatactaactctgccatggcaaacaatgatacacctccccaagacaaagatgaaggagatgtttcacacaaaaaagtagaaattcaaaaccataataaaatggatgggatgacatcacaacaagacgaggaggcagcaaataacaaaaaccaaagaagaataatgcccacaaaaac

SEQ ID NO: 99403 - DNA, 242 bp, Zea mays
  Clone ID: MRT4577_22168C.1
cctaagcgtccaaacaaaagttctctcgctcgctttttttttaaaaaacaaatgtgctatatgtatatgcgcgcatgcatgctagcagacatctttcctaaaaaaaatttaaataatttccatctcgcattattttagtagctaccattcatgttttctgagtagttgtataaatgctaccaccgtcatcttttgtacccggccggaacaaacgaaaaacacactatctatgctgtgttgtg

SEQ ID NO: 99404 - DNA, 166 bp, Zea mays
  Clone ID: MRT4577_22169C.1
gtattgctatgggatcctgtgccaaaacaatactactacgcaacaggatcccatagcaatacgagaaatgtgcaacgtctcataagaacaggcactgcataaattgaaggaaagaatgatttccatcgatttatgcagtgcctgttcttaagagacgtagcacata

SEQ ID NO: 99405 - DNA, 5157 bp, Zea mays
  Clone ID: MRT4577_2216C.1
atggatcctaagggaaaggggatggtggtcgacaacaacgagaaggagtctatcttcaacgagccgaagaatgacaagtctaccgacttgggctcaagccacaagcgcaaagatgggaagaagaagaagacaaggcgcatcaaggagatcgtctactacgacagcgacgaatcttcttcttcccaaaaggacgacgacgacgactacaggaagacggtcaattcgaacttttcatttgattattctcgtattccacatagttcgaattcgcatttgctttccattcctcttggcaaacctccacactttgatggggaggactacagattttggagtcacaaaatgcgtagtcatttattctctctccatccaagcatatgggagattgtagagaatggaatgaaatttgatagctcggatagccctatgtttattaatgaacagattcataaaaatgcacaagctactactgtgttgctagcctctttgtgcagggacgagtacaataaggtgagcggcttggacaatgccaagcagatatgggacaccctcaagatttctcacgaggggaacgacatcaccatgctcactaaaatggagttggtggagggcgagcttggaaggtttgcgatgataaggggcgaggagccaacccaaacatacaaccggctcaagacccttatcaacaaaataaggagctatggaagcacgcgatggacggaccatgacgtcgtccgactattactaaggtcctttaccattcttgatcctcatttggtgaataatattcgtgagaatcccaggtacaccaagatgtcgcccgaagaagtcctaggaaaattcgtcagcgggcgaatgatgattaaggaagcaaggtacgtggacgacgccttgaatggaccgatcaacgagccgcaacctcttgctctcaaagcaacaagaagcaaggaggcgctacctagcaaggtggcacaaattgaggcggccggacttaatgatgaagagatggctctcatcatcaaacgcttcaaaacggtgctaaagggtcacaaggggcagccaagcaagaccaagacaaaggggaagcgctcatgcttcaaatgcggtaagattggtcattttattgctaactgtaccgataatgaaagtgaccaggaacacgggagcaaaagggaaaagaagaaaaattacaagaaggccaagggcgaggcacatctaggaaaggagtgggactcggattgctcctcttccgactccgacaatgagggactcgccgccaccgccttcaacaaatcagccctcttccccaacgagcgtcacacatgccttatggcaagggagaagaaggtatgtactcggaactctacctatgcttcttcaagtgaggacgaatctagtgatgaggatgaagtagattactcatgtttgtttaagggcctagatagaaccaaggtagacaaaattaatgagttgattgatgccttgaatgataagaatatgcttttagaaaagcaagaggatttgttgtatgaagaacatgataaatttgtagaagctcaacgatctcatgctctagaagttaaaagaaatgaaatgctttcttgtgaattatcttcttgccatgagacaatttctaaattaaggagcattaatgatgatttgaatgctaagttagagattgctagtaaatctacctcttgtgtagaaaatgttgtaacgtgcactaggtgtaaagatattaaccttgatgcttatagtgaacacctagcttgcatttctaaattaaatgaagaggtagctagtcttaatgcccaacttgagactagcaaaagtgattttgataagctaaaatttgcaagggatgcctacacaattggtagacacccctcaattaaggatggacttggcttcaagagagaagccaagaacttaacaagccataaggctcccattcccgccaaggagaaagggaaggcccctatggctagtagtgtgcaaaagaaccatgcgtttatgtaccatgataagagacaaactagaaatgcttataggagttacaatacttatgatgattttgattctcatgacatgtttgcttctagttctttctatgtgcataatagaaatgttggtaggagaaatgctgttcacaatatgcctaggagaaatgttgttaatgttcctaggagagttaatgaaccttctacaatatatcatgccttgaatgcttcctttgctatttgtagaaaggataggaaaatagttgctaggaagttaggggcaagatgcaagggagacaaaacttgcatttgggtccctaaggatatttgcactaaccttgtaggacccaacatgagttgggtttatgcatccgggggttcaagctggattatcgacagcggatgcacaaaccatatgacgggggagaagaagatgttcacctcctacgtcaagaataaggattcccaagattcaatcatattcggtgatgggaatcaaggcaaggtaaaagggttagatgtgtctgtctttagaagaagtgatggttcactagcttttaagggtgtattagacggcaaactttatttagttgactttgcaaaagaagaagccggtctagatgcatgcttaatagctaagactagcatgggctggctgtggcatcgccgcttagcacatgtggggatgaagaaccttcacaagcttctaaagggagaacacgtgataggtttgactaacgtgcaatttgaaaaagatagaccttgtgcagcttgtcaagcaggtaaacaagtgggaggagcacatcacagcaagaatgtgatgaccacttcaagacctctggagctgctacatatggacctcttcggacctgtcgcctatctgagcataggaggaagtaagtatggtctagttattgttgatgacttttcccgcttcacttgggtgttctttttgcaggataagtctgaaacccaagggaccctcaagcgcttcctcaggagagctcaaaatgagtttgagctcaaggtgaagaagataaggagcgacaacgggtccgagttcaagaatcttcaagtggaggagttccttgaggaggaagggatcaagcacgagttctccgctccctacacaccacagcaaaatggtgtggtagagaggaagaacaggacgctaattgatatggcgaggacgatgctaggagaattcaagacccccgagtgcttttggtcggaagccgtgaacacggcttgccacgccatcaacagggtctaccttcaccgcctcctcaagaagacgtcgtatgagctactaaccggtaacaagcccaatgtatcttactttcgtgtatttgggagcaagtgctacattctagtgaagaagggtagaaattctaagtttgctcccaaagctgtagaggggtttttattaggttatgactcaaatacaaaggcgtatagggtcttcaacaaatcatcgggtttggttgaagtctctagcgacgttatgaagaagatgttccgacggccgctatttgaaccatggcgattggagaagttcggccacaggaacaagatgaacgagatcaaccttcttcttcaactatggtgcatcccccaactcaagacgatgaacagggtagaagaggccttgctagatccggactgggtgttggccatgcaagaggagctcaacaacttcaaaaggaatgaagtttggacgctggtgcctcgtcccaagcagaatgttgtgggaaccaagtgggtgttccgcaacaaacaagacgagcacggagtggtgacgaggaacaaggctcgacttgtggcaaaaggttatgcccaagtcgcaggtttggactttgaggagacgtttgctcctgtggctaggctagagtccattcgtatcttgctagcatatgccgctcaccattctttcaggttgttccaaatggatatgaagagcgctttcctcaacgggccaatcaaggaggaggtgtacgtggagcaaccccctggcttcgaggatgaacggtaccccgaccacgtgtgtaagctctctaaggcgctctatggacttaagcaagccccaagagcatggtatgaatgccttagagatttcttaattgctaatgctttcaaggttgggaaagccgatccaactcttttcactaagacatgtgatggtgatttgtttgtatgccaaatttatgtcgatgacataatatttggttctactaataaaaagtcttgtgaagagtttagcagggtgatgacgcagaaattcgagatgtcgatgatgggcgagttgaactacttccttgggttccaagtgaagcaactcaaggacggcaccttcatctctcaaacgaagtacacgcaagatctgctgaagcggtttgggatgaaggacgccaagcccgcaaagactccgatgggaaccgacggacacaccgacctcaacaaaggaggtaagtccgttgatcaaaaagcataccggtcaatgatagggtcattactttacttatgtgctagtagaccagatattatgcttagcgtatgcatgtgtgctagatttcaatccgatcctaaggagtgtcacttagtggcggtgaagcgaatccttagatatttagttgctacgccttgcttcgggctctggtatccaaaggggtctacctttgacttgattggatattcagactccgactatgctggttgtaaggtcgataggaagagtacatcggggacgtgccaattcttaggaaggtccctggtgtcatggaactctaagaaacaaacttccgttgccctatccaccgctgaggccgagtatgttgccgcaggacagtgttgcgcgcaactactttggatgaggcaaaccctcagggactttggctacaatatgagcaaagtcccactcctatgtgataatgagagtgctatccgcatggcggaaaatcctgttgagcacagccgcacaaagcacatagacatccggcatcactttttgagagaccaccagcaaaagggagatatcgaagtgtttcatgttagcaccgagaaccagctagccgatatctttaccaagcctctagatgagaagaccttttgcaggctgcgtagtgagctaaatgtcttagattcgcggaacttggattga

SEQ ID NO: 99406 - DNA, 2169 bp, Zea mays
  Clone ID: MRT4577_22170C.1
atgacggaggtagggtggcacaagccttcccggccacgggtcccggaggacgcggtggaccgagcagcacggcgggttgccgcggaggagaagaagaagaagaaagacgcggagaaggctcgggcccgcgagcggacgcgggcccgagacgccttggagaagcttcgtcgtcggcaggagagggatggactcccgagggagccgtcgccggaaacgcctgacgacgacgacgatgatgaagatgatgacgaggacgacgacatggctgcccgcctcggcctcagcccgggtttgaggctaggccaggagtcgtcaagccagcccccgagcgggctggcgccgtcagttcccggagtcgggacgccgaggtcccggcccgaagagcgggggcagaccgagggggtacttgacccctcggccggggaagttgaggtgaccccggggagtcaggccgaggcgtctgttcctcgagagccgtcgcccacgccggcagcgcaggagagcggccctcaggtcgccgtggcagcgcttgggcagtccgtctcccgggcgtccaaggtgcccaaggcgaggacggtaccgaagctggcggcgaggcggacctcggtggtaccttcgggggtcgagatccgagagacctctcctcaggcgcggttgatcatggcccggagcggcaagcgaagccatggcctgaccaatctggctccccggaaagcccttaagacggcgtcggcttccgcagccggtgccgcgctgggcctcgctgttcagctgaccttctcgcaaggcgctccacagtggggggctcaggcggcaccagtcgccgtggagcgagttcccgaggccggctcttccgccgaggcggccatcgtgctggaggaggcggctggcgcggacgtggcctcgggcccaccagacatgccgccggtgctggcgcctgctgctgctgaagtcgctgccgtcccagtcggggagcgacctgttgctgccgacgctgagatggccgaggcgtcggcgctcggtgcctcggaggaggggggcgtggaaacgcgacccgtcccgccgagcggcagccttgtccctgcgcggcggagctccgagaggcggcgccagttgctccggttccggacccgtgaggcttcggatcccttcttcgttcttgacgatgagcgggaggagcagtgttgggacgagctccgcgagtgtgccgaagcaacggtggggtcgctccggtcatcgctggaggtcttttgcagggacatccccaagatcctccaggatctgacggacctgagcgccgccaagtcgtcgttcatccgccacgaggtcgatatctggggctcgctgcgatccctgaggacctcgctcaccggggctactacgcgcctctcccagcagggcaccgaggtggcggacctttggttgctctgcgccgatctgagagcagaggcggcagcggcacgcgcagaggcggtagcggcacgcgcagaggcggcagcggcgcgcgcagaggtgcaacgacggcagtcggagttcgaccaggtcgccgatgagcgagaccaatctcagggtcgggctgccgaggctgaaagccgggctggagcccttgcagcagacctagccgtagcccaggccgcagcctcggagcagcgtgcccgagccggaggccttgcgctctggccgttcgcagagctcgagtccgcccttgatgagtccaccagggcgcttgccggggcggccgagcagagggaggccgaccacgcggccatgtccgaggccatctcggacttctgtcaggtctttggctttggcgatgtcccctcaggaagctcccctccaagtcgcctgcaggccttgggcgatcacgtgtgcggcagactccacgaggtgctacaccacggcgtcaggcgggccttcaccgtgcttgcttcccactacgtcgtggatctggagcgggttagcgaggggtattgccttcctgacgaagatgaagccgccctggctaaagtccagaggctcgacgcggccgccgcgggcccgagcgcagtgctggcgaccaccttcgaggcagagatcctcccgcctgtgccgtcgtccgaagccggggtggactttgccgagggcggggacgaagccgaaggcgcggctccttccccgggcgacgcctaa

SEQ ID NO: 99407 - DNA, 750 bp, Zea mays
  Clone ID: MRT4577_22171C.1
atggcgccggctgctgccgaagccgttgccgtcctggccgtggagcgacccgtcgccgccgacgctgagatgaccgaggcgtcgctacttggcgcctcggaggaggggggcgcgggaccgcgacccgtcccatcgagcggcagccttgtccccgcgcgacggagctccgaggggcagcgccagttgctttggttccggacccgtgaggcttcggatcgcttcttcgttcttgacgatgagcgggaggagcagtcttgggacgagctccgtgagtgtgccgaggcaacggtggggtcgctccggtcatccttggaggtcttttgcagggacgttcccaagatcctcgaggatctgacggatctgagcgccgccaagtcgtcgttcatccaccgcgaggtcgatgtctggggttcgctgcggtccctgaggacctcgcttgccagggctaccacgtgcctctcccagcagagcgccgaggtggtggaccttcggttgctctgtgccgatctgggagcagaggcagcagcggcacgcgcagaggtgcagcaacggcagtcggagcttgaccaggtcaccggcgagcgggaccaatctcggggctgggccgccgaggccgaaagccgggccggagcccttgcagcagacctagccgtagcccaagccgcatcctcggagcagcgtgcccgagccggagagctcgagtctgcccttgataagtccaccagggcgcttgctcaggcggccgagtag

SEQ ID NO: 99408 - DNA, 455 bp, Zea mays
  Clone ID: MRT4577_22172C.1
gtggggggggggtggtgttttttttttttttttttttttttttttttttttttttttttttttgggaaaaagaaaactctttgttttattggccccttggagggcttaaattttttgggggggctaccccccccggtgcctgggctttgcgggggggggggaagtttcagaacctttttggtgcttgcttgcctgcctttgccgggtttgggagaggggtttttctctctttggcgggccccgccctgccgggccgggccgggggccccggtttccctcccctggggccttgccgacccatggtctggttggggtttaaaccggggatggatatgggctttttttctgcccacagtcggcggggaagtgctcgggtgggtggtggttcctggtttgtccccccgaatggcccggggtgggggcctaggcctccttttacaccccagggttttggc

SEQ ID NO: 99409 - DNA, 1587 bp, Zea mays
  Clone ID: MRT4577_22173C.1
atgcgggcgattctgcatgtctacggggtggagctgcacaacctcagccctaactccatctcgcaagccgccatcttcgcagcggtttgtgaaggatacttagggattgaccctcactgggacctgtggactcatttcttctccgcggagctttttgcttcgtcgacgggggagagaagggtccgcgcggcagtgcgggccggcggctgcatcctccagctgaggcaggcgcgggcgccgcagtatattcctgccatccttgcgtcctcgaacaaagggtggcagcgtcgatggttctatctccgaaatgacgacgggaggctcccgtcgttttctcagcgagtggtgatcgtcgccgccgatgcttggcgctacaggaccccgcacgacagacaaaagaatctccagccccttctgaaggccctagaggtgttgcggaaaggagggctcaccgctgcgggagtgattgccgccattcatcgccggagggtgcttcccttggcggagcggcggttgccgctttgggagatgacgccagaggccgacttggagggttcgcggatgtcctcggattcccttcccgttgacgacctccacgggcgggtagccatcgcgttgggaaaaccggacgttggcgccctttcccagcccttgatgcgtcccgaccgcgggtgtgtgtccctggtgagtgtccgctccttctttctccttgcgtcggattgcccttggtcctcacggccaagacttttcgtctgtctccaggaggtagggtgtcacaaaccttcccgaccaccggtcccggaggccgcggtggaccgagctgcgcggcgggttgccgcggagaagaggaaggagaaaaaggacgcgaagaaggctcgggcccgcgagcggacgcgggcccgagacgccttggaaaagctccgtcgccggcaggagagggatggactcccgagggagccgtcgccggaaacgcctgacgacgacgacgatgaagacgatgacgaagatgacgatatggctgcccgccttggcctcagcccgggtttgaggctaggccaggagtcatcaagccagcccccgagcgggctggcgccgtcggtttccgaggccgggacgccggggtcccggtccgaagagcgggggcagaccgagggggtacttgacccctcggctggggaagttgaggtgaccccggggagtcaggccgagctgcctgttccccgaaaaccgtcgcccatgccggttgcgcaggagggcgatcctcaggtcgtcgtggcagcgcttgggcagtccgtctcccgggcatctagggcgcccaaggcgaggatggtaccgaagctggctgcgaggcagacctcgacggtaccttcgggggtcgaggttcgagagacctccctacaggcacggttgatcatggcccggagtggcaagcggagtcatggcccgaccgatctggctccccagaaggtcctcaaggcagcgtcggcttccgcagccggtgccgcgccgggcctcgccggccagctgaccttctcgcaagacgccccacagcggggggctcaggcggcaccagttgtcgtggagtga

SEQ ID NO: 99410 - DNA, 2379 bp, Zea mays
  Clone ID: MRT4577_22174C.1
atggccgaccgggtgaccattgttccgccgcgtgacccgtggcctttctccaccgtcacggcggatgatctggaggccctcgttgctgagggtttacttcgccctctctccgatgagaggcagccggagtggatgccccccccccccgagcggagccgccccgtccccgccgccggggtatgtcgtgagcttcgtctcctttcacgagcggaggttcggagtgccggcaagccgttttatgcgagcgattctgcatgtctacggggtggagctgcacaacctcagccccaactccatctcgcaagccgccatcttcgcggcgtgagtggtgatcgccgctgccgatgcctggcgctacgggaccccgcacgacagacagagaatccccagccccttctgaaggccctggaggagttgcgaaaaggagggctcaccgctgcgggtgtgattgccgccattcatcgccggagggtgcttcccttgacggagcggcggttgccgctttgggagatgacgccggaggccgacttggagggtttgcggatgtcctcggatccccttcccgttgacgacttcccacaggcgggtagccgtcacgttggggaaatcggacgccggcgccctttcccagcccttgatgcgtcccgaccgcgggaggtagggtgtcacaagccttcccggccaccggtcccggaggacgcggtggaccgagctgcgcggagggttgccgcggagaagaggaaggagaaaaaggacgcgaagaaggcttgggcccgcgagcggatgcgggctcgggacgccttggaaaggctccgtcgtcggcaggagagggatgggctcccgagggagccgtcgccggaaacgcctgacgacgacgacgacgatgaagacgatgacgaagacgacgatatggctgcccgccttggcctcagcccggatctgaggctgggccaggagtcgtcaagccagcccccgagcgggctggcgccgtcggtttccggggccgagacgtcggggtcccggtccgaagagcgggggcagaccgagggggtacttgacccctcggccggggaagttgagggcgcccaaggcgaggatggtaccgaagctggcagcgaggcagacctcggcggtaccttcgggggtcgaggttcgagagacctccccacaggcacggttgatcatggcccggagtggcaagcggagtcatggtccgaccgatctggctccccggaaggtcctcaagacggcgttggcttccgcagctggtgccgcgccgtcctcgccggccagctgacctcttcgcaagacgccccacagcggggggctcaggcggcaccagttgccgtgaagcgagctcccgaggttggctcttctgtcgaggcggtcgtcgcgctgggggaggttgctggcgcggccgtggtctcgggcccaccggacatgctgccggcgttggcgccggctgctgccgaggccgtcgacgtcctggccgtggagcgacccgtcgccgccgacgctgagatggccgaggcgtcgctacttgccttggatcccctcttcgttcttgacgatgagcgggaggagcagtcttgggacgagctccgtgagtgtgccgaggcaacggtggggtcgctccggtcatccttggaggtcttttgcagggacgttcccaagattctccagggtctgacggatctaagcgccgccaagtcgtcgttcatccgccgcgaggtcgatgtctggggttcgctgcggtccctgaggaccacgcttgccggggctaccacgcgcctctcccaacagagcgccgaggtggcagaccttcggttgctctgtgccgatctaggagcagaggaagcagcggcacgcgcagaggtgcagcggcggcagtcggagcttgaccaggtcaccggcgagcgggaccaatctcggggccgggccaccgaggccgaaagccgggccggagcccttgcagcagacctagtcgtggcccaagccgcatcctcggagcagcgtgcccgagctggagagctcgagtctgcccttgataagtccaccaaggcgcttgctcaggcggccgagcagagactccgcgaggcgctacatcacggcgtcaggcgggccttcgccgtgcttgcttcccactatgtcgtggatctggagcgggtcagcgaggggtattgcctccccgacgaagatgaagccgccctggccgaagtccagaggctcgacgcagctgccgcgggcccgagcgcggtgctggcaaccaccttcgaggcagagatcctcccgctcttgccgtcgtccgaggccggggcggaccttgccgagggtggggacaaagccgagggcgcgactccttctccgggcgacgcctga

SEQ ID NO: 99411 - DNA, 268 bp, Zea mays
  Clone ID: MRT4577_22175C.1
attcgaccctcttttagtggaagaggctctggacatgctccagtattcagaagaaaagatgatggagtttcttcagttaatgagcaaatttaaggagatgggctttgagctgaaagacattaaggaagttttgctatacacaacaatgaccaggacaatgctttggaagacctcatggctcggacaggagccagctgagaccaggccctgctaggcctgccgcaggaccacaatcccgggacgccctgcagagcccacctgtggggaa

SEQ ID NO: 99412 - DNA, 534 bp, Zea mays
  Clone ID: MRT4577_22176C.1
atggctgaccgggtgaccatcgtctcgccgcgcgacccatggccttcctccacagtgacggcgggcgatctggaggatcttgttgctgagggtttacttcgccctctctctgatgagaggcggccggaatggattccccccgtgggcggagctgcttcgtccccaccgccggggtacatcgtaagcttcgtctccttccacgagcggggatttggtgtgccggcgagccgctttatgcgggcaattctacaccactacggggtggagttgcacaacctcagccccaactccatctcgcaggctgccatcttcgtaacggaggtagggtggcacaagccttccctgccacgggtcccgcaggatgcggtggaccaagcagcgcggcgggttgccgcggaggagaagaagaaaaagaaggacgcggagaaggcccaggcccgcgagcggatgcgggctcgggacgccttggaaaagctgcgtcgtcggcaggagagggaggggactcccgagggagccgtcgccggaaactcctga

SEQ ID NO: 99413 - DNA, 627 bp, Zea mays
  Clone ID: MRT4577_22177C.1
atggagcttttccaaggcgtctcgggcccgcatccgctcgcgggcgcgggccttctctgcgtccttcttcttcttcttctcctccgtggcaacccgccgcgctgctcagtccaccgcatcctccgggacccatggcagggaaggcttgtgccaccctacctcctggaaacagatggaaatcccgaccgtaagaatcaagggcaacccggcgcaaggagaaggagggagcggacactcaccagggtcacgcacccttggtcggggcgcattaagggctgggagaaggcgctggtgtctggttttcccaacgcgacgaccacccgcccgtggagaacgtcgaagggaagaggatccgaggacatccgcgagccctccaagtcagcctccggcgtcatctcccaaagcggcaaccgtcgctctgccaagggaagcaccctccggcggtggatggcggcaatcactcccgcggcggtgagtcccccttttcgcaacgcctccaaggccttgagaaggggctcgaggttcttctgtctttcgtgcggggtcccatggcgccaagcatcggcggcgatggtgaccactcgctgggaaaacgacgggagcagctcgccgtcattccggaggtag

SEQ ID NO: 99414 - DNA, 2307 bp, Zea mays
  Clone ID: MRT4577_22178C.1
atggccgaccgggtgaccatcatctcgccgcgcgacccatggcctttctccacagtcacggcgggtgatctggaggatcttgttgctgagggtttacttcgccctctctctgatgagaggcggccggagtggattccccccgcgagcggagctgctccgtccccgccgccggggtacgtcgtgagcttcgtctccttccacgagcagggattcggtgtgccggcgagccgctttatgcgggcgatcctgcacaactatggggtggagttgcacaacctcagccccaactccatctcgcaagccgccatcttcgtagcggaggtagggtggcacaagccttcccggccacgggtcccggaggatgcggtggaccgagcagcgcggcgggttgccgcggaggagaagaagaaaaagaaggacacggagaaggcccgggcccgcgagcggacgcgggcccgagacgccttggaaaagctccgtcgttggcaggagagggaggggctcccgagggagccgtcgccggaaacacctgacgacgacgacgacgatgaagatgatgacgaggatgacgacatggctgcccgcctcggcttcagccctggtttgaggccaggccaggagtcgtcaagccagcccccgagtgggctggtgccgtcagtccccggagtcgggacgccgaggtcccggcccgaagagcgggggcagaccgagagggtgcttgacccctcggccagggaagttgaggtgaccccggggagtcaggccgaggcatctgttccccgagagccgtcgcccacgccggcagcgcaggagagcgaccctcaggtcgccgtggcagcgcctgggcagtccgtctcccgggcgtccaaggcgcccaaagcaagggtggtgccgaagctaccggcgaggcggacctcggcggcgccttcgggggtcgagatccgagagacctcccctcaggcacggttgatcatggcctggagcggcaagcgaagccatggcctgaccgatctggctccccgaaaggcccttaagacggcgtcggcttctgcagccggcgccgctccgggccttgccgttcagctgaccttctcgcaaggcgctccacagcagggggctcaggcggcaccagtcgccgtggagcgagttcccgaggttggctcttctgccgaggcggccatcgtgctagaggaggcggctgacgcggacgtggccctggtctcaccagacgtgccggcggtgctggcacctgttgctactgaagtcgctgtcgtcccagtcggggagcgacctgttgctgccgacactgagatggccgaggcgtcggcgctcggtgcctcggaggaggggggcgtggagacgcgatccgtcccgccgagcggcagccttgtcgctgtgcggcggagctccgagggtcggcgccagttgctccggttccggacccgtgaggcctcggatcccttcttcgttctcgacgatgagcgggagcagtcctgggacgagctccgcgagtgtgccgaagcaacggtggggtcgctccggtcgtcgctggaggttttctgcagggacgtccccaaaatcctccagcagggcgccaaggtggcggaccttcggttgctctgcaccgatctgagggccgaggcggcagcggcacgcgcagaagtgcgacgacagcagtcgcagttcgaccagtttgtcaatgagcgggaccaatctcagggccgggccgccgaggccgaaagccgggctggagcccttgcagccgacctagccgtagcccaggtcgcagcctcagagcagcatgcccgagccggagagctcgagcccgcccttgatgagtccgccaaggtgcttgccgaggcgcttgccggggcggccgagcagagggaggccgaccacgcggccatgtccgaggccgtctcggacttctgtcgggtccttggcttcggcgacgtcccctcaggaagctcccctcaaagtcgcctgcaggccttgggcgatcatgtgcgcggcagactccgcgaggcgctacaccacggcgtcaggcgggccttcgccgtgctcgcttcccactacgtcgtggacctggagcgggtcagcgaggggtattgccttcctgacgaagatgaagctgccctggcagaagtccagaggctcgatgcggccaccgcgggtccgagcgcagtgctggcgaccaccttcgaggcagagatcctcccgcctgcgccgtcgtccgaagccgggatggactttgccgtgggcggggacgaagccgaaggcgcggctccttccccgggcgacgcctaa

SEQ ID NO: 99415 - DNA, 2001 bp, Zea mays
  Clone ID: MRT4577_22179C.1
atgcgggctcgagacgccttggaaaagctccgtcgtcggcaggagagggaggggctcccgagggagccgtcgccggaaacgcctgacgacgacgatgatgatgaagatgatgacgaggatgacagcatggctgcccgcctcggcttcagcccgggcttgaagttaggccaggagccgtcaagtcagcccccgagtgggctggcaccgtcagtccccggagtcgggacaccgaggccccggcccgaagagcgggggcagactgagagggtacttgacccctcgggcgggggagttgaggtgaccccggggagtcaggccgaggcgtctgttccccgagagccgtcgcccacgccggcaacgcaggagagcgaccctcaggtcgacgtggcagtgcctgggcagtccgtctcccgggcgtccaaagcgcccaaagcaagggtggtgccgaagctgccggtgaggcggaccccggcggcgccttcgggggtcgagattcgagagacctcccctcaggcacggttgatcatggcccggagcggcaagcgaagccatggcctgaccgacctagctccccgaaaggcccttaagacggcgtcggcctccgcagccggtgccgctccgggccttgctgttcagctgaccttctcgcaaggcgctccacagcagggggctcaggcggcaccagtcgccgtggagcgagttcccgaggccgattcttctgccgaggcggccatcgtgctagaggaggcggctgacgcggacgtggccccggccccaccggacgtgccggcggtgctggcacctgttgctactgaagccgctgccgtcccagtcggggagcgacctgttgctgctgacgctgagatggccgaggcgtcggcgcttggtgcctcggagaaggggggagcggaaacacgatccgtcccgcccagcggcagccttgtcgctgtgcggcggggctccaagggtcggcgccagttgctccggttctggacccgtggggcctcggatcccttcttcgttcttgacgatgaacgggaggagcagtcttgggacgagctccgcgagtgtgccgaagcaacggtggggtcgctccggtcgtcgctggaggttttctgcagggacgtccccaaaatcctccaggatctgatggatctgagcgccgccaagtcgtcgttcatcctccatgaggtcgacgtctggggctcgctgcaatacctgaggacctcgctcgtcggggctactgcgcgcctctctccgcagggtgccgaggcggcggaccttcggttgctctgcaccgatctgagagccgaggcggcagcggcacgcggagaggcggcagtggcacgcgcagaggtgcgacgacagcagtcggagtttgaccaggttgtcaatgagcgagaccaatctcggggccgggctgccgaggccgaaagccgggctggagcccttgcagccgacctagccgtagcccaggtcgcagcctcggagcagcgtgcccgagccgaagagctcgagtccgcccttgatgagtccgccaaggcgcttgccgaggcgcttgccggggcagccgagcagagggaggccgaccacgcggccatgtccgaggccgtctcggacttctgccgggtccttggcttcggcgacgtcccctcaggaagctcccctcaaagtcgcctgcaggccttgggcgatcatgtgcgcggcagactccgcgaggcgctacaccacggcgtcaggcgggccttcgccgtgctcgcttcccactacgtcgtggacctggagcgggtcagcgaggggtattgccttcctgacgaagatgaagccgccctggcagaagtccagaggctcgacgcagccgccgcgggtccgagcgcagtgctggcgaccaccttcgaggcagagatcctcccgcctgcgccgtcgtccgaagccgggatggactttgccgagggcggggacgaagccgaaggcgcggctccttccccgggcgacgcctaa

SEQ ID NO: 99416 - DNA, 279 bp, Zea mays
  Clone ID: MRT4577_2217C.1
accccctactacaagaaggtcccctctacccactgtggttttgctcacaatgcgaagtatgggaacagttctgacaattttttcaaattgcctatcaagaactgtcccacatccaaaattgggagcatcgggccatattctggaacattccttgcacggacgacatgggcttcaggagcccccgccggctccgctcttcgagcccggggaggtggaggtcctggtccttctaccgcgccggcttcgtcgtggtcgggggcaccttgctgttgctgtaca

SEQ ID NO: 99417 - DNA, 222 bp, Zea mays
  Clone ID: MRT4577_22180C.1
agcaacatattaaattcgcatatgcatttgagccaaatgaatcacgtcgatcatggttacaaccggacgtatagcagtgtgcaactttaccattcaccacaaaatatgcaaacaaaaaagatgaagctatcatcttcagccacggcaaagccatctgcttgcgagtcaaaactggagatatcatcttaaagctccctcaaccttggttcttttgctagcatc

SEQ ID NO: 99418 - DNA, 156 bp, Zea mays
  Clone ID: MRT4577_22181C.1
cagttcacgctagcgtacgtgggaactgcggtcgagtagctagagcttcgaggaatagacgccggcatactgtagcagtatcaacagctactactcctccaacctgtcgccggtgtatgagccgtactactagcagcgctccgcagtcggcgccgt

SEQ ID NO: 99419 - DNA, 906 bp, Zea mays
  Clone ID: MRT4577_22182C.1
atgagcggttcatccccgaatccaaatgatagctctgtcaatatgtcacccaatggagaaggagccaacccaaattatcaaataacacttgcaaatacacagagtccgaaaagaaatagatacagcccaccacgtaatataccaatggaaatgcaatgcggctactttaacaatgagtacataaacgcgcttaaagtatcatacaaagatagatctttctatggaacaccagatttcgaatgtcgatattgcaaggcagtcttctggtatcgtgaaagagctcgtggtaaacatattgatgcatctatactatacaacaattgttgcaagggtggtaaaatagcaataccaccatataaaccacatcctgaaccattggctacactggctagatttgatggggattcaatatctaagaagttcatgcgcaacataagacaatacaattgtctatttgctttcacttcaatgggagctaacattgataacagtgtcaatgatggtcgtgggccacctctgtttaaaatctgtggacaagttcatcatagaatcggctctctactaccacctgatggctcacctcccaaattcctgcaattatatatatatgacactgcagatgagatcacaaatagattgcaatgcttagatacaaacagagaatacaatggagatttaaatcccaacattgtacaaagcctaacaaggatgcttgatatccacaatccatttgtgaagaaattcagaatggctagagatcacttggctggcaatgagcctggagatttcatcattagaattgtgggtgcaaaagaagttccattacagaaagaatcagcgaaatccttatttatgttatggtctgctatccagtcaagcaaaggtagacgcacgcgcatgcattga

SEQ ID NO: 99420 - DNA, 742 bp, Zea mays
  Clone ID: MRT4577_22183C.1
acattttctctccccaatctgaccttccctcgtgcgaggcctcacctcttccgacgcgacgcgatacgcaccacacgcggagatcaagccgagcccatctagggttagcgtcccactgcggcggccatggacgaggcagcgacagcggccctggcgacggcgagggggcggtggacgcagtgggaggaggtggtggtgtccaacgaccgcggcagccgcctcgtgcactactacctccgcggcaacagcgaggagaagcagctggcggtggttgggcgggagcggagcccgcgtcacatgtcgtacgccgtgcaggggcggttcctccgcgcgctcgcggctgccgccggggcggtcgccgtcgcgccgtcgccatcacggtcgcctctgtcggctgctggctcggacggcggcgctccgaggaggtggcggtccaggcgggaggtcgtggactggctgtcctccctcgtttccggtcataattatggttcctcctcaatggctactaggtgcagtagggattcatatgatgatagtgttaacaactgcacacaagttactgcttcgaaggatgtttcttctagggaagctttaaatgttttcacatggttaggagcttcatgttatttgtcacagcgtttgaagtcacttcaaatctttctgccgtagagggaatactatctctgtgcatatttttgttttcattatgagtgaagagatgtagtgacttattgcttatgtt

SEQ ID NO: 99421 - DNA, 286 bp, Zea mays
  unsure (1)..(286): unsure at all n locations
  Clone ID: MRT4577_22184C.1
catttacctgtttttcttgtcaaacttttgtctacctcctgctgaagtttcttatttaattccagagtactgtcctctactctaaggcattacttttaagtgtattatgaaggcagttttcaaaggtcatgaccagttggggtaattcaattaaaaaggaaaagatttgtttggatgnaactggtgtctctaagatgaatttttagatgtcagtttggaggctctttcccccctcaattgagagctcttgttattcagagctccaagactagacctggctaacaaa

SEQ ID NO: 99422 - DNA, 309 bp, Zea mays
  Clone ID: MRT4577_22185C.1
gaattcagaaggaaggctatatatactagcagagttatatattaaacaaatactatatataaaaatatatatgggcacaccaggcaagaatagatcattccacaattcggaaaactgcttttttaacctgggcctaatccatatatatatgaggagaggacagggccccaagatctgacttgattatctttgtactccaactcctcaactttttatggtgaaaaggcccctttcttggcatccgatgaaaattaagcatcccttttgttgactcacaccacaatttaaaggcccattaacaagattttt

SEQ ID NO: 99423 - DNA, 1566 bp, Zea mays
  Clone ID: MRT4577_22186C.1
tttgttctgtattaccttgcatgtttctccgaatttcttggttgaacaacagaaaacaggatgaggagcccacgcgtccgattacagtgagctattggaggctcgagactcttgtatgggaaaaaaaaaaaaaaaaaaaaaagttacggaagtggaaggcggtatgatgagcttgttgaggagctgcttggagtcaaaagctggttcctcaaaaagtatgatatcaggctatattgaccatcatcagagtctttcatcagaagataagggatggggctgtggatggagaaatattcagatgctgagctctcatctattgaagcaaagacaagaagctagagaagtattatttggtggttctggatttgttcctgacatcccttcactccagaggtggcttgagattgcttgggataaaaaatttgatacgattggctccagccactttcacaacaaagtttatggtgccaagaagtggatagggactacagaatgtgctaccctcttccgctcttttggcctccgtgcaaagattgtagattttgatagcacagaatcatccgacctccaaagtaagaacagtagccatgcagcaagtcaagtacgaggacttatggataagttcttaataaagagtaattcccctaaatcatcgtctgaattttgtcaagaggatgctgaaagtatgagaggccaacacgcccttgttgactgggtttggaactattttgcatgtgagcgctctgatagattaaccacacagcgtgccactgtcagcaataaaacaccactctattttcaacatcaaggtcattcaaggacaattgttgggattcaaaaggaaatggttcaccgtggatctcaagaacaatacacccttttgattttagatcctggtcatagaactgcagatctagaaaggtccctaagaagcaaaaatggatggcagcgtctggtgaagagaggtgtccacacgctcaggaagccacagtatcagttatgttatgtggatcctggaattgctagttcagaagagatggagcaactgaagactattgatagtatgcttgtcaggttttaggttcctgggcactcccctggttgaagaaacaagaacatctaatccattgccgaacggtgcgctgtacgaatgacacagcaaggatgggcctgcagaaagatctttgacgctgcctaactgaatctgcttgcagactggatctactgttgtttggaggaccttagaagggtcctgactgctttcgtaactggacctgcccgttgggcttgttcggttatctgaacgactgaacctgtggtgtaggtaaacgaagcagagcttgatgtacagtacagtcgcttgtgttgaagtggagagaataaaagtgtttgtacatataataacatcctgcagttgttaatcttttgttacacatctgatgccgcccgcgcactcagctcagttgactggaatattgactcaaggatcgtattctgcacaaaaaaaaaaataaaaaaaaaaaaaaaataaaaaaaaaaaaaaaaaaaaaaaaaaaaattaaaacc

SEQ ID NO: 99424 - DNA, 680 bp, Zea mays
  Clone ID: MRT4577_22187C.1
gtggatctcaagaacaatacacccttttgattttagatcctggtcatagaactgcagatctagaaaggtccctaagaagcaaaaatggatggcagcgtctggtgaagagaggtgtccacacgctcaggaagccacagtatcagttatgttatgtggatcctggaattgctagttcagaagagatggagcaactgaagactattgatagtatgcttgtcaggttttaggttcctgaaaacaggatgaggattatatgtgttttgcacacagggcactcccctggttgaagaaacaagaacatctaatccattgccgaacggtgcgctgtacgaatgacacagcaaggatgggcctgcagaaagatctttgacgctgcctaactgaatctgcttgcagactggatctactgttgtttggaggaccttagaagggtcctgactgctttcgtaactggacctgcccgttgggcttgttcggttatctgaacgactgaacctgtggtgtaggtaaacgaagcagagcttgatgtacagtacagtcgcttgtgttgaagtggagagaataaaagtgtttgtacatataataacatcctgcagttgttaatcttttgtttacacatctgatgccgcccgcgcactcagctcagttgactggaatattgactcaaggatcgtattctg

SEQ ID NO: 99425 - DNA, 372 bp, Zea mays
  Clone ID: MRT4577_22188C.1
ttaatcagttttcttccactttctcctcgagatctcgccccgggggcatgtactctagcgacagagggttggatcccctacaagacttttccaaagacagcatgctcctcactaagcgctaccacatgcccgtccacatgttgttcaccatggtggctgcgccgacgacgatcgggttcgcctacatgaactttgccctttctttcgctaacctcatatttatcctaatcaacaacatcatttgcacttccgattaggcacacccgagctcagcgccaccaccatgacctttgcgcataaccttgagctgcaagtgatcaactcgctccttggccatttcgaatagtaattgttaatgaaatttttcgttcg

SEQ ID NO: 99426 - DNA, 321 bp, Zea mays
  Clone ID: MRT4577_22189C.1
ccccgcgtccggggccatccaaagggatgactcactcatcagtgaagaggctcaggggtgggaataaagggggtaagcgccttgaacccaaagggtcaagttcccggggtggttttttttttcccccggtttcctgagccacaatgcctgggaggggaccccatccactttgggggggggtgggttattcggtgactggtgggggccaagaagggcaagttaaaccggttcacccgagggttaacacccttgcttttctctttctgcatctgaggtgattgccaacagttttgggttttaaaattaagaatcttgaatcgt

SEQ ID NO: 99427 - DNA, 6550 bp, Zea mays
  Clone ID: MRT4577_2218C.1
acccaatcaagtcaaagttagacccctttggataccagatcccgaagcaaggcgtagctactaaatatcgaagaattcgcttcacagccactgagtgacactccttaggatcggattgaaatctagcacacatgcatacgctaagcataatatccggtctactagcacataaataaagcaaagaacctatcatggaccggtatgctttttgatcaacggacttacctcctttgttgaggtcggtgtgtccgtcagttcccatcggcgtctttgcgggcttggcgtccttcatcccaaaccgctttagcaagtcttgcgtgtacttcgtttgggagatgaaggtgccgtccttgagttgcttcacttggaacccaaggaagtagttcaactcgcccatcatcgacatctcgaatttctgcgtcatcacccagctaaactcttcacaagacttttgattagtagaaccaaatattatgtcatcgacataaatttggcatacaaagagatcaccatcgcaagtcttagtgaaaagagttggattagctttcccaaccttgaaagcattagcaattaaaaagtctctaaggcattcataccatgctcttggggcttgcttaagtccatagagcgccttagagagcttacacacgtggtcggggtaccattcatcctcgaagccagggggttgctctacgtacacctcctccttgatcggcccgttgaggaaagcgctctttacatccatttggaacaacttgaaagaatggtgagcggcatatgctagcaaaatacgaatagattctagcctagccacaggagcaaaggtctcctcaaagtccaaacctgcgacttgggcataaccttttgccacaagtcgagccttgttccttgtcaccaccccgtgctcgtcctgcttgttgcggaacacccacttggtttccacaacattttgattgggacgcggcaccagtgtccaaacttcattacgcttgaagttgttgagctcctcctgcatggccaacacccagtccggatctagcaaggcctcttctacctcccttgctaatatcacccaatatttggtcgatgggatgcttcctttgaatcgtcgctcgaacttggttggaggtgccggttgtgcttcttcctccatcacatgatcatcttgtgctcccccttgatcacacgcctcctcctgatgaacctgttcatcgtcttgagttggaggatgcaccatcgttgaggaagaaggttgatcttgctccaattgttcctgtggtcgcacatcgccaatcgccatggtgcgcattgcggccgttggaacgtcttcttcatctacatcatcaagatcaacaacttgctctcttggagagccattagtttcatcaaatacaacgtcgctagagacttcaaccaaacccaatgatttgttgaagaccctatacgcctttgtatttgaatcataacctaataaaaacccttctacggctttgggagcaaatttagaagttgtacctttcttcacaagaatataacacttgctcccaaatacacgaaagtaagacacattgggtttgttaccggttagcagctcatacgaagtcctcttgaggaggcggtgaaggtagacccggttgatggcgtggcaagccgtgttcacggcttccgaccaaaagcgctcgggggtcttgaactctccaagcatcgtcctcgccatatcgatgagcgtcctgttcttcctctctaccgcaccattttgctgtggtgtgtagggagcggagaattcgtgcttgatcccttcctcctcaaggaactcctccacttgaaggttcttgaactcggacccgttgtcgctccttatcttcttcatcttgagctcaaactcattttgagctctccttaggaagcgcttgagggtcccttgggtttcagatttatcctgtaaaaggaatacccaagtgaagcgggaaaaatcattgactataacaagaccatacttacttcctccgatgcttagataggcgacgggtccgaagaggtccatatgaagcatctccaaaggtcttgatgtggtcatcacatttttggtgtgatgagagcttcccacctgtttccctgcttgacaagctacacaaggtctatctttttcgaaatgcacgttagttagacctatcacgtgttctccctttagaagcttgcgaaggttcttcatccccacatgtgctaagcggcgatgccacagccagcccatgctagtcttagcaattaagcatgcatctagaccggcctcttcttttgcaaaatcaaccaaataaagtttgccgtctagtacacccttaaaagctagtgaaccatcacaccttctaaagacagacacatctaaccctttcaccttgccttggttcccatcaccgaatattattgaatcttggggatccttgttcttgatgtaggaagagaacatcctcttttcccccgtcatgtggtttgtgcatccgctgtcgataatccagcttgtacccccggatgcataaaccttcttaccctttctacaaatagcaaaggaagcattgcaagcataataaattgtagaaggttcatttattttcctaggaacattaacaacatttctcctaggcatatgatgaacaacatttctaccatgcatataggaagaactagaagcaaacatgtcatgagaatcaaaagcatcataacttctataggcattcctagaatgtctcctatcatgatacatgaaagcatggttctttttagcactactagccataggtgccttccctttctccttggcggagatgggagccttatggcttgttaagttcttggcttccctcttgaagccaagtccatccttaattgagaggtgtctaccaatagtgtaggcatcccttgcaaattttaacttatcaaattcacttttgctagtcttaagttgggcattaagactagccacttcatcatttaactttgcaatagacactaggtgttcactacaagcatccacattaaaatctttacacctagtgcaaatcacaacatgctctacacaagatgttaatttactagatttttctaacttagcattcaaatcatcatttatgctctttaagctagaaattgtctcatggcaagtagatagttcacaagaaagcatttcatttcttttaacttctaaagcatgagatttttgtgcctctacaaatttatcatgttcttcatacaacaaatcctcttgcttttctagtaacctattcttatcattcaaggcatcaattaactcattaattttgccaattttaattctatctaaacctttaaataaactagaatagtctatttcatcgtcatcactagaatcatcatcacttgaagaagcataagtggtatcccgagtatataccttcttctccttcgccatgaggcatgtgtggtgctcgtttgggaagagggatgacttgttgaaggcggtggcggcgagtccttcattgtcggagtcagaataggagcaatctgaatcccactcctttccgagatgtgcctcgcccttggccttcttgtaattcttcttcttttctcttttgttccctttttcctggtcactatcattatcgggacagttagcaataaaatgaccaatcttaccacatttgaagcatgatcgcttcgcctttgtcttggtcttgtttggctgtcccttgcgaccctttagcgccgtcttgaagcacttgattatgagggtcatctcttcatcattgagccctgccgcctcaacttgcgccaccttgctaggtagcgcctccttgcttctcgttgccttgagagcaacgggttgaggctcattgattggaccattcaacgcatcgtccacgtatctcgcctccttgatcatcattcgcccgcttacgaacttcccaagaacttcttcgggcgacatcttggtgtacctaggattttcacgaatattgttcaccagatgtggatcaagtacagtaaaggaccttagcattaggcggacgacgtcgtggtccgtccatcgcgtgcttccgtagctccttattttgttgacaagggtcttgagccggttgtacgtttgggttggctcctcgccccttatcatcgcgaatctcccaagttcgccttccaccaactccattttggtgagcatggtgacgtcgttcccctcataagagatcttgagggtgtcccagatctgcttggcattgtccaagccgctcaccttattgtattcatccctgcacaatgaagctagaagaacagtagtcgcttgtgcatttttgtggatttgctcgttaatgaacatgggactatcagtactatcaaatttcattctactctcaactatctcccatatgctcggatggagagagaacaagtgactacgcattttatgactccaaaatccgtagtcctctccatcaaagtgaggaggtttgccaagtggaatggagagcaaatgagcatttgtactttgcggaatacgagagtaatcgaaagaaaagtttgaattgaccgtttttcgtttctcgtagtcgtagtcgtccttttgggaagaagtggactcgtcgatgtcgtcatagtagacgatctccttgatgcgccttgtcttcttcttcttcccatctttccatttatggcccgagcctgagtcggtaggcttgtcatccttcagctcgttgacgaaggactccttctccgtacaccgccgtcgaagtcccgagagcagtgagttcgccagagccagcctggcgcaccggacagtccggtgcacccagactgagcagactttggctgtacaaagccatctcttttccaattcgatttttccttttgacttggtttgcactttgtccaccactttgcatagattaacacaaaagcacttgtgttggcactcaatcaccaaaatacttagaaatggcccaagggcacatttccctttcaaggtcacgttattatgccttaaggattttgggatgagaccattagggtggttggagtttgactctttggtatcggtgacaacaaggatgacgatggtgtccttctcttcactaactgtgtagtgatagatcggataccatgtgtctatgtatgatgaaattgtgtacgatgaacatcggttcacgtgtcgacccgttctcttatttatatatgcggtgtgaaaggggacttcaatcaaagattgttgccttctctgatctaggcacatgtaaggtttttgactcagccttttgaccgagctgaatgagatgaacttgaaaggtacagacccagtgctcatgatgtcggcgtggaccttgtactcctccgcgtacacgaatgaggtcacggccagggggagagccgcgtatatatagacattattgggggctgttggtcggcttgcctgtacaacagcaatgtgcagaagggtgccgtgcattccaatggccagcgaggcgatcagcatgatgaccgggcctatcaggaacttgaggagcatggagagcgaggcgacggtgtacccgcacggcacgaaccgtgactgccgcgctatgaacgtccctgaagcgaacatgctcagcccaactgcggttgtgtagatgatgaacagagagtcgctaacaatcttcggcatcgagaatccaatcttgaatgccatgagagaccagatgaggccaaggaaactggcataggtgttcggaatctggagaagcttcttcgtggccatccagacgacgtgcatcaccggcggctggacatccacggccaccaccacctgcttgttagcatctccatcgtcctctgggctcatctccttcgtggccgccgcgggcatcaacgacgacgcaacgaccgcctccgccgccggcgccggcgccacctccgtgatctcaatgttgacgaccacctggtggtggtggtggctacggtcggcggcggcatgacgatggacactactgcttccgccgttttcgtcgtcgacgacgcgctcgcccgccgtcgccggcacggctgggctgatcctggcgctgccgtcccgcgccgccatgaactcgtagaggaagatgacgacgttgtaccagatgcagaactgcatgacgacgatctgcttcatgagcccgcccgacacgggcccgtacatgccgtccaggagcggcacgcccatgatgatggtgttgggcagcgacgccaccgagaagttggtcaccacccacttgatcggcgactccgctccctgaaccacctgccgcttccctcggcctccgcggcgcctgctgaggtgggaccagaacgcccaggccgtgagcgccagcagcacgacggccttctgcagcgtgtcggcggcgatgaggcgctcgttcatgtggtacgggtcgttggtggacaccatgtggaagatgagcaccggcacggcgtacagcgccacgaagtggttgatccccgcgcactgctcgtcggagaaggctttgagccaccgcacggacgcgtagcccagcaccgccgacgtgtacagcggcgccat

SEQ ID NO: 99428 - DNA, 238 bp, Zea mays
  Clone ID: MRT4577_22190C.1
gtccataccattcatttattcaacaccgaagggaaaccaacccgatccacaacgggagggggttggtcctttcccttccttgccttgcttttagatggaaaccccaattcaaccaatacaagctggggttgctcttcccccccaccgccttcatttaatgtaccggggccgtggcatatcccacttccagatcactccccagttgaggtgcataccccagcgccgtttcacctggcgg

SEQ ID NO: 99429 - DNA, 297 bp, Zea mays
  Clone ID: MRT4577_22191C.1
atctgacagtcacttatttcatgcgtatgcgtggctcaagctttgtaacttgggggagggctgctataaatgggtggtttaatatgatctacagataatagcatcttctgttttacttggtgaactatccgtgtcaccttatgactaaaaatatggggcatttgtcacaaataatgagaaagagcgcatcatgtgtttgttctaccttggtaacttttcagttgatatcaagtggtgaatacaggggaatgccttcaagaccatatcttttattaaagtgggccatcagaggagtgt

SEQ ID NO: 99430 - DNA, 753 bp, Zea mays
  unsure (1)..(753): unsure at all n locations
  Clone ID: MRT4577_22192C.1
gccggccgggtccggacagatcgagaagggtttccccgtcctctcgcgcacccgccaccgcttcctctgtctctcgcagccgccgtcgcctcctctccctcgtgcagtcagaagtcagcagcccctccccctcgcgcgccgtcagcagatccctgcgccgctgaccggccagtgacagggaggcaatggatggagctctgcaacaataaatacaagatgttcaaaagaacgttattgttgtgttaacgttttgggcataccaagtactattttttctgttatgagtttgtcaaacatatgttaaatttgtcgttaatttcttacgagctatttctgtggtcaaagaaagttctttatttaagtggcatgaatcaaaaaatcttagccgacttctgtttgattttgttaatttttaaaagaaagttgcttcagcgtacaaattttgaggggcatattttgttttttcgtacaaatttctgtttgattttgttgatttttattttttcaattttacttgtgatttgatgatgatcacacttctagcagcagccgatgtgtggctccaaagggcagcagggcagctgacccgtgngggcgtgaggctccaaaggacgtcaggccagtgcagccccgttgggcaatgcccacccagaaaatttgtatggcaggaatttgccccctccggtgctagctcccctgtgtttactgacctcggtcaccaaagagccctaaacggcagcaacttcctctccg

SEQ ID NO: 99431 - DNA, 428 bp, Zea mays
  Clone ID: MRT4577_22193C.1
aggcctcgtcatgtctcaggcgcgaggtctctggccgctgaccaacgacgcttgcatctgtactgtgatcagcctagctggagagtctattgtagcagtatgacgggttatcccacccgatcgtgaaactggcctgtgatcacgcggagcgagctgtaggcgctacccagaggtgttgggggctattctacgaactgggtcaccgcatagcagagcatggtgcttacggacgacttcttcggcatgacgagctccgaactgctatcgcaatacgggttccaccaagagactcagctgtcagtcaactgaggctagcttgctgcgtactaggcgaacccgatatatgtcaatatgttcatcacggccgagctgtttgttggctagcaggagagtctaagacagctcgctcgctactgcagctctggctc

SEQ ID NO: 99432 - DNA, 272 bp, Zea mays
  Clone ID: MRT4577_22194C.1
caagacagaacatggatgtgaatatgagaaccatgtggtcgtcgatgcgggtacatgttacaatggctgtagcgttagtgttcttagtaagcggcgcatggtgcggtcctcccaaagtccccccaggcaagaacatcacggccacctatggcaaagactggatggacgctaacgcgacatggtatggcaaaccgacgggtgccggtcccgacgacaacggtggcagctgcgggtacaaggacgtgaacaaaccccccttcaatagcataggc

SEQ ID NO: 99433 - DNA, 442 bp, Zea mays
  Clone ID: MRT4577_22195C.1
ttggacctttgggctgctttatgtgcttgtttatgtgcttggggtacggtgctgtcgtaggattcgtcgtctctgaataatttgtcggatggtggttcgttgtagcttggtcggggggtgtcggtgggttcggttatgtcggattcgcttaatgctggttctgcgggtgttacattggggcttacggtggtttcgatggggtcttggccttcggtgtcggattataattgttcgatgggggttgcgttagttgagtctgtttggtcgtttagtactggtgtgtcgcattcgaatggtaataattcgatggggatgtcggagcctctggttgggcctcattagtgtacggggtggtggcctgtgctgcgggataattttgggtcgcgtcataatgctgtggttgcggatgtggcttatgtgttgctgggtgcggcggcgcgta

SEQ ID NO: 99434 - DNA, 345 bp, Zea mays
  Clone ID: MRT4577_22196C.1
atgcagcacgcgtacatggaggaggcggcgtcgaaggtggatgatcacgcgcccaaggacaaggaggatgcggcgccggcgtcggtggtggaggtggatgcggtggagcaggaggtggccgacattctgaccaacatgaaaaggctcatgcggtcgcgggaccggcgggaccggcggcgggagcgacgggaacggcgggagaggcggcgcgagcgcgagcgcgcacgcgccgcggccgcggtcgccgtccctagcgctgacagcccgctcgcttacccgcagagtggcggggacgacgcgccgccgaaagacgctgccgatcggccacgggaccagatttggtga

SEQ ID NO: 99435 - DNA, 268 bp, Zea mays
  Clone ID: MRT4577_22197C.1
gccccgccgcgcgcctggtctcttggagaggccccgccgacccgtccaccggaggcttctcgttcggcctcgaccccgtcaccaacctccagctgatggtctggcacggggccgagccgtactgccgcatcagcgtgtggaacggcgtgtcagtgtcaggcggcaggtacactggctcacctagctccatcgggtaccagaccagcgtcaacaccggcgacgagttctacctcgcgtacaccgtctccgacggctcgccgtacttccg

SEQ ID NO: 99436 - DNA, 320 bp, Zea mays
  unsure (1)..(320): unsure at all n locations
  Clone ID: MRT4577_22198C.1
aaaaaacaaatttccttttttttattcaagcccggaaaaaggggatttgaaaaacctttttacaaaaaaaattaatggtccacttatggcgggttggaaaaacctaccatagggacttttacattacttacacccggggaaaccccgcaacatgcccagtaacaaagggttttttcattatatacaaaaacttgttttttggaagcccggccggaaacaaaaatttcaaaattttctaggaccacccgggcttggtggggtccaaaacaaacccccgggtttttgggccggagangtttattgggacaaaatttggaccc

SEQ ID NO: 99437 - DNA, 2098 bp, Zea mays
  Clone ID: MRT4577_22199C.1
ggtacccttcgagggccggccggggaccccaccaccaagactctaggcgcagcagctcctccacgcttcgctgccgggtcaagctcctgtcatggagatcacggccagctgcgacgacggcgcggtcaccgctggcgccgtttctggtgtgctgctcgcgtctgttctgtctctgttcggcgcgtttctggtatacttctacgcgccgttctggagcgtgaggagagtcccggggcctccagccaggttccccgtcggccacctccatcttcttgccaggaacgggccagacgtcttccgtgcgattgcgaaagagtatggcccaatcttcaggtttcacatgggaaggcaaccactggtgatcgtggccaatgccgagctgtgcaaggaggtcggcatcaggaagttcaaggacatccccaaccggagcaccccgccgccgtcgatcggttccctgcaccaggacgccctcttcctcaccagggactcgacgtggtcggcgatgaggagcacggtggttccgctctaccagccagcgcggcttgccgggctcattccggtgatgcagtcgtacgtcgacacactggcggcgaacatcgccgcctgcccggaccaggactgcgtccccttctgccagctctcgctccggatggccatcgacatcatcggcaggacggccttcggcatcgagttcggcctgtccaagaacgccgcaggcacaggcagcagcggcagcgagtccccaggcggcggcgagggcgagggcgagggcgacgtcagggagttcctcagggagtacaagcggtccatggagttcgtcaagatggacctgacgagctctctgtccaccatcctcggcctcttcctcccgtgcgtccagacgccgtgcaagcgcctgctgcggcgggtgcccggcacggcggactacaagatggaccagaacgagcgccgcctctgctcccgcatcgacgccatcatagccggccgccggcgggaccgggccacgcgccggcgttgcggccccggcgccgcccccgccccgctcgacttcatcgcggcgctgctggatgcgatggagagcggcggcggtgcaggtgccaacaaggacttcgcgctggcggacaggcacgtgcgcgcgctggcgtacgagcacctcatcgccggcaccaagaccacggcgttcacgctgtcgtcagtggtgtacctggtctcgtgccacccgctcgtggaggccaagctgctgcgggaggtggacggcttcgcgccgcgccgcgggcgcgggcgcgcgccggacgccgacgagctccagagcgggttcccctacctcgaccaggtcatcaaggaggccatgcggttccacgtcgtctcgccgctcatcgccaggcagacctccgagcgcgtgaagatcggcggctacgtcctcccaagggcgcgtacgtgtggctggcgccgggtgtgctggcccgggacgcggcgcagttcccggacccggaggagttccggccggagcggttcgcgccggaggcggaggaggagcgggcgcgccacccgtacgcgcacatccccttcggcgtcgggcccagggcgtgcatcgggcacaagttcgcgctgcaacaggtgaagcttgccgtggtggagctctaccgccggtacgtgttccgacactcgccgtccatggagtcgcccatccagttcgactttgacctcgtccttgccttccgccacggcgtcaagctcagggccatcaggaggggctgaggctgcctagcttggggtcacgtgtgtgtggaactgcatccgtgacgtgatggtgccacagcgtgtcttcttgtgtgtaatatagcactaataagcatatattgagtatgtatatatagaaatagatggtgaagaagattgcacgtattggacagctggcaaatgtgttgcagatactccctctgtttcgttttagttgtcgctggatagtgcaaaattaaactatccagcgacaactaaaaaaacgaagggagtacaacttcagtagaagaacgtacgcgtgtgttgtcctggactaaacatgaatctgacagatttctcgaggttttgcacaatcttt

SEQ ID NO: 99438 - DNA, 4831 bp, Zea mays
  Clone ID: MRT4577_2219C.1
atggatcctaagggcaaggggattgtgatcaatgataaggagaaggagtctttcgtcaacgagccaaaagatgacaagcctaccgactcgggcttaggccacaaacgaaaagatgggaagaagaagaagacaaggcgcatcaaggagatcgtctactacgacgacagcgacgagtcctcttcttcccaaaaggacaacgacgacaacgactatgagaaaaagaaaacaatcaattcgaacttttcttttgattactcttgtattccacaaagtaccaatgctcatttactctccattccacttggtaaacctcctcacttcgatggagaggactacggattttggagtcacaaaatgcgtagtcacttgttctctctccatccaagcatatgggagatagtagagagtggaatgaaatttgatagtactgatagtcccatgttcattaatgagcaaattcacaaaaatgcacaagctactactgttcttctagcttcattgtgcaaggacgaataccataaggtgagcggcttggataacgccaagcagatttgggacaccctcaggatctcacatgaggggaacgacgtcaccatgctcaccaaaatggagttggtggagggcgaacttgggagattcgctatgatcaggggcgaggagccaacccaaacgtacaaccggctcaagaccctcgtcaacaaaataaggagctacggaagcacgagatggacggaccacgacttcgtccgcctaatgctacggtcctttactgtacttgatccacatctggtaaacaatattcgtgaaaatcccaggtacaccaagatgtcgcccgaagaaatccttgggaaatttgtaagcgggcggatgatgatcaaggaggcgagatacgtggatgatgcattgaatggcccaatccacgagcctcaaaccgttgctctcaaagcaacaagaagcaaggaggcactacctagcaaggtggcacaagttgagtcggccgtgcttaatgatgaagagatggccctcatcatcaagagattcaagacggcgctaaagggtcgcaaggagcaccccaacaggaacaaaacgaaggggaagcgctcctgcttcaaatgtggtaagattggtcattttatagctaattgtcccgataatgatagtgaccaggaaaaaaagagtggaaagtgggaaaagaagaagaactacaagaaggcaaagggcgaggcacatcttggaaaggagtggaactcggattgctcctcgtccgactccgacaatgaaggactcgccgccaccgccttcaacaagtcatccctcttccccaacgagcatcacacatgcctcatggcaaaggagaagaagggactagatagaaccaaagttgataaaatcaatgaattaattgatgccttgaatgataagaataggttattagaaaaacaagaggaccttttatatgaagagcacgataagtttgttagtgcacaaaattctcttgctctagaagttaaaaggaatgaaatgctttcttatgaactatctacttgtcatgaaaccatttctactttaaaaagtgctaataatgatttaaatgctaaactagaagtatcaagtaaacctaactcttgtgtagaacatattatgatttgcaataggtgcaaagattttaatgttgatgcttgtagtgaacacctagtttgcatttcaaaattaaatgatgaagtggctagtcttaatgcccaacttaagactagcaagagtgaatttgacaagctaaaatttgctagggatgcctacacaattggtagacacccctcaattaaggatggtcttggcttcaagagggaagtcaagaacttaacaagccataaggcttccatctccgccaaggagaaagggaaggcctctatggctagtagtgctcaaaagaaccatgccttcatgtatcatgataggagacattctagaaatgggtatagaagttatgatacgttttctcatgccatggttgcttctagttcttctattatacatgatagaaatttagctaggagaaatgttattaatcacatgcctagaagaaatgttgctcatgtgcctaggaaaacaaatagtgaaccttctacaatttatcatgccttaaatgcttcctttgctatttatagaaaggataggaagatagttgctagaaaattaggggcaaaatgcaagggagataaaacttgcatttgggtccctaaggatattgtcactaaccttgtaggacccaacaagagttgggtttatgcatctgggggatcaagctggattattgacagcggatgcacaaaccacatgacgggggaaaagcagatgttcacctcctacgtcaagaacaaagattcccaagactcaatcatattcggtgatgggaatcaaggcaaggttaaaggcttaggcaagattgcaatctcaaatgagcactctatttctaatgtattcttagttgagtcgcttggatataatttgttatccgataaatctgaaacccaagggaccctcaagcgcttcctaaggagagctcaaaacgagtttgagctcaaggtgaagaagataaggagcgacaatgggtctgagttcaagaatcttcaagtggaggagtaccttgaggaggaagggatcaagcacaagttctccgctccctacacaccacaggaaaatggtgtggtagagaggaagaacaggacgctcatagacatggcgaggatgatgcttggagagttcaagacccccgagcggttttggtcggaagtcgtgaacacggcttgccacgccatcaaccgggtctaccttcaccgactcctcaagaagacttcgtatgagcttctaaccggtaacaaactcaatgtttcgtatttccgagtttttgggagtaaatgctacattcaagtaaagaagggtagaaattcaaagtttgctcccaaagctgtagaagggtttttgttaggttatgactcaaatacaaaggcgtatagagtcttcaacaaatcatcgggtttggttgaagtctctagcgacgttgtatttgatgagactaatggctctccaagagagcaagttcttgatcttgatgatgtagatgaagaagacattccaacggccgcaatacgcaccatggcgattggagatgtgaggccactggaacaaaaggagcaagatcaaccttcttcctcaacaatggtgcatcccccaactcaagaagataaacaggttcatcaagaggaggcatgtgatcaagggggagcacaagatgatcatttaatggaggaagaagcacaaccggcacctccaacccaagttcgagcgacgattcaaaggaatcatcccgtcgaccaaatattgggtgacattagcaagggagtaactactcggtctcgattagtcaatttttgtgagcattactcttttgtctcttctatcgagcctttcagggtagaagaggccttgctagatccggactggttgttggccatgcaagaggagctcaacaacttcaagagaaatgaagtttggacacttgtgcctcgtcccaagaaaaatgttgtgggaaccaagtgggtattccgcaacaaacaagacgagcacggggtggtgacaaggaacaaggctagacttggcaaaaggttatgcccaagtcgcaggttgttccaaatggatgtgaagagcgctttcctcaacgggccaatcaaggaggaggtgtatgtggagcaaccccctggctttgaggatgaacggtaccccgaccacgtgtgtaagctctctaaggcgctctatggacttaagcaagccccaagagcatggtatgaatgccttagagactttttaattgctaatgctttcaaggttgggaaagccgatccaactctttttactaagacatgtgatggtgatctttttgtgtgccaaatttatgtcgatgacataatatttggttctactaaccaaaagtcttgtgaagagtttagcagggtaatgactcaaaagtttgagatgtcgatgatgggcgagttaagctatttccttggattccaagtgaagcaactcaaggatggaaccttcatctccctaacgaagtacacgcaagacttgatcaagcggtttgggatgaaggacgccaagcccgcaaagactccaatgggaaccgacggacacaccgacctcaacaaaggagactccgactatgctggatgtaaggtcgataggaagagtacatcggggacatgccaattcttaggaaggtccctggtgtcatggagttctaagaaacaaacctccgttgccctatccaccgctgaggccgagtatgttgccgcaggacagtgttgcgcgcaactactttggatgaggcaaaccctcagggactttggctacaatctgagcaaagtcccactcctatgtgataatgagagtgctatccgcatagcggataatcctgttgaacacagccgcacaaagcacatagacatccggcatcactttttgagagaccaccggcaaaagggggatatcgaagtgtttcatgttagcaccgagaaccagctagccgatatctttaccaagcctctagatgagaagaccttttgcaggctgcgtagtgagctaaatgtcttagattcgcggaacttggattgatttgtagcatacatgtgcggtatgctttgatcatgttcctttatgcattttgttatgtatttgtggggttcaaaggggacaatcactccctggactttcgaaggatgggttcatgtgcatcacacatgtaggaggagatatgctttaagctgcctttttt

SEQ ID NO: 99439 - DNA, 1829 bp, Zea mays
  Clone ID: MRT4577_221C.1
cgtcttcgtactcgcctacctccgcggctcaaacctttcccccttctcccaattccctccgtcggccgccgctccatcccgtacgacgacaccatgagggagtgcatttcgatccacatcggccaggccggtatccaggtcggaaacgcgtgctgggagctgtactgccttgagcatggcattcaggctgacggtcagatgcccggtgacaagaccattgggggaggtgatgatgctttcaacaccttcttcagtgagactggtgctgggaagcacgtgccccgtgctgtttttgttgaccttgaacccactgtcatcgatgaggtgaggactggcacctaccgccagctcttccaccctgagcagctcatcagtgggaaggaggatgcagccaacaactttgcccgtggtcactacaccagtaagtaatctgatctgatcgtcagttttcactgctccttgatatttgctctgtaatgaacatctcatttaaacctgattccttgttttgcagttggcaaggagattgttgacctatgccttgatcgcatcaggaagcttgccgacaactgcactggtctccagggcttcctcgtcttcaacgctgttggtggaggaacgggctctggccttggttccctcctcctagagcgcctgtctgttgactacggcaagaagtccaagcttgggttcactgtgtacccttccccccaagtttctacttcggtagttgagccatacaacagtgtactgtccacccactccctcctcgagcacactgatgtggctatactgctggacaatgaggccatctacgacatttgccgccgatcccttgacattgagcgcccaacctacaccaacctcaacaggcttgtgtcccaggttatctcatcccttactgcctccctgaggttcgatggtgctctgaacgtggatgttaacgagttccagaccaacctggtaccctacccgaggatccacttcatgctttcttcgtacgctccagtcatctctgctgagaaggcctaccacgagcagctctctgtggctgagatcaccaacagcgccttcgagccatcttccatgatggccaagtgcgacccacgacatggcaagtacatggcctgctgcctcatgtaccgtggtgatgtggtccccaaggacgtgaatgctgctgtggccaccatcaagaccaaacgcaccatccagttcgtggattggtgcccgactggcttcaagtgcggcatcaactaccagcctcctagcgttgtgcctggtggcgacctggccaaggtgcagcgtgctgtgtgcatgatctccaactccaccagtgttgtggaggtgttctcccgcatcgaccacaagttcgacctcatgtacgccaagcgtgccttcgtgcactggtacgtcggtgagggtatggaggaaggtgagttctctgaggcccgtgaggacctggcggcgctcgagaaggactacgaggaggtcggcgctgagttcgatgagggcgaggatggcgacgagggtgacgagtactagagaagtttgctgatgacgcagcatcaggccagtgtgctgcccttatcccgtgatctgccgtgagttgctcctgctatcgtgttatgtgtgtctgttctgaagtattgtgtggtttacaacacctgatgttgtaagagttgttaattcccctgcattgctaccgggttattgagaataattatggctgtttacgttgttgcttcaaaaaaaaaaaaaaaaaaaaaaaaaaaaaaaaaaaaaaaaaaaaaaaaaaaaaaagagggggaaacctcgagggtttgttttta

SEQ ID NO: 99440 - DNA, 3249 bp, Zea mays
  Clone ID: MRT4577_22200C.1
gataccactagaatttcattaaaacttgagtcatcaaaagcatcagaacagtatccccatgctaaagacttcactcggggaatagtagaaaacgttttgaagactgcctgagtacaggtatcaaatacagctctatgagattcaacttgtgatgagttgatctcagcagttgccaggacaagatcccctgggttgtaaaacaatggttagaaaataagaacaacattaccagtagaacaacaaacaacggctatttgccggctggttaacgtccatgttctgctttgtatttacgctttcgctggactggacactcgacgtctcgacgcacctgccgtctggttgcagacttgcagtccaaatcacagacagcaaatcgacctacatgacacttgcaaaaccaaaaaaaaaaaaaaagaggaaaacaaatacgggggccgattagttcgtacatgcaaaacatacaatatatcatgggtgcaaaaacacctgccggatgaagctgcaaaaatcccatttctgccagcttttccgctcaaaatgctgcacatacaatcacaaaagtctttcatggcatcatcgatgagaatccatgtccaagactgcagccaagcttgactttaaagatgctgaaccaaagaaagctgatacatataatatttgcaagattcatctgcctttcaatatatagcctaactgccaagaattaagttctgaatccaatgcaccaaaaagagaagggaaatatctacatgagaggaaggtatgctccaccatgtcccttccttaggatcagcgggccagcattgtccgggactttgtccaaaactctattgcaaataacaaggacgtcaatgaagcctgtcgccagagttgccaactgcagcctcagcctcatgtcccttgttctacgcagcaggctcctgaaggatctaccaagatgtttcacccactctgcaggcaagcctccaggtgaaagccagacagagaagtgtgactgctcccccctggctgcaacctccgccctgtaaaaccttgcaagctcgagaagcattggtggctgcaggggcagcactgagacaaactcagccacgaattgctcgattagatccggttttagcatttgattccaaaagactggggcccattctataggttgatttatgttgtatgcttcagcaacaataagagcttcctggaacctagattgttccacaaaaatccgccgggcattggtctcagaaagaccaatccacaaaagatctggtattcggatctgaagtgacagaagagaagcacgggcacaagcacgatgtgttctttggccagcatcaatagttgaaagaacctcagctgtctctacaagatgatgcatagcgtccagaagctcatcatttcgccgttccttatcatatcgtgataaccagctgttcatgtattgctctgcacgtgattcaaggagagaagcagcttcatgcttcatgtcaaagtgcttgtataccatagagagagcgtcgtcatcattcgggataaactgtttcagtgatgtaataacagccatcctaaatcctcgaaccgatgcaagcgtccctgtggctgtgtcagtggcagaatacttttgaagcagcaactccaattggccattctctacaaggattgaaagaatgaagctcaaggaatggaaattgctcactccagtgatcaaacgagctaaacaagaaaaatcctcctctaaaacatatgagtccactctatttgctgcaaatgtgacgagaacatccactccatcaagacaagaagatgacatgtagaagtggtgcgacaatattaggagttcaacctcacaagcatgtggtacttcatgtccagtcattaccaaacgcatcaaagcatggccaatttctgattctgatggacatagttttgcccactttaagaagtcacttgatctccacaatagaggtgcaggaccctcttccttttgggaatccaaatagcctccacgatgtgcggccaaaagcccctttaagaacgaatcagctagaattcttgcaatgctagatgcaggcatgatgtgtgtctccactagaaatttcgcttcatcaaaagaatcctgagctttcagggaaagcaactgtagaagttcaattggttgtttctcaaatgcttcggaaaatgggagtcccaataatctagcagttcgaacaactcctattattctcctaataagagctcgcccacgaccctcaccacatttcgcagctagtatctccataacctgtgatgggctaatcatatcgcagctatttgctactctcagtgactgaagtatccgaagagcctgtgtgtcaaagcatgacaaattgatctctccattactgctgtttttggcaattcttaaagcaacatcaacaaggacaagttcttcaggaatatatgatggagacagcttttgttggagttgcttagcagcagttatttgcccaaattccagtaaagagagcacagccttctccatatctacaggcctaacattttgttcccaaccagataaagatgcttccatctttacaaattcctcttcagagagcaaatttctagcttgttcaccaatctttgaactatgtaaagtgttagaattgttatccagctcattagctctactttcaatattgtcattgacacctcgtttaagtggtgaatttgttttcatccttcgctttgctcgcgtgttatttattgttgttgaagatgcttcactgttagactcaaagagttgcacatgttggtatgataaactgtcccgtgtgctattcctttctgtaattttcatgtgcggcaagctcatgttactgtctatttttgtgatgatatcagcagtatgttctataatactgctactgtttccaacagctttgttatgagcaacagcagaagtggcaaattcaccatcaaccttggattgactctctgactcaacagccaggagccacaccctagtctcaatttcccgcaaaagatgaagaggatagaccggagaggatttagtcatagttccacttagccattgtaaagagagcaataatatttcatgaagctcttgtgctggtatctcttttcctactgcttcggcatgcttaaggaaaaataatccagcctttaaaggagggaaagaatatctcataaagagagattgacagtgaccccacaaggctgcacggttcttgtgggatatcccaaagaaactcc

SEQ ID NO: 99441 - DNA, 382 bp, Zea mays
  Clone ID: MRT4577_22201C.1
ttttatctcttattttttttttttcccaacccaaatggtcggggggatcatgggggttaattaaacccttacaacccaaaatttgaaataaaatatcattacttcttcggacaggcagacactctctttagataacaacaccagacgcacccatgacaatacccagctaattgaatactatggtggcttatcgacccaacaccctttttatttcgataacggcaaatagatttttaaaccctcgcactcacacacaccatttctttattgatccggatccattgcattacttaaaaaaatgcagccctgcgtcaagatctaaaacgttaggcgggtgccgggccccaacttataccattcgaacacctaaaatgtatatttt

SEQ ID NO: 99442 - DNA, 484 bp, Zea mays
  Clone ID: MRT4577_22202C.1
ggggggggaaaaaggggaattgtatttgccaacatgttcctgaaaaaaatccaaaaacagggttggggcccaaccaaattttgaaaattatcctttggccaagggctggaaaaaaagagggccaatttttgaaacccaggggctgggaaaaaaacggggggaatggcaaatggggcctccatccaaatgggggctgggaaaacccttttacccctcaaaactccaaaaggggggccccagtctaagtaggaaccccagggggttgtttaggggaaagaaaaccctgggggagcagggcctgttccccccccctgatcaatgatcccgaggggggctaggcccttcgggggggggacccctgcgacgtacaaaagcccggagttgttgtatccaagggccaggtattaagggagggttggggggtttgtcctatcgcctttaaacagggcccttcccgtttgggacgcggccattgccccgggaa

SEQ ID NO: 99443 - DNA, 798 bp, Zea mays
  Clone ID: MRT4577_22203C.1
tacctcgaggccggccgggtgttgattcctgcttatcttcaacgccggccaacctcacttcccatggccgtcctctacctctcggctctctgttggccggtgttcctctcctcctcacggcgcctcctctgctccagctcggccccgccctgcgtgcgctgctccctggcgctcctcctcctttctcccaaccgcgcgtccctcccatggctgcctgcgccgcgcgccctgctcctctgcacgcagccgcgttcctctaccgaccatccatttccctgccgaggtttcgcccagccgtccttcctttctctcaactccggctgcgctgtttccatgcctggccgcatcgagctcggggcctgctcgctgtccttcagctcacgcccggcccagctcggatctcgctccagttcgccgttcccccttccttgccgtggaagctggccactgctgctcggcttctctggtgcgcgcgatttgccggccaggtcccctcacctgtggtctcctcgccgcgtgttctggccgtcgacctcgcttggcctgtatcgttaggctattcaaccatggtcgctgctgcgcgcccttgtccctgatgcacattgcgcggtatttggatcacgccgattgactcccgccttacgccgtgttgtgtgccggctttccctcgcggtagaccacgccgtcgtctaaccttgttcgcttcgcggcatcaccatcgtcatctgccagctccatcactgaccgttcctaatatttttttcccaacaccgagtctctctgaccttactgctcatc

SEQ ID NO: 99444 - DNA, 331 bp, Zea mays
  unsure (1)..(331): unsure at all n locations
  Clone ID: MRT4577_22204C.1
tcgtnagcagcgatcgtctctcctctcccacgcatcgcgccaaggaagagagagagatcgccgctccccttctcgtggtcagtggagcagaggttgaatcccctgcgtgtagatgtagagggcgctcgaggatagacgacgacgaggagaatggccaccgtgcccgaatggagtcgtttgttggaggcatggcagtctcggatctggagaagacacattgggtctaaacagaatggacaagatcctggaaagaactggcagagggcgtaatgttactgcaacagatgatggaactaccatttagaagtcaccctcaattgacaatcctgct

SEQ ID NO: 99445 - DNA, 165 bp, Zea mays
  Clone ID: MRT4577_22205C.1
acccccccggtctaccagcgactcaccgacctagatcagcacacactgcacttatttagctaggaacagcaacagcttcggggggggagttctcaatgatctcctcgacatctctggcagtagcacctcacgtactgccttccctcgaacggcgtgctttctact

SEQ ID NO: 99446 - DNA, 696 bp, Zea mays
  Clone ID: MRT4577_22206C.1
cggggcatccatagacttccacgaaaccctagcgcctcatatatatagtttctctcctgccacttttgcgagcttacttcacgcacgccgccgcagccgccgccgctacagcccgcacctcgtttcctctcccgtctccgagatgacgaagcgaaccaagaaggccggaattgttggcaaatatggaaccaggtatggtgctagcttgcgtaagcaaatcaagaagatggaggtatctcagcactccaagtatttctgtgagttctgtgggaagtttgctgtgaagaggaaagcggttgggatttggggatgcaaggactgtgggaaggtcaaggccggtggtgcttacaccatgaacactgctagtgcggtcactgtcaggagcacgatccgtcgcttgagggagcagactgaagcatgatcggtcgcttgtcaggcatactggggtccactatattggctgtgtagccgagacagtactccagcatttttgggttatgctctaggatctctaaaggttgggtgctaagatttctacttgtttaccgttgtgaatttcacaagtgatatctgatcctattactatcatgatgacgtcaaatttgcttctggtttctaccctttggtttgcaaatccctttttctttaaaaaaaaaaaaaaaaaaaaaaaaaaaaaaaactcgaggaggggcgccg

SEQ ID NO: 99447 - DNA, 323 bp, Zea mays
  Clone ID: MRT4577_22207C.1
agagccagccctttttttttttttttttttttttttttttttttttttttttttgagtgggattatttataatttttaagtttaggtttttgtagggttaccatttttccctatagtgaattgtattaaagccaggctgaaaaagggcatagaagacatcagagagaaaaagaaataagaaaaacaattccccaggaaaatacgaagccggaagaaaaaaaaaaaaaggggggggggaaaaaaaaaaaagcaacccacaaaaaagggggggggcacaaaaaaagttttccaacaaggaaaccagaagagccagctgcacaaaa

SEQ ID NO: 99448 - DNA, 573 bp, Zea mays
  Clone ID: MRT4577_22208C.1
ccgccagtgtgaggcaatctgcaaattcgccctttcgagcggccgcccgggcaggtacaagctttttttttttttttttttttttttttttattttttttttttttttttattattttaaaaattttttactgttttttaaaaggtaaaaaaaaaaaaaaaatgaccattacccaaaattagaaatgttaaaaaaaataaagggaagcatattaaaataaaggaaaaaaaagataaaaaaacatttgagccgttttcaattgtaaactcagccggaaacaaactaaaggcaaaattcaagacaatggcgggcgattctaagggaacccaaattgggaccaaacttgggggaaaaaagggcaaaagtggaaactgtgggaaaatggtaatcgctcaaaaattcccacaaaattagaacccgaaacaaaaaaggtaaaacccggggggcctaaagaaggaactaaatcaaaataaatgggtggcgcataatgacccctttaaaaaccggaaaaccgtggtgccaagttgaataaaaaaaccggcaaaacgcggggaaaagagggttaagaaatgg

SEQ ID NO: 99449 - DNA, 251 bp, Zea mays
  Clone ID: MRT4577_22209C.1
tgttcgatacgaagccgacgacttgaccaatcgagtgcggcccatggctctctgcacaccttggaccactttacacaggaaaccagacccacaaacgccgaagacggaaaccaagccatgaggtccgccggggaacaagactacgacgaccacaagggggggtggaactactgtctatcacccggccaatatgacagaggtgaactgttacgagaggcatgtatttgatgactttaatacggaagatgact

SEQ ID NO: 99450 - DNA, 477 bp, Zea mays
  Clone ID: MRT4577_2220C.1
atggcaaccggatccgccgcgggagaggagtcatcggcggcggcgcgccgcctccgccgcctctccctgcacctcctccagcccgccccggccgaccgccaccaccagccgctggccctcgcggcgtgcgggcaccgcgtcgagggcggcacggacgtggcggcggctctcgcggcgtacctccgcggccgacaccgcgccgcgcagatgcggctgttcgacttcttccgggcacgccccgacctgcagacgcccatcgagctgcccacggccgcgcaccgcgacctctgctaccgccagctgcgcacgctcgtgcgcgaggccggggtgcgcccgctcacgctcatggccaccgaccccgccgagtacttcgccgtcatggaggccgccggcggggccgacatctccctcggcgtcaagctcggcgtccagtacaggatcgaatgtccaagccctacaaactaccgctacatttga

SEQ ID NO: 99451 - DNA, 247 bp, Zea mays
  Clone ID: MRT4577_22210C.1
ataatacaactattcttgtcggttatttggatcctaacggcacgggtgaccatttgagacaaggttatggtcattatgcagaattagttcatgtgaagattccagctggcaagcgatgctgatttgtccaatttgcggaccggagctgtgcggaagaggccctgcgggttttgaatggcacacttcgtagcggacaaaatgttaggctttcatgggggcaagtctttcaacaaacagctcaacagat

SEQ ID NO: 99452 - DNA, 183 bp, Zea mays
  Clone ID: MRT4577_22211C.1
cagacattgcgcgtatcaagttcgtatgtgggtgtgctattaacgtactagtagtatacgctcacgtgtatctggctcagcttatgacgattaatgctcttctgtcgatactacttgggagtggcatgtccttcactatgtggggtgcccttgcggtacatgtgcagccgtgtgtcatgagtg

SEQ ID NO: 99453 - DNA, 171 bp, Zea mays
  Clone ID: MRT4577_22212C.1
acgcgactttgccagctcggagtcgctggtccgggcgcctccctctacgtctccggtcgcgatggccaacagcttccaagcggtaccggcggtgcacgttcaacttccccactgacaacgctaagctcggtgggtggtagcccgtgcgggggcacccatcctgggacggcg

SEQ ID NO: 99454 - DNA, 212 bp, Zea mays
  unsure (1)..(212): unsure at all n locations
  Clone ID: MRT4577_22213C.1
gacannnngcggcaaaaaaagagggaggcagattggggctagttctaaccacagcactaaaaatgttatagatgctgttggtaaatacgccaagtactaattgggcatccatcgcattggacgtctttataaactaacggcttaaggagatccattaaatggatgaaaactgggaaggcaacatctaatgtattgggatgcctgcctgcacc

SEQ ID NO: 99455 - DNA, 346 bp, Zea mays
  unsure (1)..(346): unsure at all n locations
  Clone ID: MRT4577_22214C.1
caggccccgcnnccgcgcgccgcggccccggccaccgccgcgcgccgagaagaggggaagcggcggancccaccggaggccaacccggcagncangaaccagcccacacggggcccgggagncgccgagagggcngagcagcncggcgacgcccacggcccggacgacgaggggagggccnnggngccccaccccgcccncgcaggcccgccccgccacccgngcaccgccccggacgaggagaanaaagaagaagcaagggccccggccacaccgaccgcagggggcaaggaccngagcaagaaggacaccncacaaagcagacaccggcaaggccggggaacaa

SEQ ID NO: 99456 - DNA, 906 bp, Zea mays
  Clone ID: MRT4577_22215C.1
actcctatgggcgattgggatcctcgaggccggccgggattttggcatgcagggggcaccgcactaactatacatagcaattctccattttttattttcttgtgccgtgtctggctggcccagagcgtcggagcgcttgatgccgccgccaccaacgctgccaccgtcgtccccggacgaccccgcggagccatcgtccatggggcgggagatggacgacgaggacctggtggaggagctcctgctcaccgtcaacgcggcgcgcgccttcgcggagttccggcgcacgcagcgcaaggagtgcgccaacctcctccgctggctgcagctcgtcctcccgcacctgtcgctggcgcccaactacgcgctcaagaacctgatcctgcagtggtgcgagaggaacatggtggagctgcagaagcgggagccggcggagacggagtcggagcggaagggggaggcggcggacgcggccgacagcatcccgtcgctggtggaaggcatgtcgtccatccaccccgacgtgcagcgcaaggcggtgaagaagatccgtcggctctccaaggagtgccccgagaaccgggcgctgatcgtcgacagcggcgccacccgccgcgctgatcgggctgctggcgtgccccgacaagaaggcgcaggagaacacggtgacgtcgctgctgaacctgtccatcgacgacaagaacaaggccctgatcgcgaggggaggcgccatcccgctggtgatcgagatcctgcggaacggcagcccggaggcgcaggagaactcggcggcgacgctgttcagcctgtcgatgctggacgagaacaaggcggcgatcgggagcctgggcgggctggccccgctggtggagctcctgcgcagcagcggcactgccccgcggaaaa

SEQ ID NO: 99457 - DNA, 389 bp, Zea mays
  Clone ID: MRT4577_22216C.1
cgtagagcgaaattcgtttcgaaccgaagaacccaaccgaaatggataaatttcatgaaattttggactaaatacagtgaaatttcgacattcgaagcacaaaattcgtttcgaaccgaagaaccctggccgagagctctattggatgaaaggttgaagcgctcaccaggcgattagtagtcttgcagggcgtcagagcagcttgtagaggtgccaagtgctctacctgctctacctacaaagggttcagcgctcaccagggtgcgtgttggggcaacagcaaaacctcattatgcttttttttgggccatggcacccacaaacttaccactcgcatgatcaggacgacatcagcttttctgctgtgtgatcaggaaactcgcatgatc

SEQ ID NO: 99458 - DNA, 716 bp, Zea mays
  Clone ID: MRT4577_22217C.1
ggccgccccttttttttttttttttttgactgagaagatataaaggatataatcttttaaaggacaaaaaataattatttagaagattaaatttagagaacgttggtggagacagtcttagaggcatcatcagagaacctttctccttcttcaggtgtcatcatggaggactcatgctgcgacgattaactataaagatggacctaaagaaggagaaatgttccttgatgaagcctctaaggttggctgcagcggttgccgttagccagccctcttcccttgcatggcgcatgcagggggcgccccacgccagcagcgctgcccctgcaggaaggaggaaggtttcttgatgaagcatctaaggttggctcaacgccagcactcttcccttgcatggcgcatcagaaggttccttgatgaagcctctaaggttggctccagccctcttcccttgcatgacgcatgcagggggcgcctcatgcccgcagcgcttcccctgcgggcccttacgcgtcggtccccttctctctcgatatagcgtgacactgttcacacacgtctgttcatttttgtagcagtggatctacgagtaattgttaatatatgaaaattatgtataggaaatgatattttatggttgtagtgtggtataggtgaaaatatagagggaacggctgcaggagataaaaacgtaggggataaaatgtcccggccgg

SEQ ID NO: 99459 - DNA, 1272 bp, Zea mays
  Clone ID: MRT4577_22218C.1
catagatgaaatagataaaataacaaagaaggcagagagtgcaaatgttagtagagatgtatctggagaaggtgttcaacaagcattgttgaaaatcctagaaggaactgttgtcagtattcctgagaaaggatcacgcaagaattctcgcaatgacagtatacagatagacacgacagatattctttttatatgtggtggtgcttttgtggacttggaaaagatgagttctgaaaggcgccaagattcatccataggatttggggcacccattcgtacgaacatgagaagttctggagctagctgtccaatggttacctcatctttattagaatctgttgaaagtggtgatcttgtaagatatggtctaattccggagttcattggtcgtttgcccattctagtaagtttggcagctctgaatgaaggccagctcgttcaggttctgacagaaccaaagaattcactttccaaacaatacaggaaaatgtttaacctgaacaaagttaagctgcactttactgatggtgcacttagattgttagctaagaaggcgatagctaaaagcactggtgctcgtggtttaagagccatcttggaaactgttcttttggaggccatgtatgaggttccagacgaaaaaacaggaaatgagcgagttgacgctgttgtggtggatgaggaggcgattggttccgttgataggccaggttgtggggctaaaattctccgaggggatggtgcattggaccagtacataacaagaaccaatgtgatgaatttacaggaaactaacgatggtttggccggggagctcgaggaagcgtacatgctgtctagaattgttagcttgtaatttgaaaggctggggaggaagcgtatatgctgagttctgaccaacttcgtacatcgtgtaacatgtctaccccaacacaggccggctactttttgctcacaaaatcacctgtactctgtctccattcctgttaagctctaacgagcagatagatccggggcaccttttccatgtaaacaggagttgccttttgattgagcaaccgtcctgcggagtaaattgttgcccatttttccccgctgcccccaactgggcagctcgattgtggttgacagagttgtaaagatcatcaatttactgatatgatatgataagaaggagcactttcaccaaaaaaaaaaaaaaaaaaaaaaaaaaaaaaaaaaaaaaaaaaaaaaaaaaaaaaaaaaaagaaaaaaaaaaaaaaaaaagcggcc

SEQ ID NO: 99460 - DNA, 286 bp, Zea mays
  unsure (1)..(286): unsure at all n locations
  Clone ID: MRT4577_22219C.1
ctcttccgtggtggaatagcttcggtttcaagtccgaggtcgtcnnnnnnnannaannnnnnntnnnncncctgaccgatatatcnnccatatagtccctcgatataaacttcaagcgtgtttgatttatgggtaagccatattaatgtaataatgccttaataagcaggtcatatgtgtgtcgaaaatacggtttaattttatactactaccacgggggcatgcactcttcatgtggaatgccttacctgtaatttattgcgaataaataaagagaggatgtctc

SEQ ID NO: 99461 - DNA, 1801 bp, Zea mays
  Clone ID: MRT4577_2221C.1
cttattgttatacatcctgcaaccgactcgcccaagtgattagccagagctgatttggtagtgcgattgatcctcatcagttccttagctgaagctaaatagtacttctgcaacctgagtgccaaaaccatcatcggcacagagacgaacagaacttgccatgtaacaacattggctttcgaggaagaagatcgcttctttgagaaaaattcggaacttgttgacaagaatgctgcttcatatttctataattttgcagcgactgaatggctcattcaacgtttggagaccatgagtgctgcagttctttctttttctgcccttatcatggctcttcttcctcaaggaacttttaaccctggctttgtaggaatggcattatcttatggtctatccctgaatatatcctttgttttctctatccaaaaccaatgccagctagctagtcaaatcatctctgtggaaagggttcatcagtacatggacataccaagtgaagcagcagagattattgaagaaaatcgaccagcaccagactggccccaagttggcagggtggaccttaaagatttgaagattagatacagacaagatgctcctcttgtattacatggaatcacctgcagtttccacggtggagataagatcggtatagttgggcgaacaggaagtggaaagacaactttaattggtgcactgtttcgtcttgttgagccaactggagggaaaataattatagactctatagacatcaccacaataggcttacatgacctgcgttcacgtttgggtatcattccgcaagatccgacactctttcaaggaaccataagatataatctagaccctcttgggcaattctctgatcaacaaatatgggaggttctaggcaaatgtcagcttcttgaagctgtccaggagaaggagcagggattggactcacttgttgtggaagatggttcgaactggagcatgggtcaaaggcagctcttttgtttgggacgtgcacttctaagaagatgccgtatcttagttcttgatgaggccacggcatctatagacaacgctactgatgctatccttcagaagacgatcaggacagagtttagagattgcactgtcatcactgtcgcacaccgtatacccaccgttatggactgcgatatggtacttgcaatgagtgacgggaaagtagtggagtacgacaagcctacaaagctcgtggaaaccgaaggatctctcttccgtgatcttgtcaaggagtactggtcatacacatcgaattgaaatatctaggagaaactgtgacaatcacatgttcactcgttgcagtctcttaaaaaagagataacaggagcctgttctcacacacatccgatgaactattctatctcaagtccgaagtagaggtgtcaggcattgtcgggaagtgcttttgttaactagttgaacagggggaaacctgtcgtcccttaaaaaaaaggaaacctccagcgtttttttgctccgatattgagcgaataaaccgaaatatctagtggaaggcgcatcaagtatgcatccttgatactgcatgttcacagaaatgcttgtgcggcaggctgttccaaggctttaaactttatggtgctttacattcctaataaaccgaattgtgtatatgatgtttgggaaaatggtgatttttcaggtttcagctccctctcttgctcacgtttaatgtattatcagtgtaaattcatccgtgattggatttaaggcaaaaaaaaaaaaaaaaaaaaaaaaaaaaaaaaaaaaaaaa

SEQ ID NO: 99462 - DNA, 263 bp, Zea mays
  Clone ID: MRT4577_22220C.1
catccttatactttattgcttttctgtcttcttcacacctgggagagaccctgaatttgagtgtgttctctaatcaatagtggtttagctttcttttctatttcactcgtttctagggttttttatttgcagtttaggaactattaggaatgtcaggactttatcagcaggggtaaaactaccacctggcctagcctaagtaggaagtgaacagataattcaccaaacaatgattaatcagatagaagttctagtcaagaggg

SEQ ID NO: 99463 - DNA, 235 bp, Zea mays
  Clone ID: MRT4577_22221C.1
caccccggacgaggaggtcgactaaactgggttgtactccaccgacgctccactgttaatgacttcatcctctgtaacaacgccgatggcgagacaggtcctttaaacttctattggagacataaggtccgccattatggaactgattacatagtgatagttttgctaaccaacgatgtgtttttagcatacatggtatgccatgtagatagagcggatatttgtggacaacata

SEQ ID NO: 99464 - DNA, 416 bp, Zea mays
  Clone ID: MRT4577_22222C.1
atttctagattaaaaaaaaaaaaaaaaaaaaaaaaaaaaaaaaaaaaaaaaaaaaaaaaaaaaaaaaaaaaaaaaaaaaacctaaaaaaaaaaaaaaaatcgaacctgctccgttctgccgatttccatggccctgttttggcgttttcctttcccttggggggcccttcttgcctccttctggggggccctttccagggctttgttcgtccttattcctcttccttggggggcgttttcttcggttttactgggacccccttggcttttccgtgctttttttccttttgccgggccccctttttgccccctgcggttttgcataacccgccggttcccctcctttttcccctttgtggccctcccttttttgccctttttcccgccttgtaaggggcctttacccgcggcgtttt

SEQ ID NO: 99465 - DNA, 411 bp, Zea mays
  Clone ID: MRT4577_22223C.1
aacacacaaaaaagcttgggtttatatatgggggtgttctttggtcccaaaaaggttaacggcggtttaaaagtaaaccatatgttactgtgtcccctgtgaaaaaaatcccgcccatattttttttaccctgtttaaactcccatggggggtatttttttgacctaaagggttttttttttgccctaaaccatctatttagggggcttttccctcaaaaaaaattaaattcctcgcgcctatggtttttgataatcacggttttgatgggattccttggggtctccctttttaacaacaattccccttttaattggggcccctaaaaggcacatgtgtggcggggtcatcatgcagcgggtttttctttcccattttgggaacccgtcttgggttttttgtttgtaaagg

SEQ ID NO: 99466 - DNA, 532 bp, Zea mays
  unsure (1)..(532): unsure at all n locations
  Clone ID: MRT4577_22224C.1
ggaccctcgagggccgcnncgggccgtcagcctctccctgtagattttttctttccaccgctcactccatcttctctcttccctgcaagctccattttttcctgcgcgtcgagccgagttccttccctccctgcgcgcattccagctcgccgagctccctccagcctccctcgccatggccgtcgcgcccctgttccagctcgctcggccatcctccctgccttcagccatggcaccggccgtccctattccatccggcagctcgcctcatcacgctcggctccctggtggctggagctcgccatgggtgctggccgctgctgctttctctgttgctcgtccggcccctactcggatccgttgcgagctcctctggtgctcgcccggccgcgaccttgccgagctccgtccctgctcctgtcgccactggatcaccatcgctgcgcgcgtggttttgaatctctgcgcagactcggccgcgcctgctcgtcgncattgcagcgcgctcgcttctcgttcttcgggctccgac

SEQ ID NO: 99467 - DNA, 879 bp, Zea mays
  Clone ID: MRT4577_22225C.1
atacgatccatttgtcggaggcgctcctcgcgcggtgctcccgtgcaagggcaggttctctcctgcgggctgcggtgctgtgcggcggtcgccaaactcgtcgtgctgcggcggtcgccatcctcgtcatgctgcggcggtcgccaaactcgtcgtgcctgcagtcggatttggctccacggcgccgtcgtcctgctgctgctgttccaggtcatcctgcaggtaccgccaaccacctatatctgcaggttctgttccctctggaatccatctccgaacaacctctagccaacggctcttctgctgcggatccggccaaagcgtgggagtctggaacctgctgcttttttcgtgtgcaacgttcgagcgtcgtggttctgggtgttccatgtcgtcaatgctccgctccgtgctctggccatgcagagaaatgaggctgatgtgcccatggatcgacgaccaagcctctcaaaaaggttgcaggcaagaggaaactactagaaagctttccgtaggtggatacgatgaagaggatggtgctgatgcctacacagatggtcctgatataccttgatccgatgaagatgccatctagacaaaagataaaggatcttttgcttttgtgctcctagaaattatgcagttgatacttttttatcaacttctaccttccatcctggttgatgaaactttgtgtttttgcgtctgttaaaacattgtagaggacatgttggtctacttctaccttatcctctgtagttatgcttgtcttgtgtacctggagcatcttgttgacccccttgactctgggccttcagtgatagtatcaggacccaaacatatcgaccgatttttttgcattttaacccctgtacaaaa

SEQ ID NO: 99468 - DNA, 399 bp, Zea mays
  Clone ID: MRT4577_22226C.1
gtgaaaaaaatcctcgggggcatttttggttagtggaaaatcacaaaaaaccggttcttttgggttgacctttacacaaaagcacaaggggggggacattttgttttataaaacagttttacagccattaaatgtacagtgtgcaaggcggttgttttctgaaagtcaccctgcccttttttgtaatcccaccaacttttttagcccccgccaccggttcttttaaaccggccattttttaacagatggggttttttcgggaaaatgcaaagcttgggaactttacacaacctttgggggggggcccaagcccccaatttttgggggggcggataaatccaattgggttcttactaaaaaaaactaaaggggggaggttccccactctccttttagggg

SEQ ID NO: 99469 - DNA, 305 bp, Zea mays
  Clone ID: MRT4577_22227C.1
cgcttgatctaggtctcgtctagacgaaaagactcatcttctctggtactctggttgcggcagaacggtcggatctcccccaccgatggccgcctcccagtcacccacgctcctccttctcgccgtcgtcctcgccgccgtcgcaccaggcccctccagcgcgcgccacgtcatcaatttcgccccttcccgcgccgtcaaccccgcgtccctcgcttgggaccctacggcgcagcacttcgtcggtgtaggcggcggtgatgccggcctttgcggttccgactcttcttctctctgagtttttt

SEQ ID NO: 99470 - DNA, 170 bp, Zea mays
  unsure (1)..(170): unsure at all n locations
  Clone ID: MRT4577_22228C.1
gtgcaagtacctcaggtattatcctcttggccaaagagagaattggcctaagttatagggtttggcctggtggttaccgaaaatgcaagttacggagccaacttgcagattgtatgagttttggcgttttcgttgggcagtgtattaataaatatagctgtnaacctaca

SEQ ID NO: 99471 - DNA, 623 bp, Zea mays
  Clone ID: MRT4577_22229C.1
tttttttctttttttttgagagatgtttccgtgcacaattttccggactgctggaaattacgtgccaaagacggtgattatttttcacttggaacgttaagtgtatattttatgtgattaaaaaagacactggacggagaatgttccgaagccgtcccacaaaacgacgggatacaagcatgaagcaacttgccaatataaagatgggttacctgccgctgccggctctgctatctaaaattattaatacagattccagagcagggcaaatactttggcagaaaaaaaaaactagcgcatgcgaagcattccaattatatatatataaagaaactggtacacattctccgatccctcgcgacactggtacctaccacctaatgatggactttaaattttatactatcgttctcgaatacttctgatctgctaattttttttaaaaaagcgacaaattaaaaaaacgaaatgagacctataaattaaaggatcggattagactaaaatcagactctatttatattttaaactaaaataattttatgcttctaacaaattgtaagaaaaacatttgggtcagtctgcactgctcagatcgcgggcgtggctgaaccctcgtgccg

SEQ ID NO: 99472 - DNA, 626 bp, Zea mays
  Clone ID: MRT4577_2222C.1
aacacataactggaaacatgtatgtactaatgtaattaacattacaaagcaaatgtgtagatcccaaaccgaaataaaaccattggcaaaaagacatttccgttagagctccagatgcatacatgacttcagccaagtacagcattcgctataagttctcttctctcagccaccctctctctctctctatagcttacacttttttgagatgcttccgaactcctagacagatatgccaggaagttttcagacgcctacgaactcgaactcctagacagatctgcggggcaggccagtttgtcacccggttgacgggaccagccactgaagcaacgtaaaagtttactttactgtaacttaagcttagaggatgcggtcctgaaaatcaatgatgatgttggatgccatcgatgtcaaccttttcccagtttcccctgccatgttcttgagagaagacagatcttgagtggcctggaatgatattctgttgatcaaatctgaagcactgagatccaccctagaattgtttgctggatggccaaatagatcagcacttgatatagcagaggaaccagaaaattttggagagagacttgagtgtccttttcgaaactggcctgatcacc

SEQ ID NO: 99473 - DNA, 900 bp, Zea mays
  Clone ID: MRT4577_22230C.1
cctcgaggccggccgggaaaaattcgcagccctcacgctttctggctcctcctcccctcctccgccgtcaggctcgccgcacagcggttttacactgtttcgacttcgcctcttcctccgcgtccgcgaccgcgaccgcgcgcgatagaccaaacagcacgggtcaagggccgaccggttcaagtctcggcggcgactcggattccactcgaccacgcggacgccatccgtgacattcaagtcccttgccgcgttttacttggccgctgagacctgagtctatcgggacacgagcagagttgcagagcggcagggaggttgctggtcgcgcggcttccaaccaactccatccatggacctcgcccggcgggaggcggacagggccgccgcagcggagttcgtggctctcgacatccggggcgagggggagtcgcctgcgaacgacccggaattgctgatggaatcctcatttgtcgccgctaaggagttcgagcgggatcggagaggagacgtcatttcttcctcctccggtgcgtatgagaagcagacagtgcctgtgcatgttgatgactgcccgagggaacacttacagccctccacgccaactgcaggtggtggtgcaaagcgtcgtcgttccagccgtcgtgttctgggatggcgtgatcccaggaaaatactcttcgcctttgcagcattgtccagcgtgggcactttgattctgctctactttacactctctatggggaagatgacaggaggtcaagctgatggccagtgatagccttgctctgtcttgcttgcaatagcattactaatatttatttgtacagaagaaactgaataactggctgctttctaatgtagtagccaccacatccctgcgtatatcttcatggattc

SEQ ID NO: 99474 - DNA, 364 bp, Zea mays
  unsure (1)..(364): unsure at all n locations
  Clone ID: MRT4577_22231C.1
cgggtcgacctcgcgtccgctcgcgctgccgggcgagcataacccgcagccccaattgcacacggagaccatggccgggggcgctaggagtgcctgtacgtggtgggcacgatgcgcggccctaaccgcgaggtgaccgggatcgcgaccgcgatcgacaactcgcctgtcatcgcgtctttctttttttacaagtcgggggtggtgtgcgacctgtccaacccggtgcactacaccccggaatccggcgtggccgccgactacatcgtcggcttccgccgcctcaccggccacttcaactgcgaccaggacgtngtccttagttccgaccgncagttcgcacgttntggctcctgggacggcg

SEQ ID NO: 99475 - DNA, 335 bp, Zea mays
  unsure (1)..(335): unsure at all n locations
  Clone ID: MRT4577_22232C.1
cccacgcgtccgcaaagatgctgtcttattagcagcaaaaaaggcaaaagaggctggaagcacccgtttttgcatgggagctgcatggagagaaaccattggaaggaaaacaaacttcaaccagattcttgaatatgtcaaggaaataaggtattcattggaatcttttgtttatatggcaaaagtatggtatatgacgcttgacctgcataaccatgcacaattgtctgtcacctatgatgtacaggtcattgacttaacagccttaattacatggaatatgaagatatatccagccagcaaaagttttatgcatgattcttatattntatttc

SEQ ID NO: 99476 - DNA, 569 bp, Zea mays
  Clone ID: MRT4577_22233C.1
ccccctctcgagttttttttttttttttttttttttttttttttttttttttttttttttttttttttttttttttttttttttggcccaaaaaacacacaaaaaacagtcaaagatttttttttacaaaaggaaggggcccaaagggggacttagggtaaaaaacaccccaccgcttttagtttttttttaaacctaaaacaggggaaaagcttttaaaacccaaacaagtcaactaagggaagcccgttgcagttaatttaatacacaaaagtcagttgctcaacaagttaaaaaaaaacaaaaacttagggttcatgctcatttaaagggtcccagcaagacatgactttcgaccatggccttccaaaaaatttttttgggggttttttttttgccatgccgttgggcaaaacatgatatccgaaaatctcccatcatccataataaaaaaaacccccgtaattgcaaatttgtgtccaaaaggaaacttgggagttgagctacttaccattccctccagcagggggggaaaacttatccatctttacaccattttttccccaatt

SEQ ID NO: 99477 - DNA, 316 bp, Zea mays
  unsure (1)..(316): unsure at all n locations
  Clone ID: MRT4577_22234C.1
gacaaaaccttatagcatgacaagcactatatgagaaaaacccatgcnattaggggtcttagagaactaacttgggttgttatttactattataacgattacatcttagataaactacatgacttagcacactataatccgttgttgaacataacacccaaacagacagacattatatataagttggaacacacaagatccaatcaaaacaaatccagctccaagtgcactctacattcatccatctttttcagaactctcagaactctaatctgagcatacggctaacaccagtacagattaaccagctgatact

SEQ ID NO: 99478 - DNA, 252 bp, Zea mays
  Clone ID: MRT4577_22235C.1
gcgggtcgcagccctatgatcaggttgtctggacgggcttgatcgtttatcgccgggaagctgctttggtgtcaaccaacggatctcgtatcgtcgtcttcagaatatcccagattatgcgcttctgcataagaacaacacatcaaaagcgagatcagctcagtaccaacaaaaccttaacaaccacgtttcatgtctgatctctacatgcatcttccatctgcctgtgatccgtttgctgaagcaaatgct

SEQ ID NO: 99479 - DNA, 3489 bp, Zea mays
  Clone ID: MRT4577_22236C.1
acgggaaaagaaggaaaaaaaagcctcgtccagtcgtcccagtcccgaccccttccgcctccgggactcctgcctacgtcataccatcgggcagccgaaccctcgattggccgccgccgccgtaagagagaccgacgtcctccttccactgccgagcgacacctcgaatttctctctcatcgtcatcccttctcccctttattcgcgtcgcgcatctgggagatccagccagcgtgatttgtgttatcggtagctttggatttgtttgtgacccggcgctaacccaacccatccggtggtggattcagcttcttggataccttggtggcggatgttctgctcgtagcaacttgtctcccagaatttttttgggggctagacgctacccctgccatggaatcaggcgataccaaatttgatgcatcacagtatgctttctttggcaacaatgccgtggaggaggttgaactaggtggattggatgatgatgatgatgctgcatttattgagcacgaagatgaagaaaaccctctttatgggagggataatatgttggaggagggtgtaggttcatttgctgacattgatgatcttgctggaactttctcgaagctgaccagaatagtcaatggaccaaagcaaccagtagtagttagtcatagtggatcaatttctagacaaagttctaatgcagagtgggtgcaagagtctgaacttccatattggcctacacagcctgtattggacactgatcacgggctggataaaaagaattggtggtcccaaccaccccattcagtcaacttcattgactatagactgcagaggacatcgtcatccccacagcaagatgctcagcataatcctgttgaacctattcttgaagcaaagccatctcctttacatagaacatcaacgtacccacaacaagaacctcagtacagtaatactgaaccaattcctgtgcccaagtcatcattcatttcatgtcctccatctggtgcagcatctcattcttcacctagtcagccacatcatgtgaacatgccatctcctcccactgcattccagttgcatatgtcttctgcacaaaatgatctactccttccccagttccatcatggaggtacgcctccagggcctccatttggtagacagaatcatgttttaaataatggatcgatgcatggaaagggtcccaggtttatgccaggtttgatgcctcatcaattgcaatgtcccaatggactgatgccacctcagatgcagccacctcatcaacatggaatgctgccaatacaacagtccccaccacagttctcacaactacatgcacggatgattggtccccatcattccccaccacaaagcatgcagatgtttggtcctcaacatccttcttcacaagtgatgagtagatttgatgcaaactttgctatgcctgacttgagtgatccaagagcaagatcaatgttgcaacatgaaaggctgggacagcgttatcctcaccaaggttatgagctcaataatattaggatagataatggatggtcacggttcagatccaagtacatgtgtactgaagaaatcgagaacattgcaaggatgcagcaggctgccacacacatcaatgacccgtatattgatgattactaccatcaagcttgtttagcaaaaaaatcagcaggggctcaactaaagcaccacttttgtccaaccttgattagagatccatcttcacgtgcacgcagtaaggatgagccacatgcatatctacaggttgatgctcttgggaggcttccattttcttctatccgcaggcctcgtccgcttcttgatgttgaacaagcctctgcaccaagtgataatgctgaaaaatctgtgtcaaagcctcttgaccaagagcccatgcttgctgctaggatcacaattgaagacggactttgcctactgcttgatgttgatgatattgatcgtctgctgcaatttagccagcagcaagatggtggtttgcaactgagaaacagaagacaggggctcctcgagcagcttgcagaatcactgcaattagttgatctccttgcaccaaataagaattcacctgtgtctccgtatgatgatttggtgtttcttcgcatagtcactctatcaaagggccagaagctactttcccattaccttgagcttctgacatcaggcagtgagcttgcaaggatagcttgcatggcagtcttccggcatctaagatccatatttggaaatatgccctctgatatcagtgcagtggagacaatgaatagacttgcaaaagctgtatccgcacatattgttcagatggatttgagtgatctcagtgcttgccttgctgctgttgtgtgttcatcattgcaaccacctcttcgacctctgggatccccagcaggtgattgggcttctgtcatcataaagtatgtattggacagagcaacagttctactcactgatcaccatgtggcttctaactacagcatgcggaatcgatctctatggcaggcatcattcgacgccttttttgggctgcttacacagtactgcatgagtaagtttgatcgtgtggttcatactgcccaattgcaacctgctgctgcaaccgttataaccagggaaatgccagtagagcttctgcgtgccagcctccctcataccaatgaggctcaacgcaagcaattgctcagttttgctcaacgcactgtgcctgttggtacccacagttctcatgggtcttggtagtggaagcatcgagttcttattagaactgagtactcgctaaaaatggctctttaggggacctgttatgcttcccctgaaagaagagagggttaaacttgtcactagtactatgaatatcaaaaaacaagagtaaagatggttggagcatcaaaatggtaatactcaacatcaaattttgtgtcactcaaacatgtttgcatggattacttttgtagggtagtcagatgtctgcgtcaattttgtcaatacctgtgttggttattgcaaaatggttcctgtgggtctgttgctcttaagaggaatccgcaattggtctgtagcggttacttgaagacactgtttaattgctcttcaaggtggttcttttcaaggagtagttgccttggcctcaagatgtggaagttggcatagccacaacacgtcgttaagttcttcaggaacaatgcggttgctatggaagttgtaaaatggtagtattattgttttgcgacggccttttgccttttgagaactacaactgatgttgcccatttctctatgcttgatgtgcagaaagtggataaagcttgcatgcatccttactgaattgtgacatttatttggatagataggcgctcctttctttaaagcactgattttgtacggaaactctgatatagaaaatctttgggtgcctgctgaaatgatgggctaggacgatttgtaaaaaaaaaaaaaaaa

SEQ ID NO: 99480 - DNA, 315 bp, Zea mays
  Clone ID: MRT4577_22237C.1
actgcacacgcacgcagacttgaatccggaaaatcggcagccctcgccttggatcaccttggctctagattttttttttattagcgcgctcagcctcctacaacacccgccggatgcctattgtgaaggccggcaacctacccaagggaggatacctcggaaaatgcaaccaccaccataggcaaggggggaatcatctaaaccataccagcatcaccgttattcaggaacttgggatccatctcgagctttctatgccagatcgacagttgatcttggtaaacgaattcaacaaactcgacggctatgtgggag

SEQ ID NO: 99481 - DNA, 633 bp, Zea mays
  Clone ID: MRT4577_22238C.1
aattcggcactcggcgccgcatactcaaaccctagtccgaacctgacgctgattgacgggaggggagaagcgtccggcgaccacgctcggcgcccgatggcggagaacggcgaggagaagctgctcgccacggtgcagcacatcgtccagacccttggccgcaccgacaccatgacggaggatatactcaaggtcttctccaactatgacggccgcctctcgcttgacaagctatacgccacgcgcgccgctgctgcggcggccgcggtcggaggggctggggagcgctccgtgccagcctcgccgcccatgccgccccctccagtggcgccgtcggctgccgcggccatgcccccggtgacgtcgctggagcggaccgtgcgcacgctggaccggcagatctcgcagttcgtcgccatggataggctcatatgggcggactcagcggacgcggacgcgttcctagaggcggtggacgacctcatcggaaccgtgcaggagctggatgccgccgggaccaaccgcgggctgctcgaccgcgccgacgagctgctgagccggtgcatggcccggctggaggacgaatttcgggctctcatcgagcgccccgacgacgcggcgcctcaggttacc

SEQ ID NO: 99482 - DNA, 1197 bp, Zea mays
  unsure (1)..(1197): unsure at all n locations
  Clone ID: MRT4577_22239C.1
attgggaccctcgaggccggccgggacacacacacgttacacaccttccagagcttccgttccgagcgagctagtcctcctcgccatcattgcaactagctagctctgcttcttcgtccttagctcgcacataatctttgaagaacgaacaccaacccaccaacgatcacacactactcaatccatcgactgacatgggcagcctcgacaccacccctaccgccgccttcgcagacgtcgccggcggtggcttcgagccgctcaacgccgacgacgtgcgctcctacctgcacaagtccgtcgacttcatctacgactactacaagaacgtggagtccctgcccgtgctgccgggcgtggagccgggctacctgcgccgcctgctgcagtccgtgccgcccacctcctccgcgcccttcgacattgccctaaaggaggtccgcgacgccgtcgtgcccgggatgacccactgggccagccccaacttcttcgccttcttcccgtccaccaacagcgccgccgccatcgcgggcgagctcatcgcctccgccatgaacaccgtcggcttcacctggcaggccagccccgcctccaccgagatggaggtgctcgcgctcgactggctcgcgcagctcctgcgcctgccgcccaccttcatgaaccgcaccgccgctgcagggcgcgggaccggcggtggcgtcatcctcggcaccaccagcgaggccatgctcgtcacgcttgtctccgcgcgcgacgccgccctgcggagggcaggctccgtcggggtcgctgggatcaccaggctcgccgtctacgccgccgaccagacgcactccaccttcttcaaggcgtgccgcctcgccggcttcgacccggccaacatccgctccatccccaccggcccggagacggactacgccctcgacccggcgaggctgctcgaggtcatgcaggccgacgtggacgccggcctcgtgcccacctacgtgtgcgccacggtcggcaccacgtcgtccaacgcggtcgacccggtcggagccattgccgatgtcgccgccgtgttcaacgcctgggtccacatcgacgccgcctacgccggcagcgcgtgcatctgcccggattccggcaccacctggacggcgtggagcgcgtggactccatcagcatgagcccgcacaagtggctcatgacgngcct

SEQ ID NO: 99483 - DNA, 315 bp, Zea mays
  Clone ID: MRT4577_2223C.1
ggccgcccttttttttttttttttttttctctttttcaaatatgacaaaacgagccaggatgcaatcaatgacttcagaataagcccaattcatgaattagatacccgtgtctaatactgatacttgaaactgaattagtctacaacaaattttcaaatgatccatttacagctgatatctagtgtacattcgatatttaacacctagtgcgagaagcatgggatgctcatcatggtggctggcgacagcatcattctgacacccccgctgatcatgacttccaatgaagtccaagaaatcataaacaaattctg

SEQ ID NO: 99484 - DNA, 1757 bp, Zea mays
  unsure (1)..(1757): unsure at all n locations
  Clone ID: MRT4577_22240C.1
tttttttttcttttttttttttccataaagagtatttactttgtctagaggacgaatcatgctacttacatataaaaataagggcaaacaattttatacaggccatatacagtgaaagtaaaaaaaaaatgggacctcaaattctcttagacataacacctagagtaagaagcatcaacaagaaagagaataagaaatatcctcatcctcaatgtaacgaatcttcttctttttccacaaaattgttgaaataatggatgttataaagcggctgaaaggatcctgcaagccttccatttcataatgaccaaatcgccaatcccgcaatatgaatgatctctggataggccgatccagaccccctgcatacatccggccatgtttatctactgccctaaaaaacgggcgtgttttcttctgaaacgctgcctgttgcagctccctccaagctgccaacctgtcatgtcttgtgattttcccagttgtaacaatcttagagaacaaatagtatgatggcctaggtttccgtgctaggttgttagcacgatcaacagccacaagcccaaacttaggaccatatccatctgcccattcccaattatctgacgttgtccagaatagataaccaagcccaggcacacccattttttnnnnnnnnnnnnnnnnnnnnnnnnnnttgcaacatatattgcttacaggatttcataaaaatatgtttaccatttcagaccatgctcacagaccctccccgtgtttggcagaaatacttctaacctttgctatgtttctcatctcaccaaaatgtgtcaaactaactgaaacaatatcatggacgaaccccctcctccgtcgctggtctcgtcgttgcccgcgaccctttggcctgggcctgtgccctccccctgcccggcgtagtcggtgcccgctttatcccatgggccacataggcgttcgatgtaagggaaaagggtcaatgaattagccagtgtgacagcggcaacatcaaacagaccatagggtcgtgtaaatgatacatgatgagcgacaccaacgaccggcttccttttactttcgccttttgaatgtatgtaatcgtaggcttccgcatgtgcaaaagacaaccaatgcaatgcttggttgtatacaccagtcggcaaagcagttgtttggcagaaatacttctaacctttgctatgtttctcatctcaccaaaatgtgtcaaactaactgaaacaatatcatggacgaagggcctcgtccgttgtttgtctggatgaagcaagcaactctttgaactgtgctaatgccttctctgttatttgcttaaacggtatgcgctttatcacatgggctccaaagaagtataacagggcatctgttgcagtttccgtgttgatgcctctagcctggaagtagaagagctcgtttggatcaagctcaccactgatggcggcaccatgagtacacttcacatcatcagcaataatctgaaggttcggcttgacattaacaagtgcctttggtgataggataaggcacttggtttcttgccccgcatcagtttgctgtgcatacctgttgactttaagattgccatcaaaaatgcaagcaattgcagcttcagatatagctgngngtcatgactcatgagtaaaacatagattttggacatcctaggaattatataactgcatctatgtatcaccgatatgcgatacggtgacacactgatacagtacggatgtgatacacgtttg

SEQ ID NO: 99485 - DNA, 582 bp, Zea mays
  Clone ID: MRT4577_22241C.1
atttatggcctttgcaaacaaactgcatttgcaagatatagggtattgcttacagcatttcaaaatatgattacagatcctccccttgtttggcagaaatacttctaacctttgctatgtttctcatctcaccaaaatgtgtcaaactaactgaaacaaatatcacgaacgaagggcctcgtccgttgtttgtctggatgaagcaagcaactctttgaactgtgctaatgccttctctgttatttgcttaaacggtatgcgctttatcacatgggctccaaagaagtataacagggcatctgttgcagtttccgtgttgatgcctctagcctggaagtagaagagctcgtttggatcaagctcaccactgatggcggcaccatgagtacacttcacatcatcagcaataatctgaaggttcggcttgacattaacaagtgcctttggtgataggataaggcacttggtttcttgccccgcatcagtttgctgtgcatacctgtgaatcaagactaccacatcattaggacacaaatatagaattgcagcttcagatatagctgtgtgtcatgactcatgagt

SEQ ID NO: 99486 - DNA, 764 bp, Zea mays
  Clone ID: MRT4577_22242C.1
ccgccggccgggccgggagtacaatcaaacaaactcccgtcgtggcgtctcaccgtttccaggatacgaacatgaggtcggccaccctgcttacgatctgcaccttgtccgcgctgctgctggtggcgcgcggctcggagaagccatcggccgcgccgccgccggtggtggccgtgggcgtggcggcagccagcgacctcatccgctccggcggtcaccgctacctggacgtcagaacagaggaggaattcaggagtgggcatgtggaggattcactcaacgtgccctatcttttcttcacttcacaaggaagggagaagaaccccaagttcatcgcacaggtcgcagcgggtttcgacaaagaggacaacatagttgtgggctgcaaaagcggagtgaggtctgaattagcatgtgctgatctcatggcagctggatttagaaatgtgaagaacatcgaaggtggttataccgcatgggtggaaagtggccttgccgtgaagaaatctcaagcacaagatgaactatgatgtgccctatcatgttggttcttccttgctttgacgacaaccttcgtatagaaaataataggtttaaatgagcaaaaatatacttccttggttatttaaatatatgacacagttgattttcgaaccgctcgtcttgtttaaaaaatcgtcagttttcatttatttttgttgtaatttctttatcactcaaggtcgtttaagtagagatcaaaaaaaaaaaaaaaaaagggtgac

SEQ ID NO: 99487 - DNA, 253 bp, Zea mays
  Clone ID: MRT4577_22243C.1
ccgcatggcgtctgtgtcgctaagcgaggatgtgaacgtctacatcgtgcatggcgtgcaggcagaccttcgggtggatggccgtggctgtgcggactaccgatgcgttgaagtagcgactgccgtggcgtctaacaccagtgggtctgccagagtcgagctgggtcatacagtcatcttggtgggagtgacagcagagatggggacaccgcagctgcagagacgacgcgcaggctacctctagtcctctgtg

SEQ ID NO: 99488 - DNA, 538 bp, Zea mays
  Clone ID: MRT4577_22244C.1
gtcatcatccagcaggtgaccgctagctctgtacctgtacgacgtgtgaaacgagtagtagttaagcatgacggagaggcgcgccggcatggcggtggcggtggcggtggcgctcctgctgctgtcgtcgttcggcgtggcgtcggcggcggggaggggacgacccaccaagaagacgctgaagccaggggagaagccctcgcccaaatccaagttcttcccgctcagccgcaccaagtttgggcacaagcgaaactacgaggcctcctgcgccgacgagggcgggccggcctgctacgtcggatgccccgctgaatgccccaactcctgcctcgtcttctgcgaatactgcctcagcttctgccaatgtgacatcttccccggcacctcctgcggcgacccgcgcttcaccggcggcgacggctacaccttctacttccacggaagcaaggaccaggacttttgcatcgtcttcgacgcgggccttcacatcaacgcccactttatcggcaaccacaacccggcccttaaccgcgac

SEQ ID NO: 99489 - DNA, 551 bp, Zea mays
  Clone ID: MRT4577_22245C.1
ctcaccgagcgccgtacacggcagcaccctcgtggtggccgggcgcatcaggatctaccaccagacgagggagctcgcggaggccgggggcacacaggggactccgggacgcctccgggtacgtgctcgcggaccacggccaacgtgtggccggtaggtgcacatggagctggagctcgacgtgcacgcgtacgtgccactgcccgaccaggaccacgacgacaacgacgttcttgttcttggcagtagggatgcactagtaagatagacatggcctgtatctgtccctgtctaccaccgatcccatcaatgatataaataaacaaatctaaaaggagctagaattttagctcacactatatattctcaatgcatgaaaaatatattaattacacgtgtgaacaatctatatgtactaattatttatggccggttaaggcggcgccctcgattttaacggtgctcagatctacatgcattgacaaccgagtgcagagctcaaattgaagctcattttatatttatttaatcataaatggaatcggaggctc

SEQ ID NO: 99490 - DNA, 673 bp, Zea mays
  Clone ID: MRT4577_22246C.1
aattgaaaagcgaacgcgccgtggtgaaatggtgttagcaaatggaatgttaaatacatttatctatgatcattcacaagtgtatgttttgaacatttccacctgtcacgttttgaacattttcctcctaagagacgttggcacccaacgacactcagagacaacaaatcatcccctgtattcacacgcaaacgagggcattcaggcaacatgttccatgagtttttcaacccaacatgtcatcggtgttcccctggtttagaggatctgccactcttctcctgcctcgccagaggcgtcaaggtcgtagtcctcgttggccatgctactgccagaacaacagcacagcccatcatcctgtttatacatttgcttcgatggctggactgactgcatgacagtaaagagtggcgctccattggctttctctgccaactcagatgcccgagaacagaaatcatcgaaatcgtctttgtcgcgacagtaaaaaccaatggctagggatgggtctatttgttctagagccaaatctcggacaacactgcagtggtacgaggaagtgtccgcctccaagttatccggtgcaatatcaaccgggctctgaacgtcatggggatctaggtagagagccctatcttcttgtaccccagcaatgtatgttgacgtcccaggt

SEQ ID NO: 99491 - DNA, 414 bp, Zea mays
  Clone ID: MRT4577_22247C.1
cggacgcgtgggcggacgcgtgggctcagactcggcgtgcaagaaactagagagagtctgctgcgagaacttagagtgagtgctgaaggcagtgacctaagacattttatacatggtgccgatttttactgcatttttttctacattctttttttgtgatttgattatctaaacatgtgaattttcaggtcttcatattcttctatctcctagttttttaatattttttctttgcttataattgactgattataaatgtttttattctcttctttgattatttcctaattatattctctcgatctgttcaacttttaaactacgggctttttctttgtcttccctgtaactataatataataatgtatattatatacaagacgattcaacccttgcggtgttggtcatgttcct

SEQ ID NO: 99492 - DNA, 2125 bp, Zea mays
  unsure (1)..(2125): unsure at all n locations
  Clone ID: MRT4577_22248C.1
cattgcattgctcgactcgggcctgggaggggccgggaatctcgcttgcgtttctggggtggtgtctctgactctctggctccgtccccggcaccggcgggcggtggcgtgatggcggactgggaggggatcccgccgcgggagcggcggcagatggaggagatcctgcagctcgacatggaggagctcaacgtggaggtcgtcgacgacaacgaagaagacgaggaggaagaggagggtgacggcaacgaggaggactacgacgtcgatgccttcctcagagataacaatggagatggagtggctagcacctctggaccattcacattcaataggtctctagcttcactgcacacataccttggcgaggttgatgatactcggggtagagttactcttttagatggtggcacaatcctcaacttgccaatgttttatcttcaaggcgttgttctatttcctggagctaccctgcctctcagagtaattcaggatagattagtagtaactattgacaaagctttgagactggtcgatgctccatgcacaattggggtggttctcatgcgacgactcccaaatcatcgacattatgctactgcttcagttggaacaaccgcagagatacgtcaatttggaaggttggaagatggttcattaaatgttgttgcccgtgggcagcaaagatttcgtttaaggaggcattggattgatgttgatcgggtggtgtggggtgaggtacaaattattgaagaagatactcccttgagaactcctagagatgcatttgctcaggtagctgcatgcaataccttcaatttgcatgcttcgtcatcagtcatcagtttggataggtctcctatgaaacaagatcatatagattcagaactagagtgcaacactccatcaccaaacagtaaaataagcaacccttcatcaatggattcaaggttgtgccatctangttcacagtcaagtgactcgatgaaatcatcctcagatgaagacggggatttgatgcccaaacagttttggaagcggaaacaacattctgtgagggaaagtggtgcatcaagtcattccgacaagaagaccaacatgagaaatgataacaatctttgcttgacgcctctccagtcatcgccaatagcaaaaacaagagatgctaagcggcggcgacagtaccatgcttactcaaagcaggcttctcatgcaccattatcattttggcctcggtgggtatatgaaatgtatgattcatatacacttgctcgcagtgctgcagagttatggagacagataattgcaaacccaagcatggacgatcatgtaagaaagccagatattttgtcatttcacatcggaagcaaacttccagtctcagaatctgtgagacaaaaacttctggagattgatggagtttcatatcgcctacagaaagaaattcagcttctcaaggccttcaatcatattaaatgtagaaattgccagtctcatatagcaaaacgtagtgacatggtggtgatgtctaccgacgggcctcttggtgcctatgtcaaccctcacggttgtgtccacgagacgattacagtcagcaatgcaactgggctagcactcattggcaatccttcgaaagtccacagctggtttcctgggtactcgtggacgattgcagcatgcatggcctgcgagtcccacataggctggctattcagagccaccaagaagaatctgcggcctaggtctttctgggggatccgcagctcacaaatcgcagacgacacacaagtagatcagggtgactgatgctccaaacttccatgcgtataaggccatagtagcagtggactactaagccatgtatgacctggtgttcccaatcctccagtcgtctctggttcatacgcactgcctgccttttttgtgttggcatagtagggacggtggagttccctgtaaaacaatcactctttttctactgttgtagtagtgctctgcactgaagggatttactgaatctctctttttttggtctaaataagatatctgttttcaatagtatatgcatgattttcatttacagatgttccatggtgtggcatgggtgaagaaaactgttctatgt

SEQ ID NO: 99493 - DNA, 2628 bp, Zea mays
  Clone ID: MRT4577_22249C.1
cggacgcgtgggcacgtgggcctgacgctagaggggaaaagagcttgaccgcgtcgagaagtgtcttaatggacaagtgggccgcgggcccgcggccaccatacaacccagcagaaaggcgaggagacgaaccgaagattggccaaatctcgcttgcgtttctggggtggtgtctctgactctctggctccgtccccggcaccggcgggcggtggcgtgatggcggactgggaggggatcccgccgcgggagcggcggcagatggaggagatcctgcagctcgacatggaggagctcaacgtggaggtcgtcgacgacaacgaagaagacgaggaggaagaggagggtgacggcaacgaggaggactacgacgtcgatgccttcctcagagataacaatggagatggagtggctagcacctctggaccattcacattcaataggtctctagcttcactgcacacataccttggcggtaaatgtcaacctaatcttaacatgtttatcatgccgattgcaaactgtgaagctcttttttttatatcactcagaggttgacgatactcggggtagagttactcttttagatggtggcacaatcctcaacttgccaatgttttatcttcaaggcgttgttctatttcctggagctaccctgcctctcagagtaattcaggatagattagtagtaactattgacaaagctttgagactggtcgatgctccatgcacaattggggtggttctcatgcgacgactcccaaatcatcgacattatgctactgcttcagttggaacaaccgcagagatacgtcaatttggaaggttggaagatggttcattaaatgttgttgcccgtgggcagcaaagatttcgtttaaggaggcattggattgatgttgatcgggtggtaagtccaaacatgttatcattcttttgaaatatgaacattttaaagaatatagctagcttcatttactcttctcaataggtgtggggtgaggtacaaattattgaagaagatactcccttgagaactcctagagatgcatttgctcaggtagctgcatgcaataccttcaatttgcatgcttcgtcatcagtcatcagtttggataggtctcctatgaaacaagatcatatagattcagaactagagtgcaacactccatcaccaaacagtaaaataagcaacccttcatcaatggattcaaggttgtgccatctaggttcacagtcaagtgactcgatgaaatcatcctcagatgaagacggggatttgatgcccaaacagttttggaagcggaaacaacattctgttagggaaagtggtgcatcaagtcattccgacaagaagaccaacatgagaaatgataacaatctttgcttgacgcctctccagtcatcgccaatagcaaaaacaagagatgctaagcggcggcgacagtaccatgcttactcaaagcaggcttctcatgcaccattatcattttggcctcggtgggtatatgaaatgtatgattcatatacacttgctcgcagtgctgcaggtatagaaatccaatctcatcaacctatgttttatatctgcagttttgtaaaactcttttcctgttactctaagataagtgcaagctgcctgaggtctcattggaatatttggtcaattgtttgaattacaccggtgccttggttgcagagttatggagacagataattgcaaacccaagcatggacgatcatgtaagaaagccagatattttgtcatttcacatcggaagcaaacttccagtctcagaatctgtgagacaaaaacttctggagattgatggagtttcatatcgcctacagaaagaaattcagcttctcaaggccttcaatcatattaaatgtagaaattgccagtctcatatagcaaaacgtagtgacatggtggtgatgtctaccgacgggcctcttggtgcctatgtcaaccctcacggttgtgtccacgagacgattacagtcagcaatgcaactgggctagcactcattggcaatccttcgaaagtccacagctggtttcctgggtacgatcttgcctgtcgtttgctgttcgtttttgtgcctggctttttttctacaacacaacttaaactacgaaattaagtccgaagagtgctacttgcaactctagtaaatactcttttttttttgccgtgcaggtactcgtggacgattgcagcatgcatggcctgcgagtcccacataggctggctattcagagccaccaagaagaatctgcggcctaggtccttctgggggatccgcagctcacaaatcgcagacgacacacaagtagatcagggtgactgatgctccaaacttccatgcgtataaggccatagtagcagtggactactaagtcatatatgacctggtgttcccaatcctccagtcgtgtctggttcatacgcactgcctgccttttttgtgttggcatagtagggacggtggagttccctgtaaaacaatcactctttttctactgttgtagtagtgctctgcactgaagggatttactgaatctctctttttttggtctaaataagatatctgttttcaatagtatatgcatgattttcattt

SEQ ID NO: 99494 - DNA, 289 bp, Zea mays
  Clone ID: MRT4577_2224C.1
aaactgagtccctccattatgttgccagtcaacttttggacggtgtcgttccaagttgcacgccaatacgtacttagtaagcaggtgtacgtaccttcacgaacgtcttcgagtgttcacatgtagatgattctacttactgcatacacgtagaggttaacaatcgagaaacgaggcagtttatgcatccaggtttgtgcgcgaagagcccgtagtctgtgacgtatgatacgtgtaagagtcgtatcaatcccaagtgagtttatcgcgtcacaactcagttgcagct

SEQ ID NO: 99495 - DNA, 341 bp, Zea mays
  Clone ID: MRT4577_22250C.1
cttgctcagagaagatacatcgcagaatcaatggctgctgaatcggaagttatgagtattcgaaaggagtcttcaaaaaagtcgagttttactagtttcaatccctatttacgaaataaacgagttcgaacaacttgggacttggacagtcttcaagaggaattgaacaatgttgttcctaaaacaaaaactcgatcatcacgccgaaattatagacctacaccaaaagtattttccaacgccactttagacttgagactagaattagagaacatacgtcgcgaggaattagccaaatctgaaaggattcttgatatgttcaagcctaccaacagttcttc

SEQ ID NO: 99496 - DNA, 719 bp, Zea mays
  unsure (1)..(719): unsure at all n locations
  Clone ID: MRT4577_22251C.1
ccggccgggagcccgtgcctactgtcactggtacagcgaagatcccctctaaagcaatgaaaacgaaaataactagaaagaaatgcgattctttttgtacaaccttttggagttcgcagcttgggctcgtggggaacttgcaactggtattgtacatgaaaattgtaaattgggggtaaaaatctactacttcacaaatatatgacatcattaattatttttgaaaactttgaccacttgttttattcaaaatgtaaaattttaggtgtagtacaaactaccttaatcgataaaacaaaataaaaaaaaattaaatgataacttattattttttaattaagtggttaaagtttttttaaaaaattaacggtgtcgtatatttatgaacgcgagagtatttgtttttatatatactagtggcactgtagtttctagggaaagtccactctgtagtctatgaaatagagaggatttattttattttttaagaaatatgagttactctcatcagtagactagggtgtgctttggcattatatttctgtgatgtttacagcttggaagcggacaggccgttggatcatcttctagcaaggtgccaatgtgatgaggtctgtttaggggaggtgatggattacgatctanatgtttattcacgattcattttggtttttaattaattttgttcaaacaaaaaaaaaaaaaaaaagcggccctcn

SEQ ID NO: 99497 - DNA, 573 bp, Zea mays
  Clone ID: MRT4577_22252C.1
ctcgcctcgcttccctcccccgctccccaccgcagcgcggccaccgtctccgccagaaccctaggaaaaccacggagaagacgcggaggaagcagccggcctccctcgcccgggaagatgacggagaaccaccgcttctggggagtggtcgtcaaacctggagagacagtgaagtgtgacccaggagattcatattatcacatttcgacgatagcattggaggctggcaaggcagaagaggatgtgcaagttttcgttaaaattgacgatacaaggattatgcttggcacactttcagttgataatcatcctcatgtcttagctgatctggtgttcaaaaaggagtttgagctgttgcactcctcaatgaccagcaacatcagctttatgggctacaaatttgatattatgaaaagatctcactcatgtactaaacaagatgctgaatctgacgaggaggttccattggctattccactagacttcaatacagacggttacaaaaacaatgaagccgcacatggtgccaataatcttattgcaccaaggcctgctgatgctccatcctctata

SEQ ID NO: 99498 - DNA, 466 bp, Zea mays
  Clone ID: MRT4577_22253C.1
tttacgcatacgccggacacgtggtcaaagctgccgtggaccctgttgctgggacagtaatgctggtgtattacaacaaacttggtttacgtgctctcctgaaacctgattgggtccagaagaatggcccactgtttccaaaagcagcaaggcctccgccctagcagcgagacaaggttgatagctgtggccgcctgccggcaccaacaaagccactctccttcactccagaggactgtaatttgcattcaagcgtgatgccgatagtatgaccgtgaccgcataatatgggagcacgttgacaacacctttttttttttgtgttctacacaagaaaaaaagcatgctccacttaatgtgcatcacattagctttaggaggacatgtataagaatgggctgttgtatctttattttcccgcaaggaatggactgttataaattgaatgtccattccctcggaatga

SEQ ID NO: 99499 - DNA, 1623 bp, Zea mays
  Clone ID: MRT4577_22254C.1
atgatactgaggggcagggtctcgaatgctggtgctcccttagcttactctgcatggaacctgcctccaaataggctcttctctgaatttgtctctgaccctcctgctcgtgatggtagcccgggctatagagtgcgaccctcccccgaggatattgaatccttgattgccccacttctgagtcttcccgaggctgagaggcaaactcatttcgagatgtcatctagcagtgattatgctgagatggatgctatgcatagcctgctggccggggaatcgtctgactctacccgtaccgagccgatggccgttgcgactggacaagagtttggcaaggatgtggaaatccagaaacccaaaggtgcccgacagaagcattcatgccgagtgaaccacctagctacacctgtcgaggagaagaagaagaagagacttcagcgactgtcgtgcctggatcaagatgctggtccttctgtgttgttccttgatgatggcctggtggacaccattcccgaggtcaatgttgaaggttgtgatgatgctcaggctactggtggtgtgtttgacgaggaggaagaagaagaaattccgctgatccgcaagaacaaccgtcactatagaggcagcgacaggggcggcgatattccctcccaagccttgtcggcactcgtcagccttcaagggctttcaatatcatactttgatcaggcactagaagaggtcattcctgaagatattttatcagagcctcctgaggctgacattctgaccatctattcagaggtcccaaatggtggtctttcgctgcatgattctgctgggcaagaggtaacccgggtggtgtctcatgcatcgttgaccttagagggcagtcttacatgcaaaagcgctgatccaagccatccaactcctatggaggtggctgaggggccttcagacttaaaggtggctgctgcagaagacccagcccccgagggtggcgctggtagcgacccagcccccgagggtggcgctagtagcgacccagcccccgagggtgttggagcatgctccctctctactgcttccatggacgtccacattggatctcccccagtccggtccgaggaggctgaggtgatgcacgtttctacggctctcattggtcaaggcgctttagaggtcagcgagccagacgccaggagcctgccgcctgctggtggggctgaaatttccccgagtcgtgctcttgagattgttcatgctgatcttccctcatcgagccatgcaccgactcttcctgccttgggtcttcccctattcctttccagtcttcaatttttgtccaccaaggattccaccatcagggaactacgcgcctcgaagaagcttgtcgcgcaggagctagaggccgctcaaattgctattaagaccttgcagaataaatgtgtcgtcctgaaggctcagcgcgacagggctatggataaagtcgttcgcgctgggcggatcctgatgagaagacccggcgtcgtagtgtccgatgatattcttgttgatgttaaggccgcacctgatgccgcaagccgtccatcctcttctgttgcccgtgcgaaggatgttgtctccaaagatacttcgacgtag

SEQ ID NO: 99500 - DNA, 3176 bp, Zea mays
  Clone ID: MRT4577_22255C.1
ccggccgggcgctatacggctggctgcgcgtcattctcttcctcttccggtgctcgtgctcgtgctcgtgctctccgccctccccctccgccacttcgcgcggaacggaacccaggccgccgccgacccagccaccgctaggcgtctaggcgaccgcgcggcatggtggcgcttttacactacctatgctagtttgcctgatgctacatttccacgatggttaagctgactatgatagcgcgtgtcactgatggccttccattgtcggagggattagatgatagtcgggatctgaaagatgctgacttctacaagcagcaagcaaaactgttgttcaagaacttgtccagagggcagcatgaggcgtcaaggatgtcaattgagacaggaccataccttttccagtatcctaagacctttttctcatttgcaaaattctttgttccacaattaatcatttagaaatatatgtgattcttcatcatgatcctaaattagagtttttgtgaactggcaagtttaggcagcctaaccatataccgtaaacttgaccagtattgtgtatatattggattcaatattaagtagttcaagttcctttgacaagcaccagcttatgcatatcatatgattatcgtctgtctccattgatgtgtggattacaccaagtaagcgctatcactaatgacgtatggtatgaaaatgatcattttctgcactaaaatgcttctggtgctctagttgtaccttaattcaataaaacagctacatcatagaaggccgtgtttgctatttgactttgtgtgaccgttcttatcccaagaaacttgcattccagtatctcgaagatctcaaaaatgaatttgagaaagtcaatggcagccaaattgaaactgctgcaaggccatatgcatttattaaatttgatgcattcatacagaagaccaagaaactgtatttggataccagaacacagaggaaccttgctaagctgaacgatgagctctatgaggtgcaccagatcatgactcgcaatgttcaagaagttctcggtgttggtgaaaaactagaccgtgagtttgtcgctgtcatcttatctggcttatgtttccctcattatatatgtattttttttctggcatgatagatagaattgtccggtttcgattcgtagattggctatatggttcacattttagtttggttagaggagatgttgctacagagcattttggtgctggtcagttttctggtgtgttcttttgatatctctagttcttttttagatttcatcttagtaaggatgtattccctcttggaaccatacgcatgattggggtcccggaatgaataggcagatgccagtattgtttatgccaatgctgaggaaccgcttcgaaaacttcggcttagtaacacaataaaaccttagctctgtgatgggcaaggttttcaagtcgttaagtcgagtcgagtcgaaaaagtactgacttgctgactagtcggtaagcctgtcaactagtcgttggcttgccaatatagtggctgttttgcctatataatggcttcatatagacaatatagcatttatatatgaagaaagagcatgttttacctcatttgaagcctggaattgaacgaaactaaaataaacagcaagtcttacctcatttgaagcctcaaactgaactaaatcagccacaagtgataagtcataaactcataagtcataacagccatatagttcaaattggaaaacagatagcaagaaaatatagttcaaacttgaaaggaaataagctccattagatagctaagctgctgctacagctagatagatactaaatagtagataccctaaatatctcctaaatcaagatcatccattgctttttctcccaaatcaagaaaatatgttgtgtaatgggcctttgggctgtctgggctgaactggggcacaagtcggccgacttgcgagaccaagtcgacgactagtcgactgagaatttccagtcgttgacaagtcgcccgacttgccagaaaagtcgagccggctccccaagtcgagctcccaggaccgactgaacgactagtcgacgacttgaaaacaggggtgatgggtctacagcagagaaacaattggagatgctgaattatttttaaatatgtatggagaaagtttatgccttcatggtggagcgtatgctctaaacagattgttcttgtagtcatgggcttagtcgcttagagtggagggtaaactttaataaacctctacaagtttgtggtgaggtttatacttgaaaccattaataaaactagtggagccttttgaacaaggggaaacatgtgagatgttgtgctctgcctgtgtgctttcttttgcagttatctgcaatgactttttgtaacagtttccgcaatatgacttagatgtgttatcctgtgcatttttgtggaatatgtaatctcctttatatggaagtctgtttgaacgcattagacctcttgtattaaggatagatggttatgctttagttcaaactgaaatcttgtagagcaaatagaataaaatatgccaactcatgcagacaacaaccaaaaaaaggttaatgtccaggttatgattgtttcagtccgcctcacatgtacttttgatgacacaacagttgtttaacaaaaggtttctttttttgcagaggtgagtgagatgtcaagtaggttgacttcggatactagaatctatgcagagaaggcgaaagatctcaatcgccaggcattgattcgtaaatatgcccccgttgctattgtgattgggatagtagtgatgctcttctgggtgaagaacaagatatggtgactggtgccatcttgcgttcacagttatcatgctggaaccagctgagttgtcttgtcttccctcgtgcaaccatatgtttgatcgtggttccaaaaagaaaagaaagatggctcgatggtttatcccgcatctgccgattcaagcgactactttagctatcaaaagcaaaaccacggtagtagagatagccttggaactgcacatttctattaactggacatgtataatagttctcgtgagcgcacaccatgtaatcgtcgaaattcatccatgtgttgtgacattttttgagcacagttgaacatgtggtggagcc

SEQ ID NO: 99501 - DNA, 550 bp, Zea mays
  Clone ID: MRT4577_22256C.1
gactccttcgtaaacccttctaccgcattccgccggccgccccgggagccgcgagaggaggccagatgtagacgatcctggcgtgggcaaccatggacatcccgcagggcgtgacagtgacagtgtcgggcaagctgatgaccgcggagggaccctgaggcaagattacccggaacttaaagtaccttaacctctacttgcaggtggacgaaggctgacggaagctcaatggggacgcatgggtcggaacctggccgaccatggccgccatatgtaccgccatctgacacttacagaagctgataaagggggctaccaatggctaccgatgcaagatgaggtttgtttacgcccatttgcccatatacgcgtccataacacaactcctacacagacatagatatatggaacttactaggggagaagaggggcacaaaggtggacatgcttgaatgcttgaccatcctacggtccgagaagggcaaggactagcttattctcaatggcagcgacgttgtggtagtgtctcgctcagccgccctaattgacc

SEQ ID NO: 99502 - DNA, 749 bp, Zea mays
  unsure (1)..(749): unsure at all n locations
  Clone ID: MRT4577_22257C.1
cgggccgggctcatctctcgtcgatccatcgatggcgtccgagggcgacaacaagaggatgatcacgctcaggagctccgacttagaggagttcgaggtggaggaagcggtggccatggagtcgcagactctccgcctcatgatcgaggacgactgcgccgacaacggcatcccgctccccaacgtcaactccaggatcctctctaaggtcatcgagtactgcaacccgctgactccgctgcctcaagagctgggacgcgaagttcgtcaaggtggaccaggctacgctcttcgacctcatcctggctgccaactatctgaacatcaagggattgctggacctgacctgccagacggttgctgacatgatcaagggcaagactccggaggagatccgcaagacattcagcatcaagaacgacttcacccaagaggaggaggatgagatccgcatggagaaccagtgggccttcgagtgattgttgtcttcctttccctggtgatggtggtggttcttttacaagaacagatggatgtctgcactgcactctacaatactagtctatctacttacgaaatagtagtgaaatagtagtataatggtcgtgatggttgtatccttttttggattggatgtatgtcaagctggtgggtgctagttcgtctgtctggacttgntactaggtaatatctcataatacatatataaaaagtggatcctatgaaaaaaaaaaaaaaaaaaggcccct

SEQ ID NO: 99503 - DNA, 546 bp, Zea mays
  Clone ID: MRT4577_22258C.1
ctcagctatgtcgtactgaccatgtccattgctccgagggatagatttgaaccgcaggtgcagctcgccttggagcgtggactgcctgcaatgatcggagcgcttgttgcccacaggctaccgtatccatcgaggtccttcgacatggtgcactgtgcggactgccgtgtcccatggactgctcatgctgattccagatgggctctacatgctggaaatcgaccgtcttctccaacctggtggctattgggttttctctaagccacctgtcaactggaaatctacatacaacatttcgaatcaagggaccatagacaagcaggacaatcaagtagctatggatgacatgtcgaaaaggcttcgttggacgaaggtgtctgaagagggcacaatttctgtttggagaaagccttcttcttgtaatctccattgcgaccaagaagcaaatgcaaagcttgctggattgccaccactctgcacaggagaagacccagatagtgccttgtatgcgaatatttcaatgtgtatgacatgtaatccaagagc

SEQ ID NO: 99504 - DNA, 452 bp, Zea mays
  unsure (1)..(452): unsure at all n locations
  Clone ID: MRT4577_22259C.1
accggaacgccgagacgtgttcagggctgttgcttcctgcacgggcgtacgtgagcggacgacgcaccggcgctggcgcgttctgggtgtcctcctacttcaannccagatcatgcggggctgcgtcgggctcctttcaaccattctggcgcgcttcnngccgtctaccttccnnnccgtcgaggaatgtactcttcactgagggagacaaagtgtggctgctcgtgggacccaaccaagtgnngctcgccatccatgcccgttcaagcctcgtctgggcctgcttcatcagcgcgttcgcnctccgtcggcttcttgcggttggcggtgtttcgggtctggagaccgagctgattcaaacctctgcaaatgcaattgcgcggccactttttcggacatgcatgttctgtgcatatactgcgcttgtacatttagcgttatacctagtactg

SEQ ID NO: 99505 - DNA, 267 bp, Zea mays
  Clone ID: MRT4577_2225C.1
ttccggaccctactccatcttctcgtgttgttcggcgcacacggacacagcccgcgacctcgatacttcttcacgcgaatctcgacgatcccccccctccccccccttccttccttccttcaagaaatctgcaagacacgtcaatctgctttgtagacattcacagaggatgaggatctccattcataaggaatgcaggaattttaactgagcttgcagagcttgatggtttagctgtgcatggtggttatgacaaaggatcctccg

SEQ ID NO: 99506 - DNA, 274 bp, Zea mays
  Clone ID: MRT4577_22260C.1
ggaagacccggcccgacccacgcgtccgcaaaaaaaaaaaaaaaattaaacattaatatctataacaagcacaaaaaaaaaaagggaagggcaacttttaacgggagcctcaccagctccctgaaaccaaagctgcagcaggacgaaagggggggaacatcatatggcccccgctgctctgcacccccatgatgaacaaaaactcctcctaggttacacctgatgcgtgtgaatgcgcaaaaaaaaccaacaaatcactggggaaaaccatagt

SEQ ID NO: 99507 - DNA, 1444 bp, Zea mays
  unsure (1)..(1444): unsure at all n locations
  Clone ID: MRT4577_22261C.1
ctcattccatttacaaaccctaaccctagcagctcgtcccccatctcacccagcgcgcgcgcggccgccgtggcgggcgaccgaggatgccgtccgggtctacgcagttccggtacacacagacgccgtccaaggtgctgcacctacggaacatgccgtgggagagcactgaggaggagctcgtcgagctctgcaaaccattcggcagggttgtgaacaccatgtgcaacgtcggagccaaccgcaaccaggccttcgtggagttcgcagatcaaaaccaggcaatttcaatggtttcatattatgcttcatcttcagaacctgcccaagttcgtggtaaaactgtgtatatccagtattcaaataggcaagaaataacaaacaataaaggcactggtgattcttctggcaatgtcctgcttgtcacctttgaaggtgtccagcctaatgatgttagcatagatgttatccatttggtattttctgcttttgggtttgttcacaagatagcaacgttcgagaaagccgctggtttccaggcacttatccaatatactgatgctccaactgctctagaggcaaaaaattcgttagacggaagaagcataccgaggtatctactggctcaacacgtcagcatttgtcacctgcgcattacattttctgcgcacaaagatttgaatattaaatttcaatcacatcgcagcagggattacgcaaatccttatcttcctgttatccaactgcaatcgagggaatcgcacagcccatggttagcgctgatgggggcggacgcgtgggctgagagcatgtacttttagcatcaattgagaacatgcaatatgctgtgacagtggatgttctgcacaaggtgttttctgcttttggagctgttcaaaaaattgcaatgtttgagaagaatggtggaatgcaggctctaatccaatatccaggtatgtgctcaccaatgcacccaacaggatatgctcttgaccttggtgcactgtgatacatcgacaatttattgcattggcatgtcaccgtaacttgcctacacagttgagcacactttatgtcttgctcccactgtttgaaagtattgaagtctgtagttcttcttttaagacttggttcagaatgtaccatgtttatgctctatgttcttgatttatatcctccagctctcaccctcttcctcccatcctccctccctctcaccatttatgagtgaacctgccacactgttattctctccctttttgcatcataagtttctaagtttgggaacttcagcagagaggtgtcggagttcgtgaaggcttaaaatggacatctgcaactttccacagctataaagttgtttttagtaatactctctttcttactagaggcttgctntaaactttcattttgtcatcattgaacttcccttgtgacatgcgag

SEQ ID NO: 99508 - DNA, 304 bp, Zea mays
  Clone ID: MRT4577_22262C.1
tgggcggccgtggtcctccgggatccgtcacgctcgcttcggctcggctctcctcgggtgcctccctacggttacgttacgtagcctagtccattgcattggttgccaccgtaatccaggccctactgtactactacttctatctcgtagttgtaggtggtaatgcgctcaagattgcccgttgccacgcacgtccgtaatcaaggtttgcctcgaggttttttgtgtactggagcagtacgatccatacgaatttgggggcaaatttgaagctcgagcgagcctacagtttgttttttttttt

SEQ ID NO: 99509 - DNA, 800 bp, Zea mays
  Clone ID: MRT4577_22263C.1
gccggccggtgccgggcccaatatatcccccatctcttcgactcctttctggagcagctagggttccgtcctcgatccgatccgccgagtgcacaccacctttccccactccgatcgaatcgatggccgccgagggcgagaagaagatgataaccctcaaaagctccgatggcgaggagttcgaggtggaagaggcggtggcgatggagtcgcagaccatccgccacatgatcgaggatgactgcgccgacaacggcatccctcttcctaacgtcaactccaagatcctatccaaggctgcaaactatctgaacatcaagggtctgctcgacctgacctgtcagactgttgctgacatgatcaagggcaagacaccagaagagattcgcaagaccttcaacatcaagaatgacttcacccctgaggaggaagaggagatccgcagggagaaccagtgggccttcgagtaaggaggtgctggatctattgatgcctaagtttcgtggtgtctactactatgtctactttatgttgtcctaatggttgtaagtattttgggagtcactttgcttgcgaatgtctcgcgtaagacttatgtggtcaatggtcggttattaacttattaccatgaaagcacttcgtctgctgccctaagaggtttagtcccatttgcattataaccaattcaatccttgtggatgatttgtgtgattccatcgtgaatctcatggtaaaatattttcattgttgtggtaaaaaaaaaaaaaaaaaaggcctacccctagggcgcgggcgctcta

SEQ ID NO: 99510 - DNA, 669 bp, Zea mays
  Clone ID: MRT4577_22264C.1
ccaagatcctatccaaggtaatcgagtactgcaacaagcacgtacatgccgccgccgccgccgccgccgcctcgaaggccggttccgacgacgtgggtgccgcctccgccaacagcaccgccgcctccggtgaggacctcaagaactgggatgcggacttcgtcaaggtcgaccaggccacgcttttcgacctcatcttggctgttgctgacatgatcaagggcaagacaccagaagagattcgcaagaccttcaacatcaagaatgacttcacccctgaggaggaagaggagatccgcagggagaaccagtgggccttcgagtaaggaggtgctggatctattgatgcctaagtttcgtggtgtctactactatgtctactttatgttgtcctaatggttgtaagtattttgggagtcactttgcttgcgaatgtctcgcgtaagacttatgtggtcaatggtcggttattaacttattaccatgaaagcacttcgtctgctgccctaagaggtttagtcccatttgcattataaccaattcaatccttgtggatgatttgtgtgattccatcgtgaatctcatggtaaaatattttcattgttgtgatactgcctattcgcagttcagttgtatttttttaagaaaaaaaaaaaaaaaaaagcggcc

SEQ ID NO: 99511 - DNA, 303 bp, Zea mays
  Clone ID: MRT4577_22266C.1
aaaagacaaattagggtggctttatatcaacttcgaatgcttcgtttgttccatggggaaacccatgccctttgacaattggcctcaaacaatgtaaaacctaggcggcccataatgatacccagcttattgggggtccccgccccaaatatttcccccctcaggggatgcctcccaacaaaggttgggcctgggtttatttgcttgcgaccgataatttgaacaaatggattgctgaaggctcccgctttaaattggcaggaagacctggcccggacttctgctttttgatgctttccccaa

SEQ ID NO: 99512 - DNA, 563 bp, Zea mays
  Clone ID: MRT4577_22267C.1
cctcgaggccggcctggccgggatttcaccagagaataagacagcctgcctatctatctacacagagagacagagaaaagctagctacctagaataggatacgttagcaaaaacgctgaaagggaagagcatgaccctgctgcttctccagctgcggctacattccaacaaggaagaccaacctcctcctgcaggaggatacctccaccgtagcagacctggacatcatctggcagggaatttggtcatccatggacagacatcctctgagtagaaactctgagacttcctacacatgttatactcgcagccaagggttcgccaatgcattgatcaaatctgcatgatgtgatatctgtactaacgactatttgtaatttgatgatgtgacaaacacaggtatcgaacactgcacgctcaacttattgcatgtgcatggagatctagtaagtaacagcataacaaatagggatatgtaggatgataaaaactaaagagctgatcctcactaaggtccacgaactacggctttttgtaccgttagtgagggtgaagatagccgc

SEQ ID NO: 99513 - DNA, 409 bp, Zea mays
  unsure (1)..(409): unsure at all n locations
  Clone ID: MRT4577_22269C.1
gaaatatagatattccaacaatgtcttatttctaaaatttgtcaaaaaaattatagagcatcctatctagggctggacaaaatgcttgtggctcgctggctcgctcgtttcatggtcggctcggatcggctcgtttgaattttgtcacgagctgacatccttgctcggttcgttaacgagccagctcgtgagctaaacgaactacaatattccagtaaaacgaaactatgtacatattatttacagaataattgatgaacatgttatatatatgtgaggtgtctatgatctatgaattaaactaatgattaatgaactatgcctatgtgttaatttggtctttgcaaataaaggtatgggttagactgagtgacatatatgtgagttnggaattaatgagtgatgaatt

SEQ ID NO: 99514 - DNA, 469 bp, Zea mays
  Clone ID: MRT4577_2226C.1
gtgtgggtgtggggtttttttttttttttttttttttttttttttttttttttttttttttttttttttttttttttttttttttttttttttgggaaaccttgcatgcatgctgggccagggacattattaaaaaaaaaaaaaggttctgatgcaaactaggggggaaaaaaccggctaagctgataaaaaaattattcgctggcaaaaaaacacagggaagggaaaaaaccacttaacttgctacaggagctaaaaaaaaaaaaaacatgccccgaaaaaaagcactacttaaagctgccgccgccttgtttttggttgatcttctcgacaatctgatgagccgcacctgaaatctaatccactgaggggagggggaaataatcctccaccttgaggctaaacaagaaaagaaccatggggccggcgctgctaatgttgagggggagaacggggaggggggggccct

SEQ ID NO: 99515 - DNA, 176 bp, Zea mays
  Clone ID: MRT4577_22273C.1
accggcccggaaaagccgggacgacccacgcgaacggatggcccccggctagacagttttcaacacgaccacgcagaagccaacaaggccaggggggagggacccgaagcggacgaagggcacgcacgacaacagagcggagcgaaaacacaggaatgcacaggagaacaccggga

SEQ ID NO: 99516 - DNA, 481 bp, Zea mays
  Clone ID: MRT4577_22274C.1
ccgtgggcggcaaatctcagagcgaattgagggcatacgccgatgggggtgcttggtgcaggccatattgtcggacggccagagacaacttcagggactaatgcacgttaagcacacggcttcactaactgcgggggatcaaaaatagcgtgtgcctttagagcactaatactgcggggatggcaaaactgctgtggtaacgctcttttgtccagacatgagcaactagctttgcaattggcttggtcctggaacgaggatctacctggcctacggcctgaagtacctgtactgagagccgagagtcctcacacgacacaggtccctggtgattatgattacgacaatattcactgtgggcaaccaacaaggagacttggtaaaggaccagatgtacgaactgatccatgccatacgggccatgctctgtgccaatggcgctgttataccagaacactgcatcaagaatgcgcctaactgc

SEQ ID NO: 99517 - DNA, 557 bp, Zea mays
  unsure (1)..(557): unsure at all n locations
  Clone ID: MRT4577_22275C.1
cggggacgcggccgagctggggtcctggtcgctgtaccgcgccgtgatcgccgagttgatggcgacgctggtgttcctgtagcatgacggggggcaccgtgatcggggcaancaccatacggacgcgtgngggtgnggcgccgacccggggtgcgggggggtgggggggctgngcatcgcctgggccttcngggggatgagcttcgtgctcgtgtacggcgccgcggggatctcnggggggcacatcaaccccgcgcggaccttcgggctcttcctggggcgcgaggggtccctggggcgcgcgcggctctacatggtggggcanggccttggggcgatcggcggggtgngcctcntgaaggcgtgcgggggggcctacttcnacagggacggggggggggccaactcggtcggctncgggtactcccgcgggaccggcctcggcgccnagatcatcgggaccttcgtgctncggtacaccggggttctccggcaccgaccccaagggcaacgggcgggactcccacgggccgggtctggctcccctccccatcggg

SEQ ID NO: 99518 - DNA, 288 bp, Zea mays
  Clone ID: MRT4577_22276C.1
taccaatcggcctgagctatccaacacccgaggcttttaacgagtggacgaggtcacacgaatgcacgaccaacgtgtaaaattatggtgcgagaccggcaagccacgactaccgtgagagttacagccagcacacggcggacctgcggatgagtggagaggcctgcccacacctgtgtaccatggccactggggcgacgctgtcccaggatcagtccgaggccaaagaggccacaggcgcgccgttcgtcctaccactggagcccgactcgagaccctagggcgatg

SEQ ID NO: 99519 - DNA, 2642 bp, Zea mays
  Clone ID: MRT4577_22277C.1
ggggcagccttcaccttccacttcagcttcattccacttccacttggatcgatcgatcgcatatggcggtactgtggtggtggtcatcgtcctgcttgtcctcccgcgccgtcgctgctgcgctgctttgcctgctggtggctcacggcagcgatggaaccaggcacaacagcaacaatggcggtggtagtggtagttccagcagcagcaagagccacaagcaaggcggagggggacgagcccatgccgcgccgacgacaccgtctccgtctccgtatccgtctccggcggctggcaacaacagcagcagcgacgactccggcggcgggtggctgaacgcccgtgcgacatggtacggtgccccgaacggtgctggtccggacgacaacggcggcgcgtgcggcttcaagggcgtgaacatgccacctttctcggcgatgacgtcgtgcggcaacgagccaatcttcaaggacggcaaaggatgcgggtcctgctaccagatccggtgcaaggcccaccctgcgtgctccggcgtggcggagacggtgatcatcacggacatgaactactacccggtggccccctaccacttcgacctgagcggcactgccttcggagccatggcaaaagacgagcacaacgacgagctaaggcacgcaggaatcatcgacatccagttcaagagggttccctgccagtaccctgggtctgacggtgaccttccacatcgagcgcggctccaaccccaactaccctggcggtgctggtggagtacgagaacggcgacggcgacgtggtgcaggtggacctgatggagtccagccccgacgacggcgagcccaccggcgtctgggagcccatgcgcgagtcctggggctccatatggaggatggacacccgccggccgctgcaggggcccttctcgctgcgcgtcaccaacgagtccggcaagacgctggtggcggaccaggtcattccggcagactggcagcccgacaacgtctacagctccatcgtccagttcgagtagtagtatatgccatgcgtgcgtcgtacatatagatatatatacactacacacacaacgcagtgtcagcagtaagtatatgatgtgcatcatcattaattccatggacggatcggatcgatgatatatatgtacgtaaagatacgatagacaggcatcagacgacgtctctacctagctagctagctagctgctgaatacatacatatacttgtcgatcgagacgtcgcttgtgacgtccgtccagtgcattatgaatcatcttcgatcgatctgttgttggattatacatgcactggacggacgtcacaagcgacgtctcgatcgacaagtatatgtatgtattcagcagctatagctagctaggtagagacgtcgtcttatgcctgtctatctttacgtacatatatatcatcgatccgatccgtccatggaattaatgatgatgcatatacttgcttaaattactgctgacaccgcgttgtgtgtgtagtgtatatatatctatatgtacgacgcatggcatatactgctactcgaactggacgatggagctgtagacgttgtcgggctgccagtctgccggaatgacctggtccgccaccagcgtcttgccggactcgttggtgacgcgcagcgagaagggcccctgcagcggccggcgggtgtccatcctccatatggagccccaggactcgcgcatgggctcccagacgccggtgggctcgccgtcgtcggggctggactccatcaggtccacctgcaccacgtcgccgtcgccgttctcgtactccaccagcaccgccaggtagttggggttggagccacgctcgatgtggaaggtcaccgtcagaccagggtactggcagggaaccctcttgaactggatgtcgatgattcctgcgtgccttagctcgtcgttgtgctcgtcttttgccatggccccgaaggcagtgccgctcaggtcgaagtggtagggggccaccgggtagtagttcatgtccgtgatgatcaccgtctccgccacgccggagcacgcagggtgggccttgcaccggatctggtagcaggacccgcatcctttgccgtccttgaagattggctcgttgccgcacgacgtcatcgccgagaaaggtggcatgttcacgcccttgaagccgcacgcgccgccgttgtcgtccggaccagcaccgttcggggcaccgtaccatgtcgcacgggcgttcagccacccgtcgtcgctgctgctgttgttgccagccgccggagacggagacggatacggagacggtgtcgtcggcgcggcatgggctcgtccccctccgccttgcttgtggctcttgctgctgctggaactaccactaccaccgccattgttgctgttgtgcctggttccatcgctgccgtgagccaccagcaggcaaagcagcgcagcagcgacggcgcgggaggacaagcaggacgatgaccaccaccacagtaccgccatatgcgatcgatcgatccaagtggaagtggaatgaagctgaagtggaaggtgaaggctgcagggggagagactgacatgtatatatatatatatatatatacatgaaatgaaagctaaggcaaacgg

SEQ ID NO: 99520 - DNA, 490 bp, Zea mays
  Clone ID: MRT4577_22278C.1
gggaaaaaaaaacaatatttcgggttttttaaaaaccggccccaaaaaaaacgggggttaccccaaaggttcttttggaaaaaaaaaagaccaagtatagccttttccccaccacaaagacctagggggcaaaagttttttaaacagccccccttgggtttgggggactttttgggacaaaacccaaagaccccccccctaatttttttaaaggaaagggggcaggaccccaaacctttcgtttttggcccccctgggaacacccaaacttggggaaataaattgggcagacggccgtccgtatattcggggcaaaagggaaaaaaaaaatttttgggctaaagaacccagggtttgggttaaagggccccaatttttctgttggggtaaaaaaggggggtctaaaccccgggttttccccagaaaaaaagggtttcccggccctcgaaacgggggggcctttggggggccggtatacaagggggccccc

SEQ ID NO: 99521 - DNA, 329 bp, Zea mays
  unsure (1)..(329): unsure at all n locations
  Clone ID: MRT4577_22279C.1
cgcaggnaccggacccggaagcccggggcgacccacgcgnccggaagccaacannaaaaaaagagcagacacgcccggggcaaaacaccagcggcgggacccggcgnggaacacccccancaaccaggacnncaacaacaaccanagggggaaggcagaannggcaggcccctcggcgaaanacacccaggaacnggcgccgagcggagcnccgcaccacanacggggcaggaagaacaccaacccgaaccggcagggcggcaagaagaaggcccccaaggcgaaaacaaaccagggcggctaaaaaagcggccccccccaggcggggg

SEQ ID NO: 99522 - DNA, 472 bp, Zea mays
  unsure (1)..(472): unsure at all n locations
  Clone ID: MRT4577_2227C.1
gcgggggcagagggaaggcncngccgcngngcccagcgcgcgnggcgcggcaagcangccgccctgcncgcggggcggcncccaagacnnacancgnccaganggccgcancngagangccgagcncgnccgannnccaccacgaacggnacgcanccacggggggagccgngagcncngngcagcnggaaggagacgcggacgaccannacgccgcgaggancgncnacaacnacgagacggcgnnccacggcnncgcggcgaagccggacgaggacgaggccgagcgganggccgaggcggacggcgnggnggccgngcacccggagacggnccngcagccgcacaccaccaggagcccggacncccggggcancagcccggagancagcgacagcananggnccgacggcccggccgaccacgacgncgacggcggcgggcccgacaccggggaggcgaaccgagagcc

SEQ ID NO: 99523 - DNA, 150 bp, Zea mays
  Clone ID: MRT4577_22280C.1
cagattttactacaatcactacacatccaccaatgtatgtttccacatttctttttttgatctctcctcccctttcaataattatctctacataataccatatctcaacaacaatgaatagttcacatatttaacttttctattaacaca

SEQ ID NO: 99524 - DNA, 335 bp, Zea mays
  unsure (1)..(335): unsure at all n locations
  Clone ID: MRT4577_22281C.1
ccgggccgacccacgcgtacggttacggtcaggcgagttantcttttttttttctgtgccctgtatccatggctgcggccggctttttttttttgtgaggcatcaataacaaggggctcactaacttcattcgttacgttcgcgattaacgatactttatatgccttttgtacggtaaccttttgcaaacgaaaatttacaatatttgatcaacacttgaaggatttgacaagtttggaaacaaatactattaaaaacttcatgacacttattacttatggtatatgtggttataatatgcatagaaaggtttcttcaatgcattcccaagtgcc

SEQ ID NO: 99525 - DNA, 1252 bp, Zea mays
  unsure (1)..(1252): unsure at all n locations
  Clone ID: MRT4577_22282C.1
aagtgcggagaaacgaaacgtattgataagcctacacaggcagctgactgggggtttgccactaagataaactaaaactcgccgtattcctagaactcctcgaagtcctccatgctgccagcatcacctcctgagcactaagtacaatggggacaacctggggtgggggtggtgtgtaaagcaagggtgagtacacatcaacgtactcagcaaatgtcccgtttggctaaagtggactagctgtatgtggggttaaagttaagcagttgctttagttggtcaagtgtttattattatttgtagagccaagttttaggaataaacccagttattacccaaaagtactccctcaaaagaggaaatatcagagatcagacttataacaccattgttaaccatcatcataaaagtctccaaagttctntctaatcaaagaggatcccaggctgctcttaaccgtgagctcgaccgatataccagtttctaacactctgcagagtttgcacattttacccacgagtcgtgatccctttccagcctgggttgtacagatctgatcttcactaccaaggtgaatggccagggatacactacgtagcctttacaaagactcccctggtgcatagctgctcattaggttttgccagtcgtacaaacgtagtacacctccccaaggtgggtgactaacaaaaccaaatcgaatgaacctctgcaccccaaccttggcagagcgagcactacgcctcgacccccattgacggcccttccggcaaagcgaactacacccctaggttcatctaattaatcagctaagggcgtcccattccaccctcatggttgcactgttatctcaggtggtcactccacgaacaggtccttacggagaggtactcaggaaaaaggcctgagccccctaaagtatcacaagatcatcaacataatcaagataacagtatcatatcataaatgttcacatcatgttcattgattaaagtaaagcaatagcatgcagctaaccataataacccaaaaggtaatcaaggacaaggtaaatacaaagctagtcaatccttaggtttcaattaagtaatgcgggttgatgaattataaagtaaatgggacataataggtaagaggacacttgccttcaccaaacaaatgctaagggtctttaatcttttaaaaactaaaaaaccgggacaatttgtccgccgaagctggaccttcaattccttaaagttttaaaacaaac

SEQ ID NO: 99526 - DNA, 427 bp, Zea mays
  Clone ID: MRT4577_22283C.1
aaaaaaaaaccccccttgggatttattttataaagcgggttaagggggggggaaacccagctttatttacatagaccgggggcattttcgctccccttatgggaacaagaggtagcctttatttttcccaaagcacggggcccccggggggaaattcaccggtttggaaaggaaaaacctttgggggggattggttttgaccaaaaaaggggggggggcctggggggcccatttggtaagggtcaggggggacccttgaaccaatagggaggtggggccccaaaagggccaggggggaggaacagcccaccccccttggggttacttgggggggggcctgtaacaaaaaagcctgccccggtcacaagggggcccaccagcaaaagggcccccttgggggggggggaccaaccatccggggggggga

SEQ ID NO: 99527 - DNA, 502 bp, Zea mays
  unsure (1)..(502): unsure at all n locations
  Clone ID: MRT4577_22284C.1
acccacgcgccgatttggcaactgcnctacaacncacgngggcgcaccttcggaagacgggccggcagcagcgaagtgcgacggaaatcagggggatgaggcgcaaagcccgccgacgggagcggaaccgcccgcggcatcgctcccactacccccctccgctcggcagccggcagccataccggggagaaggaagccgcccgcaccgacccaacagcacccccaccattttgacaaaatattcggaaggagaacccacgggtggttatgagganagaaggtnctgatgagagacaataccacaagctcctaccatattaaatcatgcgaagtaagatggctggcaggtcgcgagcatgctaaggcgacccgtcagacagccagattgggcacagagctttgaggcgaggagagaaccaggagcccgaggaagcggaagcacggaggcaggagcgacagaaaatgagtgcggcgttcctgaaggactttaaaaacagactgc

SEQ ID NO: 99528 - DNA, 1363 bp, Zea mays
  Clone ID: MRT4577_22285C.1
ccgatgcaatcaatttcttctgagcttgaggtacttggcaggcatgatcacccacgtctaactgttccatttctgaagatgaggcacaatcattttatgagaaggtcagttctgagggtcaagaagtaaaaattatgattgagaagagaatggaatccagtgcaatatctgaaagaaagaatgttgatgctcgatcttactttatgaccttggaatactgggaagatttattttgtaagctaaatgagatgagaagatataggagaatagttgggtctcttgcgggctcttgtttatcagctgccatcccacttctctcttccaataaggaaacagcatgccttgtggcccttgacattgtggagagtgctgctatatctattgccaatgttgaggaggcttataagtgtgaatgtcaaagcaaaggagtcattgaggaggccatccagttttgttcatttgacgagcttcttgatggtacagatgccaccgaagatgttgatgaaaataggctactcccagcaatgaacaaactgtggccttacttggttatctgtctaaggaacaagatctcagtgccggttgttaggaagtgcaccgaaatgttgagtcgagcaatttgcatatctggcggcgatttttatgtacgcaggtttcataaggatggacctatttgttggaggttgctggctttatctccattccgacgtctgtcaaagatggatgaaaaagcaatctttttaccatatagggatacctcacttaactcagaggaacctatggctgagatctccagccaaaagattcagattgcagtcctggacatgatcgctgcaatatcttcgaacaagagaagtgttgttgcactagaaagcgtactaaaaaaggtctatggccttgtggtaggcattgcctacagtagtttgacagatgtgtactactccctaaaccaaagggaatctttacttcccgaccaagatctagccctggtatcagatcttttgccccctcaagtgtcttcgagagaatacctctttgtccagtatggagcaaacatcaggactcatgatgccaatgaaggatgtgatgagtttgtgtctattaaccatataaggttgcacgttaagcatgcccctgacttgccggacgagcagcaagactttgggatttagattggctaaggccctaagaataccctagcttttcaagaaaagagagacaacaactgaccctgtactatgtagtggtgaaatagctagattaagataataaaatttatatatagctaataaaatttatatatagctaggatcataaatggattacgaaacatttttatcataataatataatacccgtttat

SEQ ID NO: 99529 - DNA, 310 bp, Zea mays
  Clone ID: MRT4577_22286C.1
ggccgacccacgcgtgcagcgacgccacactcgcacatcttcttttcgttctccaccccccacccctcgcgtcgccggggtggccttcaaggccctttaccaacccccaaacgcggccccctttccatctttgaccccacttgacgccagccgttctctcgccacctcatttcccttcacctcgcactccgcccgcatcgcttgctttcaagcatatactcctgaccatgctcaagcttatttttccctacggcatgctaactcatatcctcacccagctcaatgtgcttcttgccggctcagtcccgaa

SEQ ID NO: 99530 - DNA, 589 bp, Zea mays
  unsure (1)..(589): unsure at all n locations
  Clone ID: MRT4577_22287C.1
atataaacatgtgttatattgttaagataaaaatgtttcgtaatccatttatgatcctagctatatataaattttattatcttaatctagctatttcacccctacatagtacagtgttagttgttgtctctcttttcttggagagagctattctattcttagtgccttagccaatctaggtcccaaagtcttgctgctcgtccggcaagtcaggggcatgcttaacgtgcaaccttatatggttaacagacacaaactcatcacatccttcattgtcatcatgagtcctgatgtttgctgattttcaggtcgcacaagatcacacaccctgcatccttctgaacacataataaacagatgaggggtctacatcacacctgacaccctcacctccatactgtacaaagaggtattctctcgaagacacttgagggggcaaaagatctgataccaggggctagatctttggtcgggaagtaaagattccctttggtttagtgagtagttcacatctgccaggagaagcctgacangatcagcctccatgcaggcaaggcctgccaatgcccttaattgtgctttctgcaaa

SEQ ID NO: 99531 - DNA, 767 bp, Zea mays
  Clone ID: MRT4577_22288C.1
tcttcctcctgcatggatgctgatcttgtctgggtgggccttgcggatgtgtactactgactaaaccaaagggaatctttacttcccaaccaagatctagccctggtatcagatcttttgccccctccagtgtcttcgagagaatacctctttgtacagtatggaggtgagggtgtcaggtgtgatgtagatccctcatctgttcattatgtgttcagaaggatgcagggtgtgtgatcttgtgtgacctgaaaatcaggttcctgatactgtgtatttgtaatcttgctgagtttctttggtcatgctagcaccctatgtcacacattgaacataatatcacctgctacagagaatggtaaactttttcatacgtgttctcgcactgaaaatcatcaagcaaacatcaggactcatgatgacaatgaaggatgtgatgggtttgtatctgttagccatataaggttgcacgttaagcatgcccctgacttgccggacgagcagcaagacttcgggacctagattggctaaggcactaagaatagaatagcttatctaccgatatgtaaagtcttatttccacctttcgaattcttttcctcggtagctaagcttatttagttgcctaatggtcgatgtaatctttttattgtgtgattcattccactttcatggtatttccgctcttgttacctccctctaccgcttcttcatctacatctaacctcatgcctggcgacctctaataagtaactgttgatccggcc

SEQ ID NO: 99532 - DNA, 637 bp, Zea mays
  Clone ID: MRT4577_22289C.1
gactagttctagcctctttgtacagtatggaggtgagggtgtcaggtgtgaggtagatccctcatctgttcattatgtgttcagaaggatgcagggtgtgtgatcttgtgtgacctgaaaatcaggttcctaatactgtgtatttgtaatcttgctgagtttttttggtcatgctagcaccctgtgtcacacattgaatataatatcacctgctacaaagaatggtaaactttttcatacgtgttctcgcactgaaaatcatcaaggttggtcacatgtctgaagaatgattatgacaagtctttaccactttgaccataattatattaagcaaacatcaggactcatgatgacaatgaaggatgtgatgagtttgtgtctgttaaccatataaggttgcacgttaagcatgcccctgacttgccggacgagcagcaagactttgggacctagattggctaaggcactaagaatagaatagcttttcaagaaaagagagacaacaactaacactgtactatgtaggggtgaaatagctagattaagataataaaatttatatatagctaggatcataaatggattacgaaacatttttatcttaacaatataacacatgtttatataaaaaaaaaaa

SEQ ID NO: 99533 - DNA, 433 bp, Zea mays
  Clone ID: MRT4577_2228C.1
gggacccccgagttggccgggcttgtacaccgtctgctagagaggaagagtgcgcggagagcgagagctctggtggagacagccgggcggtgggaaactggtgcagcggctcagctaccgtgagcgccacaagtactccacagaatacgatgtgaccctactgggcgacacccatggtgggaggctgcgtgaccaagtcaccaaggaacgcgcgagcggaccgaaatgcccggtcatcggcaagaagatccaaggaatttcacaacatgtgacctgctgagttcaaaacgtgcaatgtggtaatgaaccgtgcgactgagaaccgatctatggaggtgctctgtctggttccgcattgagagaaatgatcatccgaacctttttggttggggagcaaaggaacatggagagaggctgaagattcgaagaacca

SEQ ID NO: 99534 - DNA, 604 bp, Zea mays
  Clone ID: MRT4577_22290C.1
agacacttaagagctggagatctctctctcgtcacctcagctctcagagaggaaggacgctgcggtcggatgatggcgagcgtggaggggaagagggagacggtgctggtcaccggcgccagcggcttcatcgtatcgaccctcgtcgtgcctcctcctcgaccgcgactacaacggccacgacagcgtgctcaaccccgatgacaaggcgcatacggaggacctggtcggcctgggcgccggcgccgtggaaagacggctgcgcgtcttcacgggcgacctcctcgactgcgaggcggtcttgttcggcgagcggggctgctcggacgtgtataacctcacccacgccgtgcatggtctaccccgtgagggaccagcaggacgagaagaaggtgacggagaagtgagggacgctctgcaaggtgggcggcctgtacgaggaccgcaacggggtccgcgtggagaacatctcggaggggtccgacataaaaactttcgcggcgtgggcctccatcctcttcacgcactagcccggctgagtcctcaccgtactcttctacaggactcaggggtgccaccgtccgtccgacatggtgatcgagaa

SEQ ID NO: 99535 - DNA, 297 bp, Zea mays
  Clone ID: MRT4577_22291C.1
cttgaaagaaacataaacatgcccatttaggggtacgacacttggatcacagcgcaaaagaaaccctgtctacataaattttacagatccaggtaatcggcaatttatcaagggaaacatccttggtgagtggcatccacccaaggttcatatagatgggccaggactttatgatgaacctttcaatcaataataggggtatattgctctataagcatcgcactattacgtactggattattggcctgttttatcacagtcttgcatatgggcatatacatcatacaaaaaggagct

SEQ ID NO: 99536 - DNA, 428 bp, Zea mays
  Clone ID: MRT4577_22292C.1
agcagcggacatggaaataaataaagaccgcatgaactcaaaaataaaccaaaccgccaaaagggcatgggcgggtctccggctcctttttttttgaaacacacccaaacccaagggccacctgcgcggggaggggttttattcagtagtagtacccgtagcagtagtagacatgccaggcgggaccaacatgcgtagggggctagatatgggcatgacgggcccatccgcgggcccccacctacggggggataaatatgggtcgtttttaggggggcgccgtcgcccgtcgtcgccgtttaggggtcaattcaccctggagcagtcgggggaggggcttatggggtaagggaagctaaccccccacttgggggggatgctggcggggttccccgcgtttaagcccctgaccccggcggggggttttt

SEQ ID NO: 99537 - DNA, 1510 bp, Zea mays
  unsure (1)..(1510): unsure at all n locations
  Clone ID: MRT4577_22293C.1
gcgatgtgccttccttgtgtgtcggtcacggggctgggcaggcaggcgcaacgtagtggaatcattgttgtcctcaatgtaaagcacgatccagggtgcacaaggtcagccctcagggtcgggaagttaaagatattgttgataagtgaatggattcaattgcatttactgtatgaacaaatgatggtccacgatcctgttttacaactttgggaaaaagggtagatttatattgttagtcatattagatacgaggatacaggagattagttcgagttcttgcagcatgttaattaccaggtttgcactgttccttcactcttacttgaacactgtctacaaaacaagagagtatgagttcttaaggcttaccagcctgggtgtgatcgatgctcttgtgaagccagttgttaggaagtgcaccgaaatgttgagtcgagcaatttgcatatctggtggcgatttttatgtacgcaggtttcataaggatggacctattgtttggaggttgttggctttatctccattccgacgtctgtcaaagatggatgaaaaagcaatcattttaccatatagggatacctcacttaactcagaggaacctatggctgagatctccagccaaaagattcagattgcagtcctggacatgatcgctgcaatatcttcgaacaagagaagtgttgttgcactagaaagcgtactaaagaaggtctatggccttgtggtaggcattgcctacagtagtttgacaggtttgcaggaagctactataagggcattggcaggccttgcctgcatggatgctgatcttgtctggcttctccttgcagatgtgtactactcactaaaccaaagggaatctttacttcccgaccaagatctagccctggtatcagatcttttgccccctcaagtgtcttcgagagaatacctctttgtacagtatggaggtgagggtgtcaggtgtgatgtagatccctcatctgtttattatgtgttcagaaggatgcagggtgtgtgatcttgtgtgacctgaaaatcaagtagaatccacaactttccatctatattgacatgtttctctttcacattttcctgatactgtgtatntgtaatcctgctgagtttctttggtcatgctagcaccctatgtcacacattgaacataatatcacctgctacagagaatggtactttttcatttcttgaaaatcatcaagcaaacatcaggactcatgatgacaatgaaggatgtgatgggtttgtatctgttagccatataaggttgcacgttaagcatgcccctgacttgccggacgagcagcaagacttcgggacctagattggctaaggcactaagaatagaatagcttatctaccgatatgtaaagtcttatttccacctttcgaattcttttcctcggtagctaagcttatttagttgcctaatggtcgatgtaatctttttattgtgtgattcattccactttcatggtatttccgctct

SEQ ID NO: 99538 - DNA, 516 bp, Zea mays
  Clone ID: MRT4577_22294C.1
ctagatcttatgcttgatccggcgggcttgattatgtatagacgtacaaaacagagagacttatttaagaggctattgagaggttctaatacgtagatgatggagggggctaaaattcttgttttgataagatcctaattgacattaggcaggagatcatacggcactccaaattccattacgatatgcgtggcttttaaactagcgctttctgaaactaccgcgacccatctactatgtgcagctgggctatcattgtcacctcggctacttccataccacccaggcgctatatataacacaaatatgctctatgccgagcattaggcattataattattcaaacggatgctttacaaactgtatcgtatcatccatgagcctggtctggttatcaatggctctaactaagagctcctagtaatgcatgtctacaacactctggatgaccgctcgccttacccagtcaccttattgctcgtacacctagtgccgtgctaagcacaggcactgttc

SEQ ID NO: 99539 - DNA, 698 bp, Zea mays
  unsure (1)..(698): unsure at all n locations
  Clone ID: MRT4577_22295C.1
gagagaagttctgttgataattctcattatgcatccccttttccccctccacaagacagtgtatatgtatcctggttacaggggctcactccacccatcgcgcccagcacgcacacacacttcacacctattctaggtctggacacctctcacattctcccctccttaaaattcgacttgcccccaagtcgaagcagaaactgaacatatccaggatcctgatgccatgaatgaagcaacacgtattgcaaggccttgaactgaaaacattgactctcggctgagcatctcccaaaataaggaaacttcacacatctgctattgtggtcactttgcctgacaactgagcaatatccttgacttggaattagaggtggtgcaaaatttggccacggcctaggacgactcgtaccaatctccagcaaaatctccaatgacatgnggtggtgcccatggttgccaatcaacacacttgattgaatactcccacaaaatgaacccattaaaagacaacttgtccggatcggagtttagagcagtacctctattatgtcttggaaactttgcttccttgttatgtgaaagcttcatagtatctgggatcgttccatggacctttgttagacatcaggcatcctcccatagtataagtgcatggcccccccaaaattcaggaagttcagttgcattgattactt

SEQ ID NO: 99540 - DNA, 175 bp, Zea mays
  unsure (1)..(175): unsure at all n locations
  Clone ID: MRT4577_22296C.1
gaccctcgaggctggccgggttagagtccatatcacccctagttcagcccttggttggaggcaacttattcgtagcatagtagaattgacacctttgtgtattgttgctggagatggaactgaacctgaattttgtttttcacttggtgcttcatctgcttnntctgtaagtgtg

SEQ ID NO: 99541 - DNA, 371 bp, Zea mays
  unsure (1)..(371): unsure at all n locations
  Clone ID: MRT4577_22297C.1
gattgggtacctcgaggccggccgggnaactgtctctacctctgctaggggtacccgaagcctcgcgccgccaccggcgccgattagcattttcctacacccaatctgatctgaccaagccctctgaacaccaccgcccatcgtcctcctcctccgccggcgccgcccaaaatgcacgtcgacgcgtgtctctacccctacaaccgcaacgagtggggtgcagcagaaggtgtcgccgcgccgccttcgctcgaagatgactcctcatctgaccccttcggtcccttctcgcgctacgacaagatggaacacatcgccgactggatgcccaacccgtcggacccgaagatgttaccggcagttcacgacac

SEQ ID NO: 99542 - DNA, 722 bp, Zea mays
  unsure (1)..(722): unsure at all n locations
  Clone ID: MRT4577_22298C.1
tccttcctttccagtagctaagagtgacccttccgtcgcacgctccaccagggcgcgatggcgccgcagctgacgcccggcgcagtggtggcgctctccgagcatgacaagggcaacgggacactgcacccggtgctgcaggtggtggacgtgcgggtggtcaacagcctcagtaacccctccgccgagcgcttccggatggtgctctccgacgacgtccacaccacgcagcgcatgctcgccaccgtccataagaccacaacacgcacgtccgggacggctccatcgtccagctccaagagttcacctgcagcacaatccagcaccactgcaggttaataagttcgccactatggagtccagccaagttctattcttgtctctgttaaggttgttgtacttctctgcatgtgctttttccccctcctttggtcctacaatacaatgcacattgatgctacagtttctttttattctgtaatctgtatggacttcctatgctgttgttgatccttagtgcagtgaaacagtactggagttttgtgctagtacttaacaagccagaaagctccttttctggcattcatgtcaaatctgtaaaacggtcacataatattctgttgtgaccattcaaatgagtcttanaagtagttcttttaagatgtgctgagtctgaaccttgcatattcttgtgngcgttactaaagaatgcgcaattctag

SEQ ID NO: 99543 - DNA, 674 bp, Zea mays
  unsure (1)..(674): unsure at all n locations
  Clone ID: MRT4577_22299C.1
aagtaatctccagcttcgctgtcctatccttctctgttctccactttcccttccttcctttcccagtagctaagagtgacccttccgccgcacgctccaccagggcgcgatggcgccgcagctgacgcccggcgcagtggtggcgctctccgagcatgacaagggcaacgggacactgcacccggtgctgcaggtggtggacgtgcgggtggtcaacagcctcagtaacccctccgccgagcgcttccggatggtgctctccgacgacgtccacaccacgcagcgcatgctcgccaccgtccataagaccacaacacgcacgtccgggacggctccatcgtccagctccaagagttcacctgcagcacaatccagcaccactgcaggtgagtgtgggtacaaaatggtattggggcgatttggttggtacattccagtcccgacacagggaaggttgctgatggttttccactatctttatatcatcaacctcggactaggttaataagttcgccactatggagtccagccaagttctattcttgtctctgttaaggttgttgtacttctctgcatgtgctttttccccctcctttggtcctacaatacaatgcacattgatgctacagnttctttntattctgtaatctgtatggacttcctatgctgttgtc

SEQ ID NO: 99544 - DNA, 547 bp, Zea mays
  Clone ID: MRT4577_2229C.1
tccggatcgcttagcggcgcccttttttttttttttttttttttatggaaactcgaaaaaggattcggcgtcattgcttgcactacactcgctgtgcattagaactgttttatgaatattttacctctcgggggacatttgcattggcacatagaagagcctccactggtttgcaggtgaacgcagtggtggcagagaaatcttcatggcatggaggaggacttggccaggagaaaggggaggagaagaagaagaagaagaagaagctggtttggggacgaccagcaccgaatatcatggcgattgatgaccgcagaaaaagggaaactagacggatttccttggatctcgcacctcgccgatcggtttgctttgcttctggctcgaatgaagcacgattccaatcgtggcatgcaccgcgcacccgacctaatgtgtggcacctcatgtcttgttcccttgaaggagaggggagcgcggacaaccgcgttggatcatcgttagcatttattcttaatccctagatgaactttatgaattgtacaaa

SEQ ID NO: 99545 - DNA, 399 bp, Zea mays
  Clone ID: MRT4577_222C.1
ggaagcaacaacgtaaacagccataattattccaaaaaacccgggagcaatgcgggggaattaacggcggggggcaacatcaggggttgtaaaccacacaattctttataacagacacacataacacgatggcgggggcaactcacgggagatcacgggaaaagggcagcacactggcctgatgctgggtaataagaaaacttttttagtactcggaaccctgggggccatccccgcccttatggaactcagggccgaccccctcggagtccttttcgagcgccgccaggtcctcacgggcctaaaaaaactcacctttctccatacccttaccgacgtaccagggcaaaaaggcacccttggggtacatgaaggccaacttgggggcgatgcgggaaa

SEQ ID NO: 99546 - DNA, 374 bp, Zea mays
  Clone ID: MRT4577_22300C.1
agaagattgatttcctcttattcgcccttctgtctgcattatataatatttacaatggtataaaaaatcatatatgaagcaaaagggcgtcatcaaatttaagtgcagcttcatcttttggatttgactttgcagtttgtagggaactgcttcagcgtccttttttcatctgaacctgagggaagcaatttcccttcttttttcactttatattttatgaataatgatacgcatgatatgatgatgggatgatgatatgacatatgatgtttggtgcacaagatgatgatgataaaatgggaaagaaaacaggtgtatctttgtgcgcttttgtatcatgactctgcattcccttaggaatgactttggagtca

SEQ ID NO: 99547 - DNA, 297 bp, Zea mays
  Clone ID: MRT4577_22301C.1
tggacgcccgcgtgaccgacccggaacttactggctggacccacccacgcgtccacgcatacgtggacccccttcgcgaggggcttgccaactacgtgtgagcactgggccgcacaaattgtgccgcgttagagaaggcgacttatatggcctggagtgatgaatgacagaccttgactgcaacagcattatagtatactacaggctatgcactcggcactagcatgatgccagtgcgagaaactgctttgcaggtgagtgggtgacacataccattgtttgagtcagaaacacgtt

SEQ ID NO: 99548 - DNA, 265 bp, Zea mays
  Clone ID: MRT4577_22302C.1
tcagtaccgttctaatttgggggggggccccgttcccccactgctcacaatagtcacactcctcacccacacacctccctcctccaggggcactccaacacccgctctactgattattatcctcaagatctggttatgtcatatactcatcccgttaaaatcttataatcagcaagaaaatatgatctttcctctttagaaaattcaagttagagagaagtcccaccagactcccgttccacacaataatgctctgtaaatgcta

SEQ ID NO: 99549 - DNA, 226 bp, Zea mays
  Clone ID: MRT4577_22303C.1
ttttcaaacccattctaatccgacgctcttaacgaatgagcaccttctataatacacctcaacttctaccacaactattttaaaacttccaaaaaaccaatacctccttattacaataatcttcatcattcttaactcaatctttttcttcaatatacactaatactcaaccctaaactttttacaatccacccttcactaaacacaatctttaatacttcattta

SEQ ID NO: 99550 - DNA, 2094 bp, Zea mays
  Clone ID: MRT4577_22304C.1
tttcaccctaactccctctgtgtcctcgcggcacgagggccatcctccctctggagtaccgaccgactctccacctcaggaccgcaagctacttcctccgcctcgacaggcgtcggcgagatggtgaagagaagcaagaagagcaagagcaagcgcgtcacgctgcggcagaagcacaaggtgctgcgcaaggtgaaggagcaccaccgcaagaagcgcaaggaggccaagaaggagggcaaggccggccagcggaagaaggtcgagaaggaccccgggatccccaacgagtggcccttcaaggagcaggagctcaaggcgctcgaggcccgacgcgcgcaggcgctccaggagctcgagctcaagaaggaggcgcgcaaggagagggctcggaagaggaagctaggattgctcgaggatgaggaaattgctaatttggcatctgcagcttccgcgcagggcagtgagtttgcagcaaaggatgcagcaaaggataaagctcctttaacagtggcaaagagcaatgatcattctgagagatctttctacaaggagcttgttaaagtaatcgaagcttctgatgtgattcttgaggttcttgatgcaagagatccgctgggcacccgttgcattgacatggaaaagatggttaggaaggctgatccaagtaaacggattgtactacttctcaacaagatagatcttgttcctaaggaggcggtagagaagtggcttacatatctgagagaagaaatgccaacagttgcgtttaagtgtaatacccaagagcagcggaccaagctgggatggaaatcttcaaaactagataaaacaaacatcatcccacaaagtagtgattgccttggtgctgagaatctaattagattgctcaagaattattccagaagccacgagctcaaactggcaattacggtgggtattgttggactccctaatgttggcaagagcagtctgatcaacagcctgaagaggtcccgagtggttaatgtcggttccactccaggggttactagatcaatgcaagaagttcaattagacaagaaggtaaagttgttggattgtcctggtgttgttatgctcaaatcttccaacagcggtgtgtctgtagctcttcgaaactgcaaaagagttgagaaaatggaagatccagtcactcctgttaaggagatccttggtatttgcccacatgagaagttgctgtctatgtataaggttccaagcttcagttcagttgatgatttccttcagaaagtatcaactgtacgggggaaattgaaaaagggtggtgtggtggatgttgaagctgctgcgagaattgtgcttcatgactggaatgaaggtaaaataccatattttacactgccacctaaaagagatgctgtggaggactcagatgtagtgattatatcagaagatgggaaagaatttaatattgatgaaatttacaaagctgagtcttcatatattggtggtttgaagtccattgaggagttccatcatattgagattcctcctaatgctccaccggcaattgacaaagagatgctagaggatggcagcaaaccaagtgaacccgctcaggaaaaccgggaggagcaaatgtctgacgcgaacgacccacaaggaagcaagccagccaccgccagcacacagaacgacaagttgtacaccgccgagggcatactcgaccctcgcaagaggaaagcagagaagaaacggcgcaaggcgaacaggttcagtgtgctgaacgacatggacgcggactacgatttcaaggtggattaccagatggaggacgccgcggatggtgaagacgaagacgctggggatgaagccaaggaggataatgagccgatgactggcgtcgacgattcgtgaaattttggccccttcgtcgtgtatgagttgatggctaggcccagtgggggttgcaaaattaacccaccaaagttttgtgctcagtttgcttgtttaatgaaaagattatactatgagaaggcttgcgttttacctgttccgcataagttgcattcattgatcttgatgcgctatcggtcgcattcatgtcgcgtt

SEQ ID NO: 99551 - DNA, 3036 bp, Zea mays
  Clone ID: MRT4577_22305C.1
atcttttttttttttttttttttttttttttttttttggtttttttttttttcacctaaaacactgtttttgcattgttttttcaaaacgtaatgttggaggcgttacctaagggtgaaaatgtagttcctgagatttagattgtacaataaacacatcatggcagatttcaagcaataaacaaatgcacatcaaacgtgtcattattgtcactgcggctatatccaacgaatagggtcgagtacacaaactatgtacagttgttgcagagagagaacagcatcaactcttgttcttcagagattgtgtgtgcagtgatacagagggtggtgcaaaacttgtattgccaataaaccagtagagaacccacttcagattgcacagcatgtactttagagccttggtccagttttcattcttattgaaactaaggacgatcgtgtggctccctactttgtcaccatcaatcttgtagggaagcttcagtgatttttcagggggaacattgttctgcttatccaaacttatggcaaactcagcaaactcttgcaggcaagtaagaaaccatgtcatggctttgtcaaatcgggtgctccagaacaaattcacgggaccaaacagttcatatgtgttattctggatgtctgtgactcttggatagcttcccatagggtgaatcttgatccggtattggaattttggggtgaaatactgagccatggtatgcaacagcagtgcagcctgaccccatgcagcatttatctcatcccactcaacctctacattagaaagacgtcctaggcgaaagttatttattgttccgattactccatcatgtgatatatagaatgcatcattgagaacattagtacgctccaacagttccaaaaaaacctaactccctctctccttgaattcactgcggccgaagtcgctgccctgccgactcccgaccgactctccacctcagccctcagggccgccggctccttcctccggtcctcccctctcctccgcctcgacaagcgtcggcgagatggtgaagaggagcaagaagagcaagagcaagcgagtcacgctgcggcagaagcacaaggtgcagcgcaaggtgaaggagcaccaccgcaagaagcgcaaggaggccaagaaggcgggcaaggccggccagcggaggaaggtcgagaaggaccccgggatccccaacgagtggcccttcaaggagcaggagctcaaggcgctcgaggcccgacgcgcgcaggcgctccaggagctcgagctcaagaagcaggcgcgcaaggagagggctcagaagaggaaggcaggattgcttgaggacgaggacattgctagtttggcatctgcagcttccgcacagggcagtgagtttgcagcaaaggagaatgctcctttattagtggcaaagatcaacgatcattcagagaggtctttctacaaggagcttgttaaagtaattgaagcttccgatgtgattgtggaggttcttgatgcaagggatccgctgggcacccgttgcattgacatggaaaagatggttaggaaggctgatccaagtaaacggattgtactacttctcaacaagatagatcttgttcccaaggaggcggcagagaaatggcttacatatctaagagaagaattgccaacagttgcttttaagtgcaatacccaggagcagaggaccaagctgggatggaaatcttcaaaattagataaaacaagcaacatcccacaaagcagtgattgtcttggtgccgagaatctaatcaaattgcttaagaattattccagaagccatgagctgaaactggcaattacggtgggtattgttggacttcctaatgttggcaagagcagtctgatcaacagcctgaagaggtcccgagtggtcaatgtcggttctactccagggattactagatcaatgcaagaagttcaattagacaagaaggtaaagttgttggattgtcctggtgttgttatgctcaaatcttccaacagtggtgtgtctgtagcccttcgaaactgcaaaaaggttgagaaaatagaagatccagtcgctcctgttaaggagatcctaagtatttgcccacatgagaagttgctgtctctatacaaggttccaaactttggttcagttgatgatttccttcagaaagtagcaactgtacgtgggaaattgaaaaagggtggtgtagtggatgttgaagctgcagcgagaattgtgcttcatgactggaatgaaggtaaaataccatattttacactgccgcctaaaagagatgctggggaggactcagatgcagtgattatatccgaggatgggaaagaatttaatatcgatgatatttacaaagctgaatcttcatatattggtggtttgaagtccattgaggagttccatcatattgagattcctcctaatgctccaccggcgatcgatgaagagatgctagaggatggtggcaagaaaccaagcgaagccatccaggaaagccgggacagggaggagcaaatgcccgacgtgaaggactcaggaggaagcaaggcagccagcgccagcacgcagaacgacaagttgtacaccgccgagggcgtactcgaccctcgcaagagcaaagcagagaagaaacggcgcaaggcgagcaggcccagcgcgctgaacgacatggacgcggactacgatttcaaggtggattatcggatggaggacggtgggagcgagggtgcacacgcggatgatgaagatggcggagatggatccgaggataatgaaccaatgaccggtgtcgatgatgcatgaattgtcatgtcgagtgccactttgccagaaatgatttgtcccaatgggggttgggaaattaacccacgacagttttgtgcttagtttgtttcttcaatgaaagatgacagttgcgttttacctgtcacagtacctacttttcgttgcaatcttcagaacaacctgatggaagagtacagcccccaaaaaaaaaaaaaaaaaaaaaaacccaaacc

SEQ ID NO: 99552 - DNA, 758 bp, Zea mays
  Clone ID: MRT4577_22306C.1
agaatcccatgtgctctctgccccgctccgcctgatcccactcccaccgcctccccctgctcgtccgcgccccattcacccacatccgccaccgtcctccatgccctgccccccggtgtgcctgacgacccgatttcctcgccaacgaactcctcctcctcggttccccacttctcggatccccgtcgccccggccgagcagaaaccggagccccgccgcagatccgcagggaggaggagccggaggaggggggagaatggacgccccgtcggtggcgctctacaaccagctcaaggctgcccaaccattcttcttgttagctgggcccaatgtgatcgaatcagaggaacatgtcatgaagatggccaaacacatcaaagccatcacaaccaagcttggggtgcctcttgtgttcaaatcaagctttgataaagcaaaccgtacatcgtcgaaatccttccgcggtcctggtctggaacaaggcctaaagatccttgaaaaggtgaaggctgcatatgaccttccagtggtcaccgacgtgcatgaaagctgccagtgcgaagctgttggaagagttgctgatattatacagattccagctttcctctgtcgccagactgaccttctagtggctgcggctaagactggggaaattatcaatatcaagaaagggacattctgtgcccccgtctgttatggccaactctgcggagaaaattagacttgctggaaatcataatgtgatgggctgtgagcg

SEQ ID NO: 99553 - DNA, 129 bp, Zea mays
  Clone ID: MRT4577_22307C.1
gtgtaaacaaaacctaaatgtcatgggtgttgcatcatgctgaagcatatatctttgtctgatgtcgtggttagtcgcgggttcgtctcgtcccgttgcggatttcggttcccgatcggattccgattg

SEQ ID NO: 99554 - DNA, 823 bp, Zea mays
  unsure (1)..(823): unsure at all n locations
  Clone ID: MRT4577_22308C.1
ttaaatcacgacgcggtggtgactggtgagtccacactcctcactccattttctaccatcacactgacacgttcatagctagctagtcttcagctagtaacgtacgacggactaatctcgatctgggagcgaggaggaggacgacgacaatgaagatgagctccgtgcccgcggcagcggcggtgatggtggtgggtggtggtgcttctatctgcagcgactacgtgcagaactactacgtgaacccgatgctgagcgccgcctacacgcccgaccagttcgccgacgcgctcatgcagcccttcacctccttcgtcgagggcctgtacaacctgggcgcccgccggatcggcgtgacgtcgctgccgccgatggggtgtctcccggcgtccgtgaccctgttcggcggcgggagcgcgggctgcgtggagcgcctcaacaacgactccctcaccttcaaccggaagctcggcgtggccgcggacgccgtgaagcgcaggcaccccgacctcaagctcgtcgtcttcgacatctaccagccgctcctcgacctcgtccaaaaccccaccaacgccgggttcttcgagtcccggcgggcgtgctgcggcacgggcacgatcgagacgtcggtgctgtgccaccagggggcgccggggacgtgcaccaacgccacgggctacgtcttctgggacggcttccaccccacggacgccgncaacaaggtgctcgccgacgcgctcctcctgcaggggctacagctcatcgcgtgagccacagctacgcaacggcctcccgccgnccttatacgtaccttgctgcttct

SEQ ID NO: 99555 - DNA, 388 bp, Zea mays
  Clone ID: MRT4577_22309C.1
tttttttttttttttttttttttggtggtttttttatatattaggttttttttttttttttttttttttttttttttttttggaaatggtcaaagcttcccggcaaggttgctgaaagttgaaaccaaaaacaagatcaacaattttgagcaaattaaagggttagacccaccaaggttgcccaaaccgattattttttttaaactggggaccaggaccaagcaccttcttttaaggagggggggacttaacggggggggtggttcatttaaagaaccttactcccaaacaagggctttttattcttggggcccttgggaaactttcataggcccttctaatagaaaaaggggtaatacttttttaaatggagcataccctttttccc

SEQ ID NO: 99556 - DNA, 332 bp, Zea mays
  Clone ID: MRT4577_2230C.1
cctcgaggccggccgggccgggctccccaactcgccgtctgccttctgcgcctccatttcggcctctgtcccttgcaagttcaatctcacctccaaccatgggtaaagagaagtcccacatcaacattgtggctattggccacgttgactctggcaagacgaccaccacaggacacctgatctacaagcttgataggcattgacaagcgtagcgacctagaggcctgaaaatgaggctgctgaaatgatcaatggacccatcacatccccatgaccgctcgaccaacttatgaccgggcccgtgacacccctgccatgctcgcccctgcccc

SEQ ID NO: 99557 - DNA, 251 bp, Zea mays
  Clone ID: MRT4577_22310C.1
agagctctgacgaaaaaccgcccgcgtacgtattctcggaattcggctcgaggtacaacagctgttttttaattacgctccttacttctaacacctcggggcttctttaaaaagctcatcttctttataacaaatgtcaaatacaaaaaaaaaaaccggaaggagcattttttcaaaaccacactcacaaaaacatcacaaaccatctaaaaaacaaaaaaaaaaacaaacctaactgggtggccgcccac

SEQ ID NO: 99558 - DNA, 761 bp, Zea mays
  Clone ID: MRT4577_22311C.1
cacagtccacactccccactccattttctaccatcacactgacacgttcatagctagctagtcttcagctagtaacgtacgacggactaatctcgatctgggagcgaggaggaggacgacgataatgaagatgagctccgtgcccgcggcagcggcggtgtctcccggcgtccgtgaccctgttcggcggcgggaacgatgggtgcgtggagcgcctcaacaacgactcactcaccttcaaccggaagctcggcgtggccgcggacgccgtgaagcgcaggcaccccgacctcaagctcgtcgtcttcgacatctaccagccgctcctcgacctcgtccaaaaccccaccaacgccgggttcttcgagtcccggcgggcgtgctgcggcacgggcacgaccgagacgtcggtgctgtgccaccagggggcgccggggacgtgcaccaacgccacgggctacgtcttctgggacggcttccaccccacggacgccgccaacaaggtgctcgccgacgcgctcctcctgcagggcctacagctcatcgcgtgagccacagccacagccacgcaacggcctcccgccgcccttatacgtaccttgctgcttctgtcgttccgtcctgctactgtgtctcgtgtgcttgtctgtctgtctgtccatgatctctcgtagctttgtgatgctttggaaagacttgggagtgctgtaagatttctggtctgtatgattacattcagcgtcttcccagcctcttcgccg

SEQ ID NO: 99559 - DNA, 1650 bp, Zea mays
  Clone ID: MRT4577_22312C.1
cattgggtacctcgaggccggccgggctcactccaccccgttaaaatcacgacgcggtggtgactggtgagtccacagtccacactccccactccattttctaccatcacactgacacgttcatagctagctagtcttcagctagtaacgtacgacggactaatctcgatctgggagcgaggaggaggacgacgataatgaagatgagctccgtgcccgcggcagcggcggtgatggtggtggtggtgctgctctctgcggcggcggcgactgtgacggggcaggcgcttgtgccgggcgtgatgatcttcggcgactcggtggttgacgcaggcaacaacaaccggctagcgacgctggtgcgcgccgacttcccgccctacggccgcgacttcccggcgacgcacgcgcccacggggcgcttctgcaacggcaagctcgccacggactacaccgtggagagcctggggctgagctcgtacccgccggcgtacctgagcgaggaggcgcagagcaacaacaagagcctcctccacggcgccaacttcgcgtccggcgccgccggctacctcgacgccaccgccgccctctacggcgccatgtcgctgagccggcaggcggggtacttccgggagtaccagtcgcgggtgggcgcgtcggccggcgagcagcgcgcccgggagctgacgtccgggtccatctacgtggtgagcgccggcaccagcgactacgtgcagaactactacgtgaacccgatgctgagcgccgcctacacgcccgaccagttcgccgacgcgctcatgcagcccttcacctccttcgtcgagggcctgtacagcctgggcgcccgccggatcggcgtgacgtcgctgccgccgatggggtgtctcccggcgtccgtgaccctgttcggcggcgggagcgctgggtgcgtggagcgcctcaacaacgactcactcaccttcaaccggaagctcggcgtggccgcggacgccgtgaagcgcaggcaccccgacctcaagctcgtcgtcttcgacatctaccagccgctcctcgacctcgtccaaaaccccaccaacgccggattcttcgagtcccggcgggcgtgctgcggcacgggcacgatcgagacgtcggtgctgtgccaccagggggcgccggggacgtgcaccaacgccacgggctacgtcttctgggacggcttccaccccacggacgccgccaacaaggtgctcgccgacgcgctcctcctgcagggcctacagctcatcgcgtgagccacagccacgcaacggcctcccgccgcccttatacgtacctaccttgctgcttctgtcgttccgtcctgctactgtgtctcgtgtgcttgtctgtctgtctgtctgtccatgatctctcgtagctttgtgatgctttggaaagacttgggagtgctgtaagatttctggtctgtataattacattcagcgtcttcccagcctcttcgctgaattttgaacttggagtgatcaacgtacagcccgtggcatatttttagagtattgatacaacattgctcgatggtgaagctagaggtgtttagctaaaactttgtatctaaatccgatattagtaaaactttggatctgtggcttctgcagttcaacagtt

SEQ ID NO: 99560 - DNA, 394 bp, Zea mays
  Clone ID: MRT4577_22313C.1
cccacgcgtccgcccacgcgtccgcccacgcgtccgtgcattgtgtgtgacggtaatggaacaagctaccaagttcatgtacgatcaagagcaacaggctcctcggacatagccaactaccattctggaatgctagaggcttccttataagtggatgactcatcaacaacattcactttaggaaagccatacctatcatcaggacgaatagtgctacaatctcgaagattatacggtggaccaacttgtggctcatcagaaatattaggtggcttatcagtaatattatttgaagcatcaccattgggctcatcaggattggctaatgtgggagggctaaatggaaagtcaccggtgggtttgggactacgatgggagacacacacacgtgata

SEQ ID NO: 99561 - DNA, 258 bp, Zea mays
  Clone ID: MRT4577_22314C.1
aaaccaaaaagcttttgttttacgagctgaacttacagtccaacacagttgttcagtccaaaacataaataatcccaatttaaaacatcggggccaaaaaccttttaagaggcaagggttccttaaaaggtgcataaaaaagcttccggttttatacttctacaaaatggcctcgatcaacagggtgggatacttaactggttccttggtgggacaatgttgtcagcctttttttttacaagctttttctttttttaa

SEQ ID NO: 99562 - DNA, 282 bp, Zea mays
  Clone ID: MRT4577_22315C.1
gccacgcgttcgcccacgcgtacgtgccaatcccccgctctgccgactaccgccaggcccgggcgccagcctgcaaagtgcaaacccagctagagcttagagctagcatggagtccggcgccccgtgcccgctcgcgcacgcgcaccccgtggacctgcgctggctgctctcggtcgccgtcggcggactcttcgcgctgatgctggtgcttctggccacctccccgtcgttccgggtcgcctacacctcgcccttcccgcgcctttttactcggccccgcg

SEQ ID NO: 99563 - DNA, 329 bp, Zea mays
  Clone ID: MRT4577_22316C.1
cagctgacccctgcactggacccttccgagagctactaggacccatcgaacgtgaacgaggaagcagtccccttcatgcgcacacaacagggagcttggaccggtcacccatagcaccatcggattcagaggcaacactgtcatcaccacagggcactcatcaatcaatgaaatctaagacaaacccatgaatcccagccagtacaacttgatcgcttcaaaagctgtcgcgacaaccatgctcatacaggggatgtaatgacaaccccttcacctgaaatgcatgttgatgctgtcgctggttccaacttcattttcagtaataacaa

SEQ ID NO: 99564 - DNA, 1180 bp, Zea mays
  Clone ID: MRT4577_22317C.1
cggggatcctcccaccgtccgatcgcaacacaatccaaagaacgacgcgggggagcgagcgatagagccagaacaagaggagcgatccagaggagaagacgaaagagtcaggggagctgctaaggaccgatggccgaccccagctattggatagggatggacatcgaaacctccgtcacgatgctcgtcatctgtctcgccgccgccgtcgtgagcgtgtgcctcttcttcattttcatgtgcatcgtgcaatggttggactcgccacggatgcgcgtcttcaggctcggcggcgtcaccaccctgaggcagaacctggactacacctgcaccctgtgccaaaacagcatggaggccggcgagaaggtccgcacgctctcctgcgaccacgtgttccactgcggcggcagcgtcaagtgcgagggaatcgaccactgccttcgcactggaccgatggagcgctgcccgacctgttaccgggttccccatcccgtgccctggaagcggacaccgccaccgtcgccaccagcacctacaccttcacagggagcattggcggcagcgctaccacctttgcggctcccgttgtcgacgcgggatttggacgaggcgctgctgcgttgggagcaaatccagaaactagcggaagcgtcgtcatcagcatcgctgcatcggcgccacccgcggacgtcgacgtcggacaaggaggaggtgttgccgcttccggcggacgacgagatactacctgaggcgccgtcatcgcagtagacacgcgtgcgtgatcaagcctggatgggacggtgttgacacagcacgtcctgtgtgcggcgatctcgaactgggtcagttcgtggagatgttcttctaggattctttcgtcattttgttttctgcttcgttgaaactgatcgagggtagtgcgtctttctgatggtcagagactcaggaccagttcttcaagtactccttagttgtttccgcttttgcttccttcgaactcatcgagcttagctgcgttcctgctcttttgttaggacttcagagttgagtccaccttaatgaaccaaatgtctgaatgccaatgaacgatgacttgttagttcttacatcagcatgaatagatccttggttttcattgagcattgaaaaccggacgcgtggaaaaaaaaaaaaaaaaaaa

SEQ ID NO: 99565 - DNA, 425 bp, Zea mays
  Clone ID: MRT4577_22318C.1
gcctctcatcgactgggggtgccaccatcctctacgggctggtgaggctggacatgctccagctctactatatcccgctcgctctcgcgtggtgagcaaggctgaaccggagggccactctgcgagtaacggctagccacacctggatcggcttcgtgcccctgactgccgttaggataccgtgatgacctgcttgcccctgtcgaaaaccggcctcccccaggcaaatgagagaattccgaaagttgcttttgagggcccaatcaatggtattattggctacgttgaggaagatctgggccccaccaataaagacaccacaagggtgaccatctttacgtctagccgagattaccctgaacgaccacttgatcaaggtacaagtgttgccatcgacaacgcagtgaggtctacagcctaccgtg

SEQ ID NO: 99566 - DNA, 265 bp, Zea mays
  Clone ID: MRT4577_22319C.1
ggccgggcaacagaaacccccccacgccgcgccgacacccccaaggcaaggaagagagggcaggacgacacaccaaaagcaggaacacccggggcacggcccccgcagcagacaccccaggaagcgcacgaccaggcagcaaggaaaggcgaaaggagacccgaggaacgaccccgaggagccagggcagcagacagcccaccgcgagaacaagggggaggggagggacagcggcaagagaggcccgagagagagagagaaccaa

SEQ ID NO: 99567 - DNA, 496 bp, Zea mays
  unsure (1)..(496): unsure at all n locations
  Clone ID: MRT4577_2231C.1
aactttgcctcctaacaaatccaccaccgggtaagggtccctaagggtttgtggaagggcgatggccgcggctgatgtggagtaacgttgcctcctccgggggcctgcctgggccaacaacaacgaatccctggagaatgccttcgcctcctacggcgagattctcgactccaaggtcatcaccgaccgggagacggggaggtcncgcggcttcggcttcgttaccttctcctccgagaactccatgctcgacgctatcgagaacatgaacggcaaggagctcgacggccgtaacatcaccgttaaccaggcccagtcccgtggcggtggcggtggcggctgtggctacggcggctgatgtgtatgctgattttggctctgatcgcttctgcagctatatcttcgttatcgtgtgtaccttcgtgtccgtgttcgcgttcgtgatcgttatgagcttcgtgttggtggacgatcagtcgttatcgttgtggtcgct

SEQ ID NO: 99568 - DNA, 664 bp, Zea mays
  Clone ID: MRT4577_22320C.1
ctcgagtttttttttcttttttttttttttttttttttttttttttttttttttttttttttttttttcccggggggaagggcccaaatggaaccttttgggagggaaaaccccttttttggttctttaacacccttaaccaacctttggccccacaaaggggttcgtttcccaaaaggcaaaccaatgatcaagttcacagctttcccaccccaggccccaaatttaaccccggactttccaccccccgtttatttattttaaactatccctgccctaacaacctttgggatcttttgcatcactccggggttttggaggggcccctgcccaccccgagggttttcctgcaaacccgaaaaaccctgttgcatgatcggatcagccaggatgttctggatctcagggcctggcagggttttgttctgtctttttttaagtcccccctcactgagtccccctttgctccccttgttgatctgtaaaacacacctctttacaccataaagaaactccgggtttttcgggccatgctttaggccaccttgataagttcccacccctttgccatattctttaataaaaaacgggataccccctttccttgggtacccctgggaaaagggggaatctagctaaaggcccttctacaaatttttaaaac

SEQ ID NO: 99569 - DNA, 336 bp, Zea mays
  Clone ID: MRT4577_22321C.1
ctcatttgttcggcctgtcgggcacgaagccaattggggtcagaggcgccggcattctatgtgtcagatgggactcggatagctctatggcatcgatggatgtgagcgtgtaagacatgaacaacgttgctatctggcctctaaggctctccgccgcacatcctaattataatcacttgcgcaggaatacaatgttattaggtatatatggtgatcaatacctataccggcgttgattgaatcactcttggaggttaaaaccattgctgaatgcaaccgagcacgctgaatctaccttgacagcttctgcaccactgaatcacctgccccttgaca

SEQ ID NO: 99570 - DNA, 225 bp, Zea mays
  unsure (1)..(225): unsure at all n locations
  Clone ID: MRT4577_22322C.1
gcatgcctcccctgagacgcagcaccctgctcgactgggtgctgtgcttctggatgggcatgcagatcatcgtgcggacgccgtcaggctgctttgcagcaaagatgagcccgctggtgatctgggggaatgccctccttgtcctggatcttggccttgacgttggcgatggtgtctgaagactccacctagagggtgagaggggggggggtcaanatcttcacg

SEQ ID NO: 99571 - DNA, 906 bp, Zea mays
  Clone ID: MRT4577_22323C.1
cccgaaaaagaaattagaaaaccgcagccaatccagccgaggctgcaaaaaatcttggaagccgcgggagggagagccatggaggacatcggcgagggccccgccgagaaccttccggagcccctgtctccagccgtggaggccgaggacgaggacgaggacctgcagggcgtgccggcggagagctactgcctgtgggcgcccggcgggcagtcgccggcgcccgcgtccccgcgccggtgccggaagagcggctccacgggctccgtcctccgctggcgccgcatcagcgaccgcctcgtcggccgcagccacagcgacggcaaggagaagttcgtgttcctcaccgccgttccggatccgcttcgtcctagtaggagtaacaaggaagtggatgaaggaggcggcgacggcgaggcaggcagcgtggcgcatcagctgagatattacggtagaggccgcggcggcggcggcggcagccggaggcgttcgtacctgccgtacaagcaagagctcgtcgggctgttcgccaacgtcagtgggctgcgccggagctaccacccgttctaaaacgcgatctgtccatggccttccgacctccgtcagtgggccaaaaagtaaaaaaagatgatatcttgctcgtttttctgtggataatactgcctatagtactgtgcactgtttttttacagtacggcggaagcagtagatctgcgtattttctctctaagttatcggcttggataaaatagggttttagttttaattaaaaaaatagcagaacctcagcaaggggaaaagaggtaacgtagcgtgtgtactgctgctagtctgctactcatttgttcacaacttcacatacttgacttcacttgagaaaaataacctgaggtttccttaatatac

SEQ ID NO: 99572 - DNA, 444 bp, Zea mays
  Clone ID: MRT4577_22324C.1
atggctggttctaaagatcacaccgatatctccctggacaatatcctaaagccggctattgaaagtctgacggccgatgagcaacagcaatatgaggactacatgcgtcaagcgaaggagaaattcttatcacaatacacggtggatcgccaccagaaagttatcaaacatggagagatcgatgtcgcatctcttctatcttcgcttcaagtccccaaccctttgtatggtatgccgatgaactcatattcaggacaaatacaaccaccgtcgtccctgcttggcagatcagcgcccctgaacacggttggaccgtccgagcctctgcccggaccatccggcccatgcgcggaccatacggcttgctctaccggacagtccggggccgccctaggaccaccgccgtccctgattggtagatcgatgaccctgggacgcagttag

SEQ ID NO: 99573 - DNA, 1092 bp, Zea mays
  Clone ID: MRT4577_22325C.1
gccgcgggagcgagagccatggaggacatcggcgagggccccgccgagaaccttccggagcccctgtctccagccgtggaggccgaggacgaggacggcgacgagttcagcttccccgttcctccggtcgccgccgacgcgtgcatcgtgcccgtgtacccgatcttcggccggcccccgtccccgccgcggggggaggaggaggagccggagacggccaccttgcgggtgccgctgggccggctcctgctggaggagcgggagttccgcgcgcgggagccggacgggcgatcggcgagtgcgcaggcgtggcaggacgaggacgaggacgacgcctcgggcggcggcggcggcgccggggacgaggacctgcagggcgtgccggcggagagctactgcctgtgggcgcccggcgggcagtcgccggcgcccgcgtccccgcgccggtgccggaagagcggctccacgggctccgtcctccgctggcgccgcatcagcgaccgcctcgtcggccgcagccacagcgacggcaaggagaagttcgtgttcctcaccgccgttccggatccgcctcgtcctagtaggagtaacaaggaagtggatgaaggaggcggcgacggcgaggcaggcagcgtggcgcatcagatgagatattacggtagaggccgcggcggcggcggcggcagccggaggcgttcgtacctgccgtacaagcaagagctcgtcgggctgttcgccaacgtcagtgggctgcgccggagctaccacccgttctaaaacgcgatctgtccatggccttccgacctccgtcagtgggccaaaaagtaaaaaaagatgatatcttgctcgtttttctgtggataatactgcctatagtactgtgcactgttttttttacagtacggcggaagcagtagatctgcgtattttctctctaagttatcggcttggataaaatagggttttagtttttaattaaaaaaatagcagaacctcagcaaggggaaaagaggtaacgtagcgtgtgtactgctgctactcatttgttcacatacttgacttcacttgagaaaaataacctgaggtttcctt

SEQ ID NO: 99574 - DNA, 438 bp, Zea mays
  Clone ID: MRT4577_22326C.1
atttaggtgacactatagaagagctatgacgtcgcatgcacgcgtacgtaagctcggaattcggctcgagcttttcttcttcgtattcattgttcctcctctccatctctctactatgcctgcacggactgttgttacggtgctcacatggttttgtagagcatggtatttaaacaaggctggtgtaaactttatatggagatttgaatggtttgtactagtttttggccaacctccaacatttttgaagtgttgagagcatcttcaagagtctttctaaagcccactctctaaatcgttaattagagagccatttgcacaaaaaactttttcacactccaatagttttttttgtctgagacttacgctctctagagtatttcttattttctatctaatggttagccaaaaattcatagtaaaagatggatatattcg

SEQ ID NO: 99575 - DNA, 458 bp, Zea mays
  Clone ID: MRT4577_22327C.1
gcctccaaatcaaagtgtttgggtaaataacacgggttccgatggaattgctcttacactactgacgcccttgctaactagattatgttgggcaggggaggaaaacggaatccctccaggtgctcgagaaacccaacttgctggcacaactcaacgggttccgaaaaagtttccttaatcggcctgaccttccatcccagtttcttgagcttcccggacctcattggagctgggtgctccatgctcacaaatgctatacttgctaacgaaagggcaattataagggggcataatggttcagcagccccagcaggtcactcactctaatgaaatcaggagcacatatttgcccaccggacgcttgtgggggcttctacacaaaccatatatcatttggagcgggcctaacgtctacgatgggccaaaggtgtggcctcattcgaggggggactcctttc

SEQ ID NO: 99576 - DNA, 864 bp, Zea mays
  unsure (1)..(864): unsure at all n locations
  Clone ID: MRT4577_22328C.1
cctcgaggccggccggggccgcatgctctccttgctcgagctcgcccacttcctggtgcatcttcctcctcgcctcccatctcagggccaggctgctcggccacgcccagcagctccttgaacgcgcgcccctccgagcatcttgtccctttgttggttgccatctttcccagctccccagcgcaggtggctggctgtgcgttccccttgccggcgtcctcgttctccctgctcgtcggtccccgggaaaaaaaaacatctccctcacggctgctcccatggctgtctgcagccctagccgagctcgctctccccgcccagcagcaagcagctcctttcccctcgtcatgaacgccgtcgatcccctactgcagttcctccacgtggtctggtcgtcgaccgcgcgcgtcacctgctcgtggttatgggaaaccagcgagcctctcctcacggcgtagtttccttgcatcatcgttcagcccgagatttagatgagaagaaagctttagcgaggcgcttgccaagtgcttggtgaatcacctcaaccggatgtggttgtcgatctcgcggagtcgagtcgagtttagtcgtggtacgctagctgattatgcgagctgaaggacatggatcagagcaaaccggtattggtggattaatcttgtggatgcatcaagccagcaccagaatggaagatgctcaccaagtggtcgtcaattaacaacactaacgtagtgtttatcccaggttataattttgttctgttgtggatggtgctaagtgccggtgggctccggcttctatatcagtatatccccatctttacttctnttatganngatgtcacttaagctagcatggctttta

SEQ ID NO: 99577 - DNA, 816 bp, Zea mays
  Clone ID: MRT4577_22329C.1
ctcgaggccggccgggtcgcttttcttcgtggccgccagtatctggcgcctcgccaagcgctgcgccgctgtggaggggcgcaccgagttgcccatcgtgtgcgccgtgtgcggattgaagattcgggccctacaggacagcgaggaagatgacattgttggagagaccaacgatgtgcagaaactgaaggaggagcttaagtatgagaggcagaggacgaaggatgcgcgcgaggacctggagaaggacaggcgtgctgcagaggctgcaatgaatgaggtcacgaccaagaataagatcctggaaggagagaacgggcggctattgatgcaggtagagcatttgaaggaaaatatgaagatgaagcggatgggtataattcagatacttgagagtcgtgatcatgaattctggaatgcaaatctggaagccccagttcctgtctgagtctgaccgatccgtgtcgaaaacaagcaaggatgacagagataagaagtagctagcccttggtcattgctagttgaatagaacagcaaggaatgccctgtgctggagaagtcattgcttgcttgagctcgtcgtcctctgatcagctttcagcagccaaacagggaatgcccaagttttgaagactcggatgttcctctactatggaaagctcttcaggagaaatatctaaaatctgtctataaatataacatttcttgtaagctatctaggtacttatctaatatgagcaacacctgtacttgatcgctctaccttacaaatgctcatcatcgctattatctatggcctattgatctaaagtccgt

SEQ ID NO: 99578 - DNA, 382 bp, Zea mays
  unsure (1)..(382): unsure at all n locations
  Clone ID: MRT4577_2232C.1
gggaagtcctctgtcacagatatcgagggaagaatcgagctcgggcgaaggcggaggtcctccgaaggtaacaccgaacctgtcctgaaacttgatgacgcgtgtcacagtcgacggaatggccggagcgggagagcaagtagcagaggcctggttcgggcgaagcggagcttacgcccgaggttgagtttagcttcgggcgaagcggaacttgcgcccgaggtcttggtccgtgtcctgtcgtattatgcgtcacgaccgccaggtggcgtgcgcacgcttaatgatgttggtgaatctttgacaagactgttgtcctattgaaagattcacatgcagcctgacgtgaggtangtgtgcgcattgaatacggttgtctccc

SEQ ID NO: 99579 - DNA, 771 bp, Zea mays
  Clone ID: MRT4577_22330C.1
ggccgctttttttttttttttttcggcggaaataaattctttattacaaaatgattacaagttacatcaggattttattatacatcatcggagtgattacaaaagaaaatgattcagaaagattacaatttgaatgtataaaacatttataagttttaaaatatatgctagcttaagtggcagtcctcaataaagaagctaaagatgggatatacttatataagaaggctgagcccaccggcacttagcaccatccacaacagaacaaacttataacctgggatactctaggttagtgtggttagatgacgtccgcttggtgagcatcaacaatcctgacacttgtttgattcacccactttagcttcgtccatcagcattatcttgagatcaatccaaaccttgtcttctacatcacgtgatcaattaacgtaccacgactaaactcgactcgactccgcgagatcgacaaccacatccggttgaggtgattcaccaagcacttggcaagcgcctcgctaaagctttcttctcatctaaatctcacaggatttaccgggctgaacgatgatgcaaggaaactacgccgtgaggagaggctcgctggtttcccataaccacgagcaggtgacgcgcgcggtcgacgaccagaccacgtggaggaactgcagtaggggatcgacggcgttcatggcgaggggaaaggagctgcttgctgctgggcggggagagcgagctcggctagggctgcagacagccatgggagcagcc

SEQ ID NO: 99580 - DNA, 1137 bp, Zea mays
  Clone ID: MRT4577_22331C.1
gcagcggaaataaattctttattacaaaatgattacatgttacaataagtttacattatacaattatcggagtgattacaaaagaaaataattaaaaagaattacaatttgaatgtataaaacatttataagttttaaaatacatgctagcttaagtgacagtcctcaataaagaagctaaagatgtgatatacttatataagaaggccgagcccaccggcacttagcaccatccacaacagaacaaacttataatcctgggataaacactacgttagtgttgttaattgacgaccacttggtgagcatcttccattctggtgctggcttgatgcatccacaagattaatccaccaatactggtttgctctgatccatgtccttcagctcgcataatcatctagcgtaccacgactaaactcgactcgactccgcgagatcgacaaccacatccggttgaggtgattcaccaagcacttggcaagcgcctcgctaaagctttcttctcatctaaatctcacaggatttacctccacgggcggaacgatgatgcgaggaaactacgtcgtgaggagaggctcgctggtttcccgtaaccacgagcaggtaacgcgcgcggtcgacgaccagaccacgtggaggaactgcagcaggggatcgacggcgttcatggcgaggggaaaggagctgcttgctgctgggcggggagggcgagctactgaggccggacgccaagcaggggacgacagcgcgcggtgctgggcgagctgctggtgcagacctgggcgagacgagagcatagagggactcggcgagggagagggctggagcgagctcacagcgaggggcatccatggctgggaagagagagatagagggaaggtgtcgtgaggaagatatggcgtggggaggtaggagacgggcggcctgacggcaccatggctaggggcaggggcgaccagcgtgcaggaaacaggtgctgcggcgtctatgggaaaggtcggctggggaaaaatggggagggatgaaccaccatgggagggatgcgtgcactcccaggaagaagatagagaatgagggcggtggctgtgtccctgctgcaacaggtcgaggacggccgcctcgagcgccgcacag

SEQ ID NO: 99581 - DNA, 1128 bp, Zea mays
  Clone ID: MRT4577_22332C.1
gcagcggaaataaattctttattacaaaatgattacaagttacatcaggattttattatacatcatcggagtgattacaaaagaaaatgattcagaaagattacaatttgaatgtataaaacatttataagttttaaaatatatgctagcttaagtggcagtcctcaataaagaagctaaagatgggatatacttatataagaaggctgagcccaccggcacttagcaccatccacaacagaacaaacttataacctgggatactctaggttagtgtggttagatgacgtccgcttggtgagcatcaacaatcctgacacttgtttgattcacccactttagcttcgtccatcagcattatcttgagatcaatccaaaccttgtcttctacatcacgtgatcaattaacgtaccacgactaaactcgactcgactccgcgagatcgacaaccacatccggttgaggtgattcaccaagcacttggcaagcgcctcgctaaagctttcttctcatctaaatctcacaggatttacctccaccacaaacacacaaacatacacataattagtatctagtaaatcgacgtcgggtacaggtactaacgaggaataaacacaaggagacagcgggtcctcaccgggctgaacgatgatgcaaggaaactacgccgtgaggagaggctcgctggtttcccataaccacgagcaggtgacgcgcgcggtcgacgaccagaccacgtggaggaactgcagtaggggatcgacggcgttcatggcgaggggaaaggagctgcttgctgctgggcggggagagcgagctcggctagggctgcagacagccatgggagcagccgtgagggagatgtttttcttcccggagaccgacgagcagggagaacgaggacgccgacaaggggaacgcacagccagccacctgcgctggggagctgggaaagatggcgaccaacaaagggacaagatgctcggaggggcgcgcgttcaaggagctgctgggcgtggccgagcagcctggccctgagatgggaggcgaggaggaagatgcaccaggaagcgggcgagctcgagcaaggagagcatgcggcgaagaagaggccgatggccacccgg

SEQ ID NO: 99582 - DNA, 235 bp, Zea mays
  Clone ID: MRT4577_22333C.1
gggcttttggttttttttgtgggactgctccggaccactgtcattctggttctggccgaccaacgacagggcgcgcccgcgacggcccggagcgacagcgcgtagctgacggcacagaggggcttaccgagccctagctccactggcagtaacgctaaaacggtggcggcggccatggccatgggtctagggctaacgcgcttgcagtcggacctcgggctcgagccgaatcccg

SEQ ID NO: 99583 - DNA, 328 bp, Zea mays
  Clone ID: MRT4577_22334C.1
gggaccccccgggcgaaaacctttgtttttttaaaaccttggggctcggggcaaaaatccctgggtttccaatttgttaaacaaacccccccttttggatagggaattttttggggttccccccttgaaaaagatccagggtttttaaaaccaaccgttcccttgaaacccccccgcttagtggccccccatttttttggggggtgccctgaactttggggacccctggacgcccttgtggcccgctttaaaaaaatttttttttggccccgtttttttgggggcccaaagggggaacttcccggtttttgtgcaacccctttttttt

SEQ ID NO: 99584 - DNA, 286 bp, Zea mays
  unsure (1)..(286): unsure at all n locations
  Clone ID: MRT4577_22335C.1
cccacgcgtccgcgagcggcagcacatcttacagctacgactacgactacgagcacctggtgctcgacccggcgtctctgggcgtgccgtgggccgacccggccgccgtggagatcccgccgcatctcctcgccgcgctcggggagtacctctccggctccgcggcccggggggacgtcgaggcggaggcggatgcggacgacgagttcatgatgcacgagttcaaggtgcggcggtgcgcgcgcgcgcggaancacgactggacggcgtgcccctacgcgcaccc

SEQ ID NO: 99585 - DNA, 142 bp, Zea mays
  Clone ID: MRT4577_22336C.1
tcacgcgcgcgggggacgtcatacttattatataaagccacttaaacgaaatactcaaagtgcccatttacaacctcatgactgccaaaactctggcgtaacccaacttaatctccttcgcacacattcaatattatcccag

SEQ ID NO: 99586 - DNA, 342 bp, Zea mays
  Clone ID: MRT4577_22337C.1
tgggacacctggtcttactagttgtacgagggggatctttcacctaaactaggtgattctggctgctgctccacgcgagcatgagctcttacaattcacctcgtcatgcgcacgcgcgcccattgttacaatatggcgacctgcaccaacatacaccaagtgataagccgtttctgatcgctatgacgaagcacttaaaccaacgtcttagcctgaccgagacaatataattactgcaaatccgattggtagaattgatgtatggactatgacaagtcacaaccttagctcgtgaccctactacaacttctgaaagtgccaacgcataaggttttgattgat

SEQ ID NO: 99587 - DNA, 624 bp, Zea mays
  Clone ID: MRT4577_22338C.1
ggaattctcaaactagactttatatgatcgaatcactcgtgtaaatcatcggcacatcaattagtatatctatactactataaatatattttataatcggttgcttagagcggctcatgtatgcatgttggtttgcctcgacagttggacgacctcttcctatacttaataactcggcgacttgcattgcatgggcatggcacgctgttgcttgaataattcagttcaattctaaggcggcggcggcggcggagaagcatgatgatgatctgctacgagtactttgggctcgccggagctgtcgtcctttgtcgtccggccggcgggtggcccggcctcggcgagcatctgcacgacatcggccatggtggggcggagtcccggcatgctgcaggtgcagcgcacggcgacgcgcagcgcctgcaccatctcctccttgtatggactccacgcgaggcgcttgtccagcgcgtccgcctcggctccggcgccggcggccaccttgccggagacccagtgcacgatgtccctcgtgtccccgaactccggctcgatgggcttcctccccgtggccagctccatcagcaccacgccaaagctgtacacgtcgcacttggtcgtcgc

SEQ ID NO: 99588 - DNA, 711 bp, Zea mays
  unsure (1)..(711): unsure at all n locations
  Clone ID: MRT4577_22339C.1
tttcgagtttcgatgttcaannnnnntaaaggaatagcgatcttttagcaggaaagaatcagcgggttacagaactcgggttctctatatcatcaaaactatactgtaggcctggggggcatcaactcttcattggcaagttggttcctcaatacgactgggtagatcaacctccaaaggtatatgctagccgggaaccactcgttgatgatcttcacccatgtacttgcccatccaacatctatgctccactttcttgttgggggattaagctcccagctaatgaacagcattgcgaagtacatagcccccatcgcaaacacaatggggaaaatctcgtagctgtaggggatgtcctcatccaattgtacttcatcattccgaaactggaaggatttggtgtcgattccagtagaaaacgtggccattacaatagaacaaattgcgataatgaagctaacgatagtagctgaatcgccatcctgggcaattttctagagagggccttccagtttgcggctcactggtggagtgcagccacaaaggaagacaatatatgaactcatgatcccagaagagagaagaccctcgttaaccttggagtgcaatgatactgccatcattatagtcaccaagattgccgtccatgtaatagtgaagatgttgaacgcacaagaggagttggggacatacagaacctggtgccgaatt

SEQ ID NO: 99589 - DNA, 1169 bp, Zea mays
  Clone ID: MRT4577_2233C.1
gccggccgggcttccaaacggaccacttgctcgtccacatcccttcctccagccaccgacctcccaaggatgcgctcttgccgccggcctcccaaggatgcgctcttgccgcccctcttctcgcgccgccgctgccatcgccatgtcgaagcgcgctacgtctcatacattttctgggatccagaaatttcggacattgtgatcttctcggccccccaggacttcagccttgattttcgagccctggtgcttgagtacatgtccaatggaagcttggagatgctcttgcactctgaagacagaagtcacatggggttccaattccatacaaggatggacaccatgctagacgtgtctatggcaatggaatatctgcaccatgagcatcacgaggtggttctgcactgtgacttgaagccaagcaatgtgctgttcgatgatgatatgacagcacacgtagcagactttggcatcgcaaagttgctactgggtgatgacaactccatggtcgtttccaccatgcctggaacacttggatacatggcaccagagtatggatctcttggaaaggcatcgcgcaagagtgatgtgttcagctttggaatcatgctttttgaagtcttcactgggaagaggcccacagatacgatgtttgagggagaactgagcattaggcagtgggttcaacaagcatttccatctcagcttgacactgtcgtggacagccagctgctgcaggatgccatttcttcttcagccaacctgaacgaggttttgcccctaatatttgagctcggtttgctctgcacgactgattcacctaaccaaaggatgtcaatgagtgatgtagtagtgaccctgaagaagatcaaaatgaactacaccaaatttggcatcagcaaggacacaatgtccttccctgcaattgatcacgcttaattctacatgtctagtttcttcggttctgcagtggaacaactgcatcagctaccttttactgtattttttttttacaaaagttgtttcttggataactcttagtaatatatgggcatattactattgtcaggtgtgaaataagtttctgtaatttaaattaaaagaaaaggttgcgtgacattcatgtgcctgaacagagatgtcataattttaagtttgatcttttgggt

SEQ ID NO: 99590 - DNA, 446 bp, Zea mays
  Clone ID: MRT4577_22340C.1
ggcagttaacaaagctgcattctgcagatcgacagcttcccagcaaggggggcgggagtttcggcccccaacgggtataaaactctagcccaattttgtttttgggctatttccccccccttccttttatcttggacttctactttggttcaaaaaaaaacttcgattttataaaaatctggatttggggttccgctattaaaacaggctcaaattttgttttcccggtgtctctcccctaggaggctcccactcacaccccttttcaagaattcgaaccttcattcatctactacatgacccccatgctcaaagaaaaagctgggcacaccttcggggtcccaaccagcgggcgtcaaaccacgaggccctttatgcaagagaccccgagcaccaaccaccccaacaagaacagcgtaaaccccgccatgcccaagaggaaggac

SEQ ID NO: 99591 - DNA, 304 bp, Zea mays
  Clone ID: MRT4577_22341C.1
actcactaggaggacgcgtatgaccttactacaccctaaagtgagtcgtattaatggctgctgctcacgtcacgcaggggacacctcgatgccgcgccatggatgacgccgacctcacgcggggccgacatgccatggtctcctcccacgactgtagtgcaagggcccacgaggccggtcgctggacaggtctccggtatccgcgcctgcgacatggccccgcaccggagcgcttgccgtagtcgactggacgaccgggaatcggcacgaggtcaaggtctccgatgacgggaccgtgcgcacc

SEQ ID NO: 99592 - DNA, 535 bp, Zea mays
  Clone ID: MRT4577_22342C.1
gctttctcccagcgtccgcccacgcgtggggggggggggggggttttttttttttagataatggggggttataatacatgagatagctaaacgctgttaaatggtttctagtgttacacaatcagccaaatgcgctggatctggatacatgcatcatgctagtccgatgttgacatgggtgggggggggtatgctcaacaactctgcgcggaggccatgtggtacagttgaccataaaggtatgtatgatattgcttcatatcagtataacttcagacgcgcccttctgctggaaaactggaacgctcgcttctgatgcagttcactgtcatttccatggagatgccacacaacaagaacttgccaagccaagctttatgttgccgaagtctcagtactgtacagacgaacggacacaagaagatgcagaatcagtaaacaagctggggctcaaattcagcaaaatcaaccgagccggactcaatggggggcatgaggtatgcagcaatgatctcagacaccagagcggcaacga

SEQ ID NO: 99593 - DNA, 1266 bp, Zea mays
  Clone ID: MRT4577_22343C.1
aaaaaaaaaaggagctatgtaaattcagatggtacagcatcatagccaaacgctgttcaatggctttctagtgttacacaatcaaccaaatgtgctgggatacatttatcatgctagttcgacgttcattagcagtaccccatcttcaagtacttcgagaactggtgccaggacgagaacaggcacggcgacttcttctctgccctgctcaaggctcagccgcagttcctcaatgactggaaggccaagctctggtcacggttcttctgcctctcggtgtatgtgaccatgtacctgaatgactgccaacgcactgcattctatgagggaattggtctggacaccaaagaattcgacatgcatgtgatcatcgagaccaaccgcacaacggcgaggatcttccctgctgtcctagacgtcgagaaccccgagttcaagaggaagcttgacaggatggttgagatcaaccagaagatcattgctgtcggaaaatcagatgaaatccccctagtgaagaacctgaagaggattcctctcgttgccgctctggtgtctgagatcattgctgcatacctcatgccccccattgagtccggctcggttgattttgctgaatttgagccccagcttgtttactgattctgtagaaagatttatcttcggattattctctccgaaaggcaagtcggtgctttctccctaaggggccttatggtgaaaacaaactgggatggtcaaaggatctgcatcttcttgtgtccgtctgtacagtactgagacttcggcaacataaagcttggcttggcaagttcttgttgtgtggcatctccatggaaatgacagtgaactgcatcagaagcgagcgttccagttttccagcagaagggcgcgtctgaagttatactgatatgaagcaatagcatacatacctttatggtcaactgtaccacatggcctcggctcagagttgttgagcatattttttagcatccatgtcaacatcggactagcatgatgcatgtatccagatccagcgcatttggctgattgtgtaacactagaaaccatttaacagcgtttagctatctcatgtattataagtgtcaattatctagatgaatttggtagatgattgtccatattagcacggtctatgcttctaatctcctttcatcattgtatcgtaaaaacccgccaagtaaaatgtgaaacactaaaaaattgtttcttgagggactgccgtgaagcaaaacctcagccctttat

SEQ ID NO: 99594 - DNA, 204 bp, Zea mays
  Clone ID: MRT4577_22344C.1
ctcctctttttttaattttctttttcatataatccaaaccaagagcaatggtggggccactttaatgaaccgctaccatttagcacacaagaattccaagaaaagccgccaccaaaaataaaccccaaaaccaactgcccggcaaaccaactaagccatctacgggaacaaggcgaaatcccctcacccatcgacccacacaag

SEQ ID NO: 99595 - DNA, 1968 bp, Zea mays
  Clone ID: MRT4577_22345C.1
cccaagtatacttttttattttcgcttccccttttgtgttttttttcttgttgttggatttttttttttttttttttttttttttttttttttttttttttttttttcagtcaacaatgtattttaccaagtacattagcagctcgaacaataaaataatgaatccacataacacaaacacgattagaaatgcgatagctctagtgaccgtcaagatttgcgacagaccctttttttttgcacgttgacgttacctctagattttttacacaactagcaagcactcgtataacacaacacgatcagaaatgggtgtacaattttgctcgctttccaaataaccacgatgaagtccaacctgcagggcctacacacatcagggtgacgactgacaatttcatgagctctaaaagcggctgcgcgtgcgtggtgacctgttaggctgttaccacgcgacgtagcttctgaacccgggcatgcattgccgtgaaaatgagacgacgtttccgtacatattgatatctccgggcctctgcctccattgcaacaagacataagacaatgctgaagcctgaagctgaaatggctgagccgaaggtgaaggaatcggataataatcactccatatcggaagtttcatccccctccgcttcctcatcctcatcaaggatataaaccaaggcatgcctccgggatgaaaagacacaggctactcctctcgatgcactaactgcaaatggagtagatacggtgtgaggtatgctacgaactttcccataatctgtgtccaattgcagatcgagtgccaccagttcttgcaaactgtaaatatttgcagggaatgttcctgagagtggcataaaggaaaagttctctatttgcagcatcaccatccaagattttccagggctatcagaacaagacgtttcactcagtagtaaaactacctggttgtccttataaagtgacaggtcaacacactcatatccgtcaggtatatgcaacagaaaacctgaaagtgacatcatgctgagggtagtacaacagttaccagagccctttatcacaccgatgcaatttactttatttaatgatccatcaggtatcttcaagcatacatagtcagtcaagctataggaggattcctcatgcgatgaatcttcatccttataaaatgatattgatgttggcgagcaggatgatgacaaggtagctgatgatgtaacaggatataaaggaagcaatccttgacattgtatctgcgaagagatagcagtaaatggcatcaagaaagcctccttcaagctatcttccaattcattgaattgatttaccaaactcttttccaaaaattgggtgtctgtaaatcctccaaaaactactagctgttctacatgtcatgcagtatccatagcacactcaattctctcatctgcttcaagtagttgtttgattggatccttaccaagaagaaacttaagaaaaatcaccacaagttcactgtttgctgctgggttttaaagtctgttagaatattattaaatgaacctaccgaccaagttccagcagcaaacagtgaacttgtggtgatttttcttaagtttcttcttgataaggatccaatcaaacaactacttgaagcagatgagagaattgagtgtgagatggatactgcaagacatgtagaacagctagtagtttttggaggatttacagacacccaatttttggaaaagagtttggtaaatcaattcaatgaattggaagatagcttgaaggaggctttcttgatgccatttactgctatctcttcgcagatacaatgtcaaggattgcttcctttatatcctgttacatcatcagctaccttgtcatcatcctgctcgccaacatcaatatcattttataaggatgaaaattcatcgcatgaggaatcctcctatagcttgactgactatgtatgcttga

SEQ ID NO: 99596 - DNA, 414 bp, Zea mays
  Clone ID: MRT4577_22346C.1
cttgccccacgcgttcgatagggcgtcctactacttttgtattcacccactcgctgatcatagagatgtcggctgcaaaggcgaaggcggctgccgtcccggagtctgtgctgcggtagcgcaagtctgtggagcaatgggcatctgacaataaggagaaagcgctcgcatacaggaagtaggcgctcgtgagcctcaagatcatctttggccgcgccaatcattacgccgaggagtaccacgcccaggagaaggatcttgtgcatctcaagcctgcagcccagatgaagggctggttctatgttagcccaaacgccaagcttttggttgtggttcgtatccgtggtatcaatgccatgcaccccaagacccgcaagatcttgcagctcctgcgattgaggcagatcttgaacg

SEQ ID NO: 99597 - DNA, 650 bp, Zea mays
  Clone ID: MRT4577_22347C.1
aaaccgggacaattcactttttattaatatataccaaaataatatcttaaaaatgcagcataacatgctttacatatatcaacagaatatagagatgattatgatcaatttactttttattacaccaaaacaatatcttaaaaaatgcagcatgacatactttacaagtatcgctagaatatagagatgaataatcacaatcacacatgacacatccatctaagtgtcattctcctttccagtattacatacatgcgaactgtgcagatattgatcccttgtgacctaggataagtttcgcaaaatgcttatagttctatagaatttgccaagtggaacctgcatgacaagaatagcaacagcaaatccaagtccaaatcctaatccaatgaacatatatagagttatatcgacatgatcttgcgacattttttgtttcaggtcatttggctgaggtgaactggcacattgtctgcttaagggtgctccacagaggcctatgttaccttcaaatgaactgttctcaaatgttccaaattggcgtgattgtggaatcatccctgccaaattgttgttagacaaatctagggtctcaagaaatgtgagatttgttagttcttgtggtatctccccggaaaggtagttccatg

SEQ ID NO: 99598 - DNA, 341 bp, Zea mays
  Clone ID: MRT4577_22348C.1
ccgctgggttcaaaaaaaacaacatccttctacattccttacactacactcccttataattcatttactaccttctaacttaaattttcaccccccacttgtttttttttttactcttccctaacaaataaaaaatacagaacaactcttgtatcttatatattgctcactccttcaaaactaacttcatccttgcaatttcaaacattcaacaattcataaactctctactccttaactttattactacctaattcaatccatctataccgaaacaacaaatcttctatcacaaaaacccttcaaaattctatattatttcttcactccaaaaaatcatt

SEQ ID NO: 99599 - DNA, 395 bp, Zea mays
  Clone ID: MRT4577_22349C.1
ggtccagaatacccgggccgacccacgcgtcagcccacgcgtccggcgcccgcgaactctagaggacttgcgcacaagtgacggacaggttgggcccatctgtcggtgtgcgcgtttcccagctgagccgtggggaaagagaggatgagatgggccgaaaacatggaaccttgcccgactatgttcctttactttctctttttctttttttatgtttcttttctttttccaaattcaaggattcaaactaaatttcaattcctgttttgaacttcagatttccaaatatcgcacaatcctattgtgaatataacttctactatttgcattaatattatttatttttcttcctattatttaattatggaagggataattgactttataagaacttt

SEQ ID NO: 99600 - DNA, 505 bp, Zea mays
  unsure (1)..(505): unsure at all n locations
  Clone ID: MRT4577_2234C.1
ttctcccccgtcttcggcaggctcacagagtcggagatccatctaccgttccttcccttactcgagctcgacacgcaggagacggagaaggaggcggtggtcacggtcggtctcgggctctcagcgacggagagatcgtgttcccctcccttgtctcgataagggactctagacgtcgcatccgatcctccacaactcgctcgactgaacatgcctctacgtcttggtaagtattgctgaacgagggaatgatgancaaatttcaagccaatacgtgctagcctcaccacacgaacgttgcgaaaacgccgatacagagcgttgcaattccacgacacgatacattatagtcagatgctctacggattgccaaatgccgcaacgacaaaggggaacaagaagctaggtgtgatttctagccatccacaaatagcttacttctgctatgagactcatcaggaacatttaattctgcggatagtgaggagcctctgatgcaattctt

SEQ ID NO: 99601 - DNA, 342 bp, Zea mays
  Clone ID: MRT4577_22350C.1
ctacccacgcctaccgacgcagtcgcactacgcatgcatgaattccttccgtaattgctaccagatatcgggctcgcaggcgttatgagatcaatatcactgctgtatatgaccattccatgtacaccagccagttctgcatgaagttagctgctctaacgaccgctatatgcagtttctgctgcaaagcctaatccaaagcacaggctgcgtgtgcttacaccatgaacactgctagtgcggtcaccgtcaggagcacgatccgtcgtctgagggagcagactgaagcatgatatatctctttatattattggggtttcctgtagttgctcttgtcaggca

SEQ ID NO: 99602 - DNA, 223 bp, Zea mays
  Clone ID: MRT4577_22351C.1
agcggacgcgtgggcagtagtcgtcgcgtttgcagctaggcagatctgagttaacccgggggttcgattcgttgaccttgaatgtgggtcatgtgtgtctccgtggaaatagcaaaagttacacccccaatgggaaacacgtgataaaacaaaaactcgtttttgactccagggccatgggggcgtctagggcttctgtgctcacaaaaggggtccggggggt

SEQ ID NO: 99603 - DNA, 350 bp, Zea mays
  Clone ID: MRT4577_22352C.1
attgctgcgtgttggaattggtgctagaagttaggtgctggttcacttttcctctatggattaataatgagaaagcatgtagctgtgttggctgcaattgagggtgatgaacaacggttgagtataatgtatcgagattttgggacaaaactcgtgggattggatagtttgggtgatgctggggaaagccttatctcccggataaaggctgctaggaagtaataccaagtctggaatgttttacccagtctctcagctgtaatagttttcagcctgagtgctgagttttatgctcagcatagttactgacctctgtaatccattcatttgattaattgcttcatatctct

SEQ ID NO: 99604 - DNA, 451 bp, Zea mays
  Clone ID: MRT4577_22353C.1
atattctgaatttacctgagcatgtcacaatgattaaggacggacattattaggtaaaaggagtgatcaagggcacaacttgcattagacttgacatctcaggtactaggatgatctttcgattctcgtggcctcgctgctattcgtagcaatacaaaccaacatggtataggaaaaattaacatcacaccaaacataatcacaaaatgcatattaatattcgcatcgtaacgagatcctcgagaaccactaaattcggagttactgtgattaagttatgattttccgaagatttaagtgtatattataaaacaaatgaggtacaagattttaaccacaggttttatggtaatacatggttactagatgatgaagaatattactagagatttatgcaattggaatgggtcaaaaagagtcaaaatgaattacttattaaataaaacaatat

SEQ ID NO: 99605 - DNA, 478 bp, Zea mays
  Clone ID: MRT4577_22354C.1
gggcccccggggccaagaaaaaaaaaaccccccaaaaaaaaaaaaaaaacccggccccacgaaaaacaaaaagaacccccaaaacaaaaaaccgggaaaacaaaccaaaaaacccaaacccagcaagggccaaaggacaaaaaggcggaaaaaaaaaaagacggaaggaccccacaagaggaacccgaccccaagacaaacaagggggcccggaaccccaaaaaaaaaaaacaagggggaggccccacgcaccggcgaaaaaaaacacggggggcaccaaaaagaaggggcccaagggtggccaaaatggggtccctccaacccccggcaaaaggcgaaaccctaaaaaaaaaggcccaacgcggggtgtttccagagaccccccccggcggacaaggggagccaaagccggaagcggcgaaaaaaggaacccccagggggcaaacccccgaacacccggttgcatacccccccaaag

SEQ ID NO: 99606 - DNA, 381 bp, Zea mays
  Clone ID: MRT4577_22355C.1
gaatattttttttgtattaaatcaaagtaccggcaattgggcataacccatgacttttattttgtaagatgtactccaatgaaagtacggttctttcctcgcggacaacaaatgggcgtgcacacatgcacagagggagatgcaaaacgaatgagaagcttttttttattttttttgctcgagagggtagttattgctagtgatcagccccgctttctctaattttcgtgcagagaacgatacgggcgacccttatggaatgatctagacatgggatcgccctctcatctcatgacacagaaacctgcgactgccctatgcgcccattcggctttatttttagagatcagcccccctttctataattttggctcgagccga

SEQ ID NO: 99607 - DNA, 928 bp, Zea mays
  Clone ID: MRT4577_22356C.1
tggcttctccattgcaaattcttgttgacgctagtgatggtgcatttgactatgggaacaagtttggtgagcctctaattcagggatataccagaacatttgggatgaggttgctaaatggggaacggcgtgaatggttgaagcctataatgttcagtggagctattgggcaaattgaccatgcacacatatcaaagggcgatccagaaattggcatgctagttgtgaagattggtggtccagcatacagaattggtatgggcggtggtgctgcctcgagtatggttagtggacagaacgatgcagaacttgatttcaatgctgtacagcgtggagatcctgagatggcacagaaattgtatcgtgtagtcagggcatgtgcagaaatgggagagagcaatcctatcatcagcattcatgatcagggcgcaggaggaaattgtaatgttgtgaaggaaataatatatcccaagggagctgaaattgatatccgttcaattgttgttggtgatcatacattgtcggtcttagagatatggggtgctgagtaccaggaacaggatgcactacttgtaaaacttgagagcagaagcctcttagaatcgctttgtgagagggaaagagttccaatggctgtcattgggaaaattgatggcagtggaaaaattgtgttgattgatagcgctgctgtggagcattccaagctgaatgacctccctcctccaacccctgttgaagaacttgagcttgaaaaggttttaggagatatgcctcagaagaccttcgagtttaggcgtgtttctcaagtcacagagcccttggacattgcacctggggtaacactactagatgctctgaagcgagtattaaggctcccatctgtgtgttcaaaacgtttcttgaccacctaagttgataggtgtgtgac

SEQ ID NO: 99608 - DNA, 397 bp, Zea mays
  Clone ID: MRT4577_22357C.1
caacggaaagggcccattttaaaaaaggcgggtccctaaaaatttggaaaaaaaccccaacaaacgggccccccttaggggtaaggcccataattttttggcgggcaccacacaacaaaagggggcgcccttgaaaattttgttaacaaaagggggccataaaacccccaacctgggtttttataacgggtaccggccacccgaaaccctccttgggaagggggtggccttttggttaaaaaaaggttggggccccccctggaagggaaaaacctgggggccctggtttggttgggggcttcaaccctggggggaaaaaaaaatatcatccaaaccgtaaaaccctttgttttgggaagggggggttcttgggcccggtttaaacctaaggctggcc

SEQ ID NO: 99609 - DNA, 297 bp, Zea mays
  Clone ID: MRT4577_22358C.1
tttgggaccgaacttcatcttcatcttgaaggtccgcacgcactcatgagtcgggcagtctaccgctttcggactcatacactacatcgtgagctctgccaagaggacgtggcccaagtgcagttttatcaggaactggcttgataccatggtggagaagtctcgcaagcagatgaaggagaggaagatcaggtcgatgaagatccgcgttgagaagaagacactggctgtggacgccaagaagaactgagcaaggcttcaccagactttacctcgatttggttaatgctcacctgc

SEQ ID NO: 99610 - DNA, 426 bp, Zea mays
  Clone ID: MRT4577_22359C.1
ccaaaaaaggggtggggccatttttttttttcccacccctgggccaaaaaaatgggggacaaagatttgggttttaactggttaatgggccccgggggtccccccggaaattcgggcccgggcccggggggggacccagttttccctataggggggcgtataaaagctgggggaaaaaagggcaaaaggtgttcccgggggaaaatggttatccgttaaaaattccaaaaaaaaaacaagccggaagaaaaaagggaaaagccgggggggccaaaggggggagctaacccaaattaatggggtgggcctaacggcccgttttccagggggaaaacctggggggccagttgaataaaaaaatcgcccaacccccggggaaagggggtttgcttattgggccccaggggggttttttttttacccagg

SEQ ID NO: 99611 - DNA, 545 bp, Zea mays
  Clone ID: MRT4577_2235C.1
attctcaggccgccgccaatgccctggccgtgctccgaagccgataggacgagaacataaagatggccggcgagggcggatcggcccgagtatgtgccactcgtgtctccggcgacgacggtacgtcgtgtgcgtcggcattgtgcggagcatcaacctgttccgagatcattagtcaacgaccagggtgaccggaccacaccctaggacggggacttgaccgactccgagcagcctgatgagagatgcacgtcacgaaccagcgtggccatagaaccctatgaacaccgcatgagatgccaaacgattcatggagaggaggagcagtgaagtgacccgtacagagagatagcaagtctgggatacctttaacgacatctctgtaccgtgggagaacacaatgactgttagccaacacaggggtgaagatacataacctgtaaatgaagagatctcgcttatggatgacatgaagatagcgtgagattgctgaagcttaccttggtagctcgatcaagaatgctgtgatcacagaccctgactac

SEQ ID NO: 99612 - DNA, 150 bp, Zea mays
  Clone ID: MRT4577_22360C.1
ttctggatcctggcgggtggggaaacttatccacgagctatgctttatttagcttatgttttcatgcattgcaaaaaagcacagaccaacccaaaggagtccgaccctggccacgcgaaatggaataagagggaggtgacgtgcttgaga

SEQ ID NO: 99613 - DNA, 294 bp, Zea mays
  Clone ID: MRT4577_22361C.1
aatggccccatccacccactcattctctcctacattccacaactctatatacctcactacccacaccctccataagaacagttatttatcctaacccaaacataatccataacactatcactacattactaactctaatccacataaaaacaataactacatcattcacattacgaatctcattaacaaaataacacacacccacttccttctacaaaaccacaacttacatccccactaattaaacacttattcttctacatcctatactaatattttaaacacccaaaaata

SEQ ID NO: 99614 - DNA, 217 bp, Zea mays
  Clone ID: MRT4577_22362C.1
tgaaccggggacgggtcctccaaccgccgctctcctcgctgcgggagaccaacaaggccacgctccgcaaggccacgcccaacgcccccttccgcctcggcggtggcgggggcggcagccccaaggatcgccgccccgccgtctacgacaaggaggacgaggacgagggacgcggcggttccgaggcacttacagggacgctgatcgcaggagcatt

SEQ ID NO: 99615 - DNA, 971 bp, Zea mays
  Clone ID: MRT4577_22363C.1
cgtgagaagatagagaacataaatgatcagtactggacattacgagctgaggagattccagaggaagagaagaatcttggcccacatgaccgtttgattcatgtttatcattttatgaaagaccctaatcagaatcagcagattcagaatttcggagatccttttttgatggttatccgtgaagttgagactgctgcagaggtactggagcgcatccaaagaaaacttagagttccggatgaggacttctccaagtggaagcttgcattcatatccatgaaccggccagagtacctccaggacactgatgttgtatcagcacgttttcagaggagagatgtatatggtgcttgggaacaataccttggcttggagcacaccgatacaacatcgaaaaggtcttacacagccaatcagaatcggcacacctatgagaagcccgtgaaaatttataattgagaaaacttaaagtttcaatcgattgacggaggcctcgacaacagtatgcccaagatgatgaggcttagaacagaaaaattggcagaggaatatagttgctgcctgtgctgaggcctatacaagcccatgaatgccacgtcaaccttcagtgttgttactgctgttgtctattggttcttctcgaggctttgcttccaagcaaccaagcatgtgtgttggttttttcatcgtgtctagtatgatggcccctgctaggatagtttgcttaatttgtagagcaaagcgagtacataaaaaaagatttttggtagggggcatgtatacaggattatagccgatactgattgctgccgcttgctgctgtgggaacaatggcagagattgtataatgggtttgttattggttcctaattttcgtgatgttgagaaatgtaagaggagaaccgcgtggatagtacagttttgagttccagcctaggctgtttgttgcaacttggcatatttggtataaa

SEQ ID NO: 99616 - DNA, 589 bp, Zea mays
  Clone ID: MRT4577_22364C.1
aattcggcatcggcctttcgcagacgccgctcttcgctcgctcaccgccgcttccttccacgggccatttcgtctccgtcgcccatgctcacctccttcaactctgtgaacccgcgatccgacgtgtagtgccgccgtactgcgcggcgacggcccaccggcgaggagccgccgacctatgcccctcggccagtccggcattggctaacccccaaatgcctcccgccgctaactagccgcagcctgtacatacacagacagacagacatacacaccgtaccggaggttgaagcggagaatcgatcccgacgcttcgccgccgctgtctcgtcgccggagaggagttttagcctcaaaggcgtgattttttgccttgttattttctagcttttttctttcgtgatttttggaccgtgttctcgcgatcgcgccggagagatgggagttgtggacttctcggtgctgggcgctctgcagaaggtcagatccttcgtcgccggcgccacgccggctgaagccgcagacggccggctgcccgcacgccgaggtcgcgcagcggggggcccttcccagagaactcgcccccgcc

SEQ ID NO: 99617 - DNA, 2374 bp, Zea mays
  Clone ID: MRT4577_22365C.1
gacaggggcacattaacgtgggttggcggtgccatggacattgctgagcatttgcggataaggttgaagaaagaacacgaagccacagcccccaagattcaggcgaagggtccacctcctgtccacactattataaagatcgctcgagacgaggacttaaaggagcaaatcggtaagaatatatattttgatctggtggaccatgaaaaagttcacagtttccgcattcagaagcagttgccttttacttcattcaaggaggaagttgcaaaggaatttggcatccctgtacagtttcagcgcttctggttgtgggctaagaggcagaaccatacataccggcccaatcgtccattgacaccccatgaggaagcacaatcagtcgggcagcttagggaagtctcaaataaggcacacaatgctgagctgaagctgtttctggaagttgaacttggaccggagttatgtccaattcgtccacctgagaagagcaaagaagacatacttcttttcttcaagctttataatgctgagaaggaagagcttcattttgttggtaggctttttgtgaatgctctgggaaagccatctgaaatattgacaaaactgaatgcaatggctggattttctccaaatgaagaaattgagctgtacgaggaaattaagtttgagccaaatgtgatgtgcgaacatattgacaagaaacttactttccgctctagtcagcttgaagacggagacattatctgtttccaaaaggctcctgttccagatggtgatgcacaagtgcgctatccagatgttccttcattcttggagtatgttcacaataggcaggttgtgcactttcggtgtctggacaaaccaaaggatgatgatttttctttggaattgtcgaagcttcatacatatgatgatgttgttgagagagttgcacatcaacttgggttggatgatccatcaaagatacggcttacgtctcacaattgttattctcagcaacctaaaccacagcctattagatataggggggtagcacatctactggatatgcttgttcattataatcagacttctgatatcttgtattatgaggttctggacattccactgccagatttgcagcgtttgaaaacgcttaaagttgcattccaccatgcaacaaaagacgaggttgttgttcatagcataagacttccaagaaacagcaccatcagtgatgtgattactgatttgaaaaccaaggttgaactatctaatcctgacgctgagctccgcttgcttgaagtattttaccacaagatttataagatctttccacctcatgagaagatagagaacataaatgatcagtactggacattacgagctgaggagatcccagaggaagagaagaatcttggcccacatgatcgattgattcatgtttatcattttatgaaagaccctaatcagaatcaacaaattcaaaatttcggagatccttttttgatggttattcgggaagttgagactgctgcagaggtaatggagcgcatccagagaaaacttagagttcctgatgatgagttctccaagtggaagcttgcattcatatccatgaaccggccagagtacctccaggacactgacgttgtatcagcacgttttcagcggagagatgtatatggtgcttgggaacaataccttggcttggagcacactgatacaacatcgaaacggtcttacacatccaatcagaatcggcacacctatgagaagcccgtaaaaatttataattgagaaaccttcatcaaagttcaatccattgtcaaaggcgtcgacaacagcatgcccaaggtgatacgacgcttcaaacagaaaaatctggtatagtatttgcctgtgctgaggcctgcaaggcgcaagcccaccaggccaccaatgctgcttccaaccttcattgttccaagcaaccaagcatgtgtttggtttttcttcgtcgtgtcgagtatgacggcccctgacagggtaggtgtttgcttagtttgtagagcaaagctagcacataagaaaaaatattttggtaggggtggggggcatgtatacaggattgtagccgatactgattgctgaatttgcgtctcttgcagctgtgggaacaatggcagagattgtataatgggtttggtataattcttcgtgctgttgagaaacgtacgaggataacccgatcagatagtagagttttgagttccagcctctatgctgtttgttgcaacttgacatccgtatgaagatagtacctgttgccatcttgtaaagaaacatcatccctctaaaatcctgcaagctgtcaaacagaaccttttgaaactaacctacccgttatacc

SEQ ID NO: 99618 - DNA, 655 bp, Zea mays
  Clone ID: MRT4577_22366C.1
cattgggtacctcgaggccggccgggatcactcatctaaagacgtgccaacgccgacgcttctctcgaccgagaccgactggatcttcaattccccattccccccaccgacctatcttcacgccggtgtctatatgcttccgaaagctccacacgagcgagatcgtaaggtaaggaggaagaagacgcagagcatctccgtacacctccgtgcagcccgccgatcccacctcgtgcaacgcttgactgcgaacttcactgccgcaagcaccgcatccagcctgatggacaagagcctggagatattaccgcgctacatcacgatgatgacttcagcaccgtcatcattcagactggagatggaaatgacggtccccgtgcaatctactatgatctagaacccagtgcgctcgatgaagagctgaccggaacagacctgcagctcttccaccctgtcacactcatacttgaaaaggcatgatgcagctaacatttcgaccaggccattacacgaccggaaagagattgttgatctgtgtcttggccggatccgctagattgctgacgactgcacccgcctccaaggattcccgtacttcagtgccgctgctgacggcaccgactctgtcctatgatgtctctccatccactgagcg

SEQ ID NO: 99619 - DNA, 188 bp, Zea mays
  Clone ID: MRT4577_22367C.1
tcatcattttcttcttcccgaaaacttttcacattccgcgaaggagctatattaaccttgcggctaaccacaccatctacaactttcctactcataaggaactttccaactagtgttccttctccctcttttacttgttttccgtactgcatttattattgggtttgacacacaatactcctctaaca

SEQ ID NO: 99620 - DNA, 311 bp, Zea mays
  Clone ID: MRT4577_22368C.1
gggggatgtgtttccttgctaacgatcttgggaagaatagagcaggcctcctgcacaagtaggggtgcatcacaaacataagataattaagacataactcatgaaactcaattgaaatgacactgtgcatatatatacagaccagacccaagctctgaagtcaatggtaccatgaacaggaaaaaacaaatcattgtttcatagcagtaggtaacacaaaatacaacaagattccgaaaaatcataaaactacaatgcaaatgtgttccagtaagtgcatgcagcaaccaaaagaatggttgcaatcgcgg

SEQ ID NO: 99621 - DNA, 345 bp, Zea mays
  Clone ID: MRT4577_2236C.1
ggggcaagaaccgcaccccgtgggcctatttttgcatataaataaacttggaactatttacacaccttctttgttttcaaacagtatgggaccattggacccacgcccgcacgcaaaaaccctacctgtgtgccaaacttttgaaccccccgggcacacccgcgatcttttgggtgtggagaaactttttggtcgccaccctgtggaggttttttaagtttctacccatggcgttccgatgctttttgcccccgtcgtccttgggattctgatgggcctggccatgcaccgaaaccctttggggcgccctcttgggtttgggtttgggtttaggtttgggggggg

SEQ ID NO: 99622 - DNA, 343 bp, Zea mays
  Clone ID: MRT4577_22370C.1
ggttcgaaacatttaatattgtttctaaattaaaccagttcgattcatgccagataatggcactggtgcaggttacactccaaaagaagccactcactagacatagggccatgactcatacataatgcatactacccaacatccagttcaagtactactacttgataatggcgacgttgaatgtctgcagtggaccttctatgcagaaacaaatgctaatggtgccggccaaatttccacatgatatgttgcatggatcttatgccttcatactctttgcacttgcaccaaactcgctagattccatctctatctggcgggtgcatctgtcgtccgtgcgcac

SEQ ID NO: 99623 - DNA, 813 bp, Zea mays
  Clone ID: MRT4577_22371C.1
actccatagggcgattgggatcctcgaggccggccggggacaacaccctctacctcgcatccccgagcggccgtcattgccaggcgcaaacccgatccgataagaaaaacaacaatgtttctgcaacgctccgccatcaccgcggctcgccgcgtcgccgcccgacctgctgtcgctcgcacctttgtcacctccgtcgctcgccttgatgccagccgccctgccacccccagcgagcaggccgctgctcttgctggcaccgccgagaagaaggttggatcctacaaggtcctgaaggagatccgaactgaggaggatctcttcggtcctggtgccgcccccggtaccgtccctaccgatctcgagcagtccaccggtcttgagcgtctggagattctcggtaagatggagggtgtcgacatcttcgacatgcgccctctcgatgccacccgcctcggaacgatgaaggaccccattatggtccgatctgctggtgaggagcagttcgctggttgcactggtttccccgccgactctcacagtgttacctggctcggcattacccgcgagcgccctatcgagcgatgccccgagtgcggcagcgtttacaagatggactacgttggtcctgaggacgatcaccaccaccaccaccctcctgagtttgaggagcccaagacctttgccgattacatcaagcctgagtaccgatacaaataaatgcattgcgccgagagacattgaggagattgggctgcagcatcaagcgaaaaactagacggtgtgatgctgccccgggaagaggatccattt

SEQ ID NO: 99624 - DNA, 369 bp, Zea mays
  Clone ID: MRT4577_22372C.1
cttgttatgggttaattggcaggcttccttcagggtgataaagtaaagggcaccggtacttaataccaagggaactcgtgaagggcttatgtaaggcctacgggacacgaatatgatacaccatagtagcccatcatccaacccattacacagacattatcgactgtttgtattacacactggtagtactaaagagaaggagtagcccatctctgaacccctacagctagaatagccacatctgtatcgtcagggggtatactactgatcaccttttttaccagtgggagcgtgctgaaaacgaccattctggtggtccgttaccagcagtgctatttgaagaaaagtactctgctctactatctgttc

SEQ ID NO: 99625 - DNA, 436 bp, Zea mays
  Clone ID: MRT4577_22373C.1
ctcgaggccggccgggatcgtttttttattgcttggtctcttatacttcaaattgatgtatattccttccggagacggcgcttcctgagagcccgtttttcgtattgattgtaatcataggtgaggaactggaaaaatgcgtgaggtagacattgtgtcggagacttcgatcactccaattaactgcgacgggattccatggacaacgacgtgtccctggaaacatacaacgagaaggtgcctactgctgatgatgtactactaccaaatcgtgcgcagcctagaccgttctcacgccgcgtgacgcgttcttgatgataactatcgtatgaccagacttcgaggacatttgcattcctgtgccaacctatcttgcgtcaggaaccaattactgatcactagataggacactttccttcaccgattattgctgata

SEQ ID NO: 99626 - DNA, 525 bp, Zea mays
  Clone ID: MRT4577_22374C.1
aagagtatcatgagtttgctttcctggagtcatcatgacgatcacgccaaccacccgactcggtcagaacttctgtcaccgcagcaacaagggaagtgcccaagaaggaagaatccaataccaattgtgacttccttggcccggatttcccctgcgctgagtgagttaccaggagtaccagggaatcgaagaagatagccgaaaagttgaaggaagcaaaggggttgagcaagcaagaagaacaggtatgtggaggatggcggtggcgaactggcgagatggagaaaagggaaggcggcaggggattaggagccaggatggaaccaccgccgtggttttccccaacgcacacggacctggctggttccttcggcttcgatcgaagtgaagccaccgcttccatgttagaaacgatttcttgctttttcctctccttcttcgatggataaacacggcgccacatgagcaaagtttaataattagattggcatatagtaaagttaaagaaagaaatagagatataac

SEQ ID NO: 99627 - DNA, 520 bp, Zea mays
  Clone ID: MRT4577_22375C.1
cagaggaccttctgaataccaatcggcatccacatctatcacaaattgggggaaatatctttacatgaaagggcttccgttggacatccataacccgcagtatatgcgacgggcatgcattacatggtacaagcaatgcccacaggtgttgtgcatcgatgaccacagaactatgctgcccttttgccatttactaaaacagttggagtgtacaatcacttgtcttggcctagggcatgaatgaaaaacatatggttgttccctaccaagactagcacacactggaaggacacactcggacaataaaggagcatcaggcctattaccgaccaaaaccattacaataccaaaactaccatgcttctgaaccccctttaccacacatactgagcttcgctaaatgattccgcacttgatgtataatggacaccactcgcatgatcagctcctttgtaataaaggggtgccaaggaatcatacctatcttgcccagcattctcccaaatcttaaacttcacta

SEQ ID NO: 99628 - DNA, 372 bp, Zea mays
  Clone ID: MRT4577_22376C.1
ccttacggggggattgtgttgattcaatgggcagaccgcatacatacggaatccacacagaccgtacatggaacacgttagaaggctgtacgcggccacatctcgaaagccttttgctctcttaactggttaagatcaaccggatgggttcttagatcacgcacccggacctgcatgctttcgtgtatagcttaacgcctgtaccagtcaccgtcgtccttagtatgttactcacacgtcgatcgggaagcacgccgtcgtgggagagctgcacacagtatacaaagccatacgcgtacggctcactaactccacttgcaggtcctggcagcctcactgcggtgtacctttgcgggattagtggcgcgcgta

SEQ ID NO: 99629 - DNA, 206 bp, Zea mays
  unsure (1)..(206): unsure at all n locations
  Clone ID: MRT4577_22377C.1
gccggacgccgccnncananagcggccgncaggaaccccagcaagcaacccagccgcccanngccggcaangcncgcagcgcnagcnncnngcgcccaacacacggcnccgaccaagaacagcaaggacggcanggcgcncgaagcagcgnacgacaacccgcacgncgccgnncgccagagcacgcccacacaagcagcagcaag

SEQ ID NO: 99630 - DNA, 1233 bp, Zea mays
  Clone ID: MRT4577_22378C.1
gcgggggagcaggcacaaagcggagctcctgcgccatcccatctctcctctcctcccgtccgtatctctctcttgctcgcactcgcggagatcgaagagaagcgcaggaggccccagcactagcgccgccccgccgccgcatcagacatggcgctggccgctcgcctcgtctcgcgctcccgtcagctatattcggttcaagccactttggggaatggaggtgtcactcaagttcgctcctttgccaaggatgcagctccagctgaccgtcctcctgtcggtggggatgatctcctgaagggcatattctttgaggtaaagaagaagtttgagacagctcttggtgttcttaaaaaggaaaagatcactattgatccagatgacccagcggcagtttctcgttatgcccaagtcatgaagactgatgcacggacttacttgaatactcttcaacagctcagaataaagagtggtcttatagatcatcttggaattgagcctttgatgatggaagctcttgagaagattgagaaggacattaagaaaccacttttgaggagcgacaagaagaacatggccaccctcttggcagagtttgacaagattaacaaaaagcttggctttcggaaggaggatcttcccaagatcgaggaagagcttgaattggaaattgccaaaagtgagctgactgaacttaagaaggaatgcgttgaagcaatggagactcaactcaagagggaggagtttcaagatgaggagatgcctgatgtcaggaaattggacatcagaaacttcctgtaggcctgatcgacgataatctttgaggcccaacgcacctctggttttggtttcaagttgatcggtgctccacacctatgaatgctgctccttccctttttgtaataaaagaaactgcacggttgggtatgagttggatttcctcttgcctttctgttgctctggactcttatggctgcagcaacaatgggatgtccctgtgttatagcatatgaactcgatacaaggcattcaggaaaatggtgatacctggtatttaacctttattttggtactcagtttggagagaaaagatccatttgttttattatgtcatttatttttgcaccttgtaaaggaatttgttctgttgtatcaaccctccctaaagacccacatcttcgattaatgaagagtaaaatataccggctgtctctaaatttatgacacatcgcc

SEQ ID NO: 99631 - DNA, 1410 bp, Zea mays
  unsure (1)..(1410): unsure at all n locations
  Clone ID: MRT4577_22379C.1
tcctgtccgtcgcccccccccccccccatcactttggaacggtacctcgaggccggccgggcctctcctcccgtccgtatctctctcttgctcgcactcgcggagatcgaagagaagcgcaggaggccccagcactagcgccgccccgccgccgcatcagacatggcgctggccgctcgcctcgtctcgcgctcccgtcagctatattcggttcaagccactttggggaatggaggtgtcactcaagttcgctcctttgccaaggatgcagctccagctgaccgtcctcctgtcagtggggatgatctcctgaagggcatattctttgaggtaaagaagaagtttgagacagctcttggtgttcttaaaaaggaaaagatcactattgatccagatgacccagcggcagtttctcgttatgcccaagtcatgaagactgtaagggaaaaggcggatcttctctctgattctcaaaggattaaatataccattgagaccttcaccaagggcatccctgatgcacggacttacttgaatactcttcaacagctcagaataaagagtggtcttatagatcatcttggaattgagcctttgatgatggaagctcttgagaagattgagaaggacattaagaaaccacttttgaggagcgacaagaagaacatggccaccctcttggcagagtttgacaagattaacaaaaagcttggctttcggaaggaggatcttcccaagatcgaggaagagcttgaattggaaattgccaaaagtgagctgactgaacttaagaaggaatgcgttgaagcaatggagactcaactcaagagggaggagtttcaagatgaggagatgcctgatgtcaggaaattggacatcagaaacttcctgtaggcctgatcgacgataatctttgaggcccaacgcacctctggttttggtttcaagttgatcggtgctccacacctatgaatgctgctgcttccctttttgtaataaaagaaactgcacggttgggtatgagttggattaaatcttgcctttctgttgctctggactcttgtggctgcagcaacaatgggatgtccttgtgttatagcatatgaactcgttacgaggcattcaggaaaatggtgatacctggtatttaacctttattttggtactcagtttggagagcaaagatccatttgttttattatgtcaaaaaaaaaaaaaaaaaaaaaaaaaaaaaaaaaaaaaaaaaaacaaccccccccccccgttttattatgtcatttatttttgccccttgtaaaggaatttgttctgttgtatcaccccccctnaaagacccacttttcgattaatgaagagtaaaatatcccggctgtctctaaatttatgacacaacgccaaccccccccccca

SEQ ID NO: 99632 - DNA, 863 bp, Zea mays
  Clone ID: MRT4577_2237C.1
atgcttggaagggggtctccaagattaaacatgcttgcaagggggtctcctagatttaacatgctcttatctaaaggtgcacaaaagaaaaaatctcctatagctactacttcaaagacacatggaggctctccaaaagggaaaacaagagcaaattggaattctatgttagagaagaccctataccctccccttgttgacttgttacatgaacacaatacacctgaatataagggtaacaatggttggacacctgatgcatggaacaagattgccaaggaatttcaagagagggaaagatatgcaggtttctcaaaagttcaaatccaagaaaaggaaaaggagttaaagagagattacaggatgttgaaagatgcgaggaaacaaagcggagtttcttgggatgagaaaaggtgtatgattcaagctgatccaccgatatgggacaacataatcaaatcatttccaagggcttttctattccgcaacaaatcttttcctttgtttgaagctttgggagagctacatgatggtaatactgctgaagggacctacaacttcacttctactcaaccaaatggtccagatctcacacaaattgggtctggagatgttcctatcaatatagaagaccgtgaagatgtgggagaccctttggcagatcacagacaaaatgaagtagaagacagagagtatgaagttgaaggggttgatgtaaatgctgataggcaggatgaaaggtcggtaaggacttttgttgtttctacgactgcacttctactcggcctaatggggccaaagaagagttccaacatagaggtattgatggagaggtacttagacattagaagcaaacaagctga

SEQ ID NO: 99633 - DNA, 198 bp, Zea mays
  unsure (1)..(198): unsure at all n locations
  Clone ID: MRT4577_22380C.1
cacgcnnccgngaccatttnaaatacatttttatttgttacacccccncagctgctgagacgtcacatggttttcaagcggataagaagcaaacaangtcaggttatagcacagaacttagtccaaactttcgtatgaacgtccatttgcgcgcatggtttatgcttctgcactggaagatgcctacggtactggttc

SEQ ID NO: 99634 - DNA, 215 bp, Zea mays
  unsure (1)..(215): unsure at all n locations
  Clone ID: MRT4577_22381C.1
atttgttcgccaaaaagtgttggtacatatggtggagaccaggctgcccacttgtgcagtgacacaactggtgacaatgatttctgtcttgtaatatctagaaagagggccagaaaggagaagaaaatgtcattgtggaagagntatggagcgcatgcatccacacctgcactttatcgaaataaaaaatatgttggccattcttcaatgcagat

SEQ ID NO: 99635 - DNA, 217 bp, Zea mays
  Clone ID: MRT4577_22382C.1
tccctccgcctccgcccccgcccactcctgtgcttgcaccactcctgtgcacctcttcccgcgccgacacaaccgccatggacgcgggctccacatgggggctaaccccgctcgggggcgccgacccggggaaatggcagcggaggccgcggcccagcggcccgacgccgcagcaagcgggggcacactgccaaggacaacacccccgggggggggg

SEQ ID NO: 99636 - DNA, 669 bp, Zea mays
  Clone ID: MRT4577_22383C.1
ccgaattcgcgcatcactcgtcatggcgtcggtgaagcggtttcgggtgacagggaaggacaagatcgtgcggtggtgcgccgggaagcaacacttgctcgccaagaagaacaccaagcgcaagaagagactctccaagatgctatttttgactgcttcaacgggggcgatgtcggtgaggccgaggcgggagaggccaagtcctgccgggccacacccggacccgagctccacggcccgagttcccgggaagcggggcacgtcggcaaaggggagggccgggtcgcggatgcagcgctcgacgaacttgacgaggaccagggacgagggccacacagaggtgcccacctcgaaggagtcgttgtcctgctcgaacatcagcaccgcgccgccgaccggaagctccaccaccggagacgctgtgaaccgcatctccgccagcggcccgtgaagacactgaagcgaagcgaccagaaaagacaaccaactgcgaaccccaggatctacagcttgatatatctgggagatgcatgccctattacatattgccaactaccttagctaaggttcctaactgtatgccattgttgagaaaaatatctctgaagggaaattatcggctttctgataatgggttggtcacaatcatctcggctgcaccttctttat

SEQ ID NO: 99637 - DNA, 399 bp, Zea mays
  unsure (1)..(399): unsure at all n locations
  Clone ID: MRT4577_22384C.1
gtttgttctttattttattttacagcgttggtaggcacgaccaagcttgtgctgactttgtttgagttcgttttatgtttcgtgcttgtactgactcagatgcattatggatggttaacggttatgttgcgctgggtgggctgggttgaagctgtgaagcgggtcctgggcttgatggtnggcgtggngtcctacgacgtagacgtggtgggggagaaggttttttttttttgcnnngngacacctgncgccgncctgcanactgtgtgcaggactggcatgatgacttcgttctgggaggctgaggccgtgacaggtgattccgtcacacctgccggtgcctccgtctggcaggttcgttgatctggtagtgcccggcnttngttgtgattgttttta

SEQ ID NO: 99638 - DNA, 1457 bp, Zea mays
  Clone ID: MRT4577_22385C.1
gtgcgtgcggtcatcactcgtcatggcgtcggtgaagcggtttcgggtgacagggaaggacaagatcgtgcggtggtgcgccgggaagcaacacttgctcgccaagaagaacaccaagcgcaagaagagactctccaagatgctatttttgactgctcgtcgaaaaagatttaatatcacgcttttttattgtttataaaaaaaggactcttactttgcggacaaagttcagagtcaacaagggagtgtataccggggagcttatatttctgttagaagtaacattgttcatcagctcatatataacgagctgaataatctctacatcggggagtaaactgctggcaaaagttcaccacctgacctcactgacgcgggcttcttcggagtatgaatacatcggattcctcgtaggcgtactcagggtcgaggtgctcccgtgccaccttctcgatgaccgggaagacagccggaacggtctcccagaacacctggtgcgcctcgggcgaccggatctggtagccgagcagcaccacgccgcgctcggcgtcggcgagcgcatccatggccgcgatgaggtgcggcacggactcctgcacgtagaccacgtctgcggcgacgacgagatcgaagcggcgcggggtggctagcgtcgcgagatgcgcggggcagttccagtggagctgggcgaggcggggcgcgcgcgcgaggtgaactcggttgcgccgcaggttgcggcggagcgccgggagcacggcggcgatgtcggtgaggacgagatcggtgaggccgaggcgggagaggccaagtcctgccggtccgcacccggacccgagctccacggcccgggttcccgggaagcggagcacgtcggcaaaggggagggccgggtcgcggatgcagcgctcgacgaacttgacgaggaccagggacgagggccacacagaggtgcccacctcgaaggagtcgttgtcctgttcgaaagtcaacaccgcgccgctgaccggaagctccaccaccggagacgccgtgaaccgcatctccgccggcggcccgtgaagacactgaagcgaagctaagggttttggacggatgcgattccgtgagcggcggtggaggagacagtgaagagcctgtccccggccggcctcgagaatagacaacccacgcgtccgcccaggatctacagcttgatatatctgggagatgcatgcctgattacatattgccaactaccttagctaaggttcctaactgtatgccattgttgagaaaaatatctctgaagggaaattatcggctttctgataatggtttggtcacaatcatctcggctgcaccttctttatgttccataaatctgtgtgagtgttctcttctcacttaaaaaaaaaaaaaaaaaaaaaaaaaaaaaaaaacaaaaaaaaaaaaaaaaaaaaacaaaaaaaaaaaaaaca

SEQ ID NO: 99639 - DNA, 490 bp, Zea mays
  Clone ID: MRT4577_22386C.1
aaaaaaaaaaaaaaaaaaaaaaaaaaaaaaaaaaaaaaaaaaaaaaaaaaaaaaaaaaaaaaaaaaaaatcaaaacaaaaaaaaaaaaaaaaaatttttattttttttcccttcgcccctaacctccttatgggcaatttttgcaaatttccttccccctgggggcctttctaccttgcttttagggggcccatttcgccttttggggagcctttttccaatcccctggccgtctttttccaacttgtaaattgggaaatccctgccttttccaaattttttcgccttgccccctttccccttttggccgtttggcttattggcaaaaggccccgcccttttcgccttttccaacattttcacttctttattggccactcacccccccctttaccattcctttaaccccggggggttttgttgtttctgccaggtgtaccttttactttgcaagcgccctttccccccgtttttttgcttttttcctttc

SEQ ID NO: 99640 - DNA, 717 bp, Zea mays
  unsure (1)..(717): unsure at all n locations
  Clone ID: MRT4577_22387C.1
cgtaaaacccccgcccgttacctcggacctcccccgagcctcggctcgggcgcaacagggagctccgcctcgcccgaactcgggcctcggcctcagcctcggcctcgggaggcctccgacctcgcccgacctcagcctcggcctcagaagaagcctccgcctcgcccgacctgggcctcggaccgactacgctacaggggatatatcattaccctaccccaagctagctgcctcaggctacgaaggaacaagaccggtgtcccatctaggttgctccggtaacaggtaatgatggttccccgcgtgcgcccatgacgtcgatggctctcagctccctacggaagcaaggaaacgtcagcaggatccatgccgcaccgccagctgcgcttctataaggatcaagcacttctccgacggccacgttagcacgtacagagggctcaagcacttctccaccggccacgttagcacatagctacacccccattgtacatctgaaccatctccttgtatctataaaaggggatgtccagngtcttcctaaggggggagaggggcgagcagaggcaggcagagtgggagaaacgcagaggaggctaactcatacaactcacctcagggccggaccctctctccctctctcgcgcgacacttgtaacccctactatgagcaccccggtgcaagataatataagcctcatcctccctcttgtatgc

SEQ ID NO: 99641 - DNA, 811 bp, Zea mays
  unsure (1)..(811): unsure at all n locations
  Clone ID: MRT4577_22388C.1
attaaatttttttgtcagaacagacaagacaagaaccacatttcagtcaagagtggcagaaaagtctgagaactcgccttcttctaatcatctgagttgaattttctgagggatcatccagtgagtcttagctataattctgctcatatctccttgcccagaaccttataccaacgggcatggcatacctttacctgcctgttttcatattcttgctgtccatggcttgttcatgccaatccgatgacaggctaacacctgcaaagccactcctgccgggcgacatgtagatctcacatggtggagtctttgctctcggcttcttctccctgacaaactcaagttcgagttcatatgtcggcatatggtacaacaacatccctgagcgcacatacgtgtggatcgccaaccgcgacaacccaatcactacagatgtgccagggacgaagctagttcttaccaacagttctgaccttgtcttgttagactccacaggccacactatctggatgacgagaagcagcatcagcgcaggagaaggtggaactgctgccgtcgtcctgctcgactcggggaacttggttatccagtcgatagatggtactgccatatgggagagctttgatcacctgaccgacaccgtcatccctggtgtaagtttatcgttgagcccgtctgatgctgctgctgctaggcgccttgttgcctgggaagggcctgatgatccatccagcggcaacttctccatgggtggcgactcaagctcagatctccagattgtcacttgggatgggacaaggncattctggcg

SEQ ID NO: 99642 - DNA, 372 bp, Zea mays
  Clone ID: MRT4577_22389C.1
ggatcagcaagcaggagtacgacgagtcgggcccctccatcgtccaccgcaaatgcttctaaacggactcagcagatgcgtacagcttggctgcatgggttaattgagaatagaaatttgcccctggcaaatgcacacacctcatgctagcctcacgaaactggaataagccttcgaaaagaaattgtccttgaagcttgtatctgatatcagcactggattgtagaacttgttgctgattttgaccttgtattgaagttaactgttccccttggtattaacgtgtcagggctgagtgttctgggatttctctagaggctggcaagaaccagttgtcttgtcttgcgggccggtcagggttggaaagtccaa

SEQ ID NO: 99643 - DNA, 317 bp, Zea mays
  Clone ID: MRT4577_2238C.1
gggaaattcccggtttttttttccatccaagccttcttacagaccccttgttttccctcccaattttgttttggccgagaacagggctttgtccccaagcaggccctttgccggcgggtttttttgttgtacaagctttttacaaccaaaataccggggcagcgtaaaaaatggttcgccctttggggccaacagggttttttcaaccttttaaacacaaaaaacaattttcatagtttggatttggatggggcgggcttgatgaaatcctttctaaaaattttgccggacccgtttttgggaatttcccccaaaaa

SEQ ID NO: 99644 - DNA, 527 bp, Zea mays
  Clone ID: MRT4577_22390C.1
gggggctaaaaacccttcggggggaaacaggggaaaaggaacaaccccggccaaaattcaaacccaacccgggaattccacacaaaaaaaaaccgggggaaaaaacccccgggaaaaacaggaaaatcccccaaaaaagggggaaaacccataggggggggctataaaaatttttaaaacaaccaatcccccccggcaaaaaaaaccggaactttccccactgggagggggggaggggatccccctccccaaaaggaagcccccccgttttaaaaaaaagggacgaagccccccttactaaaaaatggggctttaaaaaagcggtaaatggcttgggaaaaagtttttttggggccgccaaaaaacggcttggaaaaagggaaaaccccctggaaaagggcaacccggggcttaacccgtcccccgttggaaaaggcaaaaagggaaaacaagggacaaaaggggctaagaaggacacccagggaccctgtttgggaaaaaacaaaaatgggggggcaaagggggtg

SEQ ID NO: 99645 - DNA, 229 bp, Zea mays
  Clone ID: MRT4577_22391C.1
gccggccgttccgggcattgttggtaggagcgagcttgtccctcagtccctgctgtgattagcaattattttttagcccgggaacgggaaagaaggaagggtggtcagattcgttgcttagttggatctctgaattcttcttgattcttgttcattcttcatttgggacgggaggactcaggactgtgacccaagttttgtttaaaaaaaaaaaaaaaaaaggccccta

SEQ ID NO: 99646 - DNA, 543 bp, Zea mays
  Clone ID: MRT4577_22392C.1
ccctggccgatggaacccgggaccggaaagaaattaacataagggaaaaaacggaaaccagggcgccctaacgggcatccaaacaccaaaatatcggaagggggggccggggggggggggggggggcccctccaaccccctaatttgcggggaaaaaagtggggggggaagccccatgcgttgttgttaacggggccggaaagggggccggaaaggttttaaagcggccccttgccgggaacaagggcctgaacaaaaaacccaaacagggaaaacagggggggggggccgtttttgacctccttaaccttgagccccgaaaaggcctcggggtcgtcgggaaggccaagcgggtcaaaactgccgccggggaaaagggggtaaaaaacctttccaagggggccgccgggaacggggaacccctggagggcccccaagaccacaaccgggcaggcccaaagggggaggatgctctgcgcggggataaggctcgggttgccgaggaaacccaccccaccctcgttaaaaatcgggaacccggcc

SEQ ID NO: 99647 - DNA, 577 bp, Zea mays
  Clone ID: MRT4577_22393C.1
ctgcgagaccgtggcagcccggtccatgtttcgcgccgacggcgtggatgtttatcgtcgagtacttccaggacggcagcatcactgggcgagcaacttctccttcgtctatacttaagtaagttactgtcgcgccgagcccctccccttgctgccgccgacgccgacgtctacgagttcatcgcatccgacccggtctacaggccccagctcgatgtcctgctagagtctaggaagttctcgctcgccgcgatcctcgtctgtgccgtaccacctcggcggcgtcgcgctcaagtactccaaggcgccgtacggcgtcctgctgtacaccggcttcctggccatcaccgtagccgtgctggaatgcgaggagcctgaccactgccaccttatctaccatatggaccatccccctttcaacctctggttcatctactgatgggaccacaacgattcaccttacaagaagttgaccacatcgagtgatgactgttctactgaacacccaatattttgacaaattttgacgtctctctgccgagtccttcatttttctttcctatatgtctctatcagg

SEQ ID NO: 99648 - DNA, 328 bp, Zea mays
  Clone ID: MRT4577_22394C.1
cgcacactgcaccaagaaatccatcgagaggctcgtcgacaggggtattaatggcgtcgtcgtctagcatcagccaccggcggctgattctcgcagccgccgtactgctctccgtgctcgcggctgccagcgccagcgccggtacctcctgcgtgccggtgtgggccattcagtacaacccgttcccgagctgtctgtggtacttgaccagccggacctgcggcatcgggccgcgccttccgtggccggagctgaagaggctatgctgcctggagctggctgacatccctgcgtactgtcattgcacggcgctgagcatcctcatgga

SEQ ID NO: 99649 - DNA, 174 bp, Zea mays
  Clone ID: MRT4577_22395C.1
ggctgccattgcatcggcatgctatggcaaacattgctgctttcttgaacatacacaggttgtgcccttttacccacaggaggcgggaaacattactgcctctttgcaacagcaacaattggtcgccattctacgcaccccatgtggccctcatttttggcctatttacaacaa

SEQ ID NO: 99650 - DNA, 499 bp, Zea mays
  Clone ID: MRT4577_22396C.1
ttggcttggaacctttgggctgatttatgtgcttgtgcatgtctgtacggatgatgacggacttgcttattgccgttaccgtagccgttctgtctgcctccggcgatcgccgtcgtggcggctgatccggaagatgctattcgtattgtcgcctttacacaccaccgacgcgactcgacacgaccacacacgtacggcgatgggcccacgacaaccttacagatacaacccaacccaacccacgcacccgcgctaagctgcctcgcaactacgtgacgaaacacacgacccggccccttacccgcccgaaaaaaaaaagaatcccaaaaagtaaaataaatagaacgaaaaaaaagggtggttgtctcagaggacttaagtccatgcatgtgcgtacgtgatgctacagtctcctcacagcgctattcaaacctaacctatcggttgctgccccataatgctgcgatcgggaaaatttcggtgccatttaatccaactg

SEQ ID NO: 99651 - DNA, 327 bp, Zea mays
  Clone ID: MRT4577_22397C.1
aaacctaaaaccataaacaaaactcgccgatggtttttggtgggcgaggaccttgggcaaaaaaagggtttatttgcaaaaaaagccatgacaatgtcgggggacctgtttcactggaggggaaaacaagggggggagggtcatagatttttgcaacccagggtccccctcatttgaaacatttgactatttgggttcccaaaaaaaaacgaggtttttttaaacaagccggtacaattcccttgaactcccgcagccttactttttaacctcctaatactttggctccggggcctgggcgccgccaccctgagggccaaatcctgg

SEQ ID NO: 99652 - DNA, 474 bp, Zea mays
  Clone ID: MRT4577_22398C.1
cttttcttttttatatttttttctttttttttttttggttttatttttgctttctttttttcctttcttttttttcttaatgggaaactcaccctcattatttaataaacaaaaaatgttccttgtccccaacaaaaaaaaatggcgggcaccaaaatgatcaacccaacaagacggggggggaacatttccaagacgactctcatgaaatcgggaaaaacaatcaatttgaacccaaattaggtaaaagggggcccccctccctttttgggggggggcttactttgaaccgaaaaaaaacaccggcaatttaacatcccctttaatttggcagagggctaacccaaaacaattttgaacatggatcccgaattgtgtcaaataaaaccgcctttatttaccaaaaagctattttttttaccccaatttactaaaagacaaacctggaattgacgtgcaaaaaaaaagggccaa

SEQ ID NO: 99653 - DNA, 647 bp, Zea mays
  Clone ID: MRT4577_22399C.1
ccggtcgacccagcgtccgttctgctaacatttcataaaaaacttgacaagacaatagacaataaaacccttcatgagaccttttcttcatttggtaccattctctcatgtaaggtagccgtggatgaagcaggccaatccaaaggctttggttttgttcagtatgacaaagaagaagctgcgcagaacgctataaaaagtcttaacgggatgcttataaatgataagcctgtttttgttggaccttttgttcgcaagcaagaaagagatcattcttttgacaagacaaaatttaacaatgtctttgtgaaaaatttgtctgagtctaccacaaaggaagatttactcaaaatctttggtgaatatggggatattacaagtgctgttgtgatgattggtatggatggtaaatcaaggtgctttggtttcatcaattttgagaatccagatgcagcttcccgtgctgttcaggaacttaatggtaagaagataaatcttctgcccttgcaaatgctaatcctgagcagcaaagaacgatacttggtgaaaacctatacccactggttgagcaactggaaccaaaccaagctgcaaaggtcactggaatgcttttggagatgggatcagaccgagtcctccacctgctc

SEQ ID NO: 99654 - DNA, 154 bp, Zea mays
  Clone ID: MRT4577_2239C.1
tcggctcacctgagcctcccccacaaagacgagcttctatagatgcgcgaaccaactcaagccctgtcatgacagcggaagatactttgttctagaagcaaccctaatccccctagacaactgacattagttacaaaccggtaactacgcccct

SEQ ID NO: 99655 - DNA, 499 bp, Zea mays
  Clone ID: MRT4577_223C.1
tgatgtgcgacttcctggggcgccaccctctggcgcacctttatcaggacgatgatcatgtgcactaacctgacgaggctcatgtgattgagcttgccaaggaagatgttgcccggcctacttctcactgatctcatcctgaacaagcatgttgatctttggcttatcatagctccagccgcgaaagacatcgtctgacaggtagcggtaacgtgttgaaactcgactatcatcatttcaattgagtgtctcacgcgtggtaggcttgcataccgatgatgatggatatgatgaagaataggcactcgattgagcagtaactgaaaatcgctgagtgactgagatggacaaagaatcagcaggtggctatatcaacctcaaccttgctgaatgaacaagaaattggggattatctacgggctgtcatcactgatcaacataatggagtctggtaggttgttcatacactcctggtatctgcacagcaaactggacctga

SEQ ID NO: 99656 - DNA, 272 bp, Zea mays
  Clone ID: MRT4577_22400C.1
ggaaatgatactgaacatactgtgttaccagagcctgagaacttgaaagcaattcaagggtctgacaacaagcttgagacttcggaacacgtgagtgttcaaccggtttctgcacgtaatggttcaaggcaaaccaaatctgttaaaaggaaagaacgaaatgcagaggtcaaatccaagaagcgcaaaaccagttctgctgtgactgttgttcgagccttcccccgcttaactgcattgaagggtcagcttgaagtgagcatcaaacatta

SEQ ID NO: 99657 - DNA, 135 bp, Zea mays
  Clone ID: MRT4577_22401C.1
ctcattgactccagattgtataactcttcaccatgaaggcgctgatcggggcggctgctttcctggcgctcgcttctagcgccgccttcagtacaagcaagcggtatgaggctgccagaacaccaccgatttatt

SEQ ID NO: 99658 - DNA, 296 bp, Zea mays
  Clone ID: MRT4577_22402C.1
agggtatataatcctaagtttgcctttttttgtccaggcggtttccggctttggcttgtccggcgcagtttgggacggctcgttacgcaaggcgcccgagcaccaaccgaatttaaaaaaggacgaaataaatactttgaggaggagatacaacccaagtaaagatcctaaaaaagaagacgctcctgactgcggggcacaaacagaggctcataatgctccgtttctggaccccgcaaaaaaaggctcacgacaattgtgtacactggaacacacgtgcgcgactgggtttcttt

SEQ ID NO: 99659 - DNA, 535 bp, Zea mays
  Clone ID: MRT4577_22403C.1
taagttccctcgttcattcaattgagtaagaaaacttccaactaggggaaaaaagacagttataaaaacaacgcaccccccaccccaccccccaaaatagtgctcagacttgcaaataagttctttgccttaacggcaggtcaccgtagggcgcatataaaacctaacatccagtatggaaacaacattcacaagtccaaccatagtatcgaaggaacaatactgtcatgtgccagacaacctctggaaacacccgcactgagttggaaactgaagatagtttgttatggccttcaagttaggacataatgccttcggtcagtgataatgcggcaagctgactggtcgggaggtttgggttttgctggtgggccacattgcggagaacatccatcgcctcagcaaccttggacttgagagcattccagtgacctttgcagcttggtttggttccagttgctcaaccagtgggtataggttttcaccaagtatcgttctttgctgctcaggattagcatttgcaagggcagaagtc

SEQ ID NO: 99660 - DNA, 488 bp, Zea mays
  Clone ID: MRT4577_22404C.1
aagcagggctaagcatctttagttctcttttataaagaggaatcaaggaatagtaatcaaattccaaggaatggtaatgcatcaactgtttattcacacaactcctatcacctaatgcaacatataagtgataaaagttttataacaacaagggggtggcaaatgcaccggggcttgcctgggataaacactacgttagtgttgttaaatgatactcgcttggcgagcacctcccatcctggcacttggttgatttatcctctttagcttcgtccatcagcatcgtcttgtgatcaatccatctcttgtcctccataccacgtgattaattaacgtaccatagtcaatccccactcgacaccatgagattgacgatgatttttggttggggcctccaatcggatgcctagcaagcgtcacctggacctcgcttggctttcacccaacatccgggattctctcccctccaccacaaatacacggacggg

SEQ ID NO: 99661 - DNA, 1068 bp, Zea mays
  Clone ID: MRT4577_22405C.1
aacatagagatgtcgatgttgcaagcacagttttctcagatgagccctgctgtaccaatgacacccactctagcaccacgccttccaatgtactctccgatggctcctcagcaactcttctatggacaagcgccaccagctatgatgccccctcagccaggatttgctttccagcaacagcttgttccaggcatgaggcctgggggtccccatatgccaaattattatgttccggttgtccaacagggccaacagggtccacgcccaggtattaggcgtggagctggagcccagggccagcaacctgtgccaccatttcagcagcagattcttccgcgaggacggatgtaccgttacccaactggtcgcaacatgcctgaagctccggcgatgccaggggttgctggaggtatgatgcaggcatatgatatgggcggcttccctgtgagggatgctgccttatccccggctgcccaaattgggactctgacttctgcccttgcaaatgctaatcctgaacagcaaagaacgatccttggtgaaaacctatacccactggttgagcaactggaaccaaaccaagcggcaaaggtcactggaatgcttttggagatggatcagactgaggtcctccacctgcttgagtcccctgatgccctcaagtcaaaggttgctgaggcgatggatgttctccgcaatgtggcccatcagcaaaacgcaaacaccccgaccagtcagcttgctgcattatcactaaccgaaggcattatctcctaacttgaaagccataacaaactatcttcagtttgcaattgagtgatgtttccagaggttatctggcacatgacagtattgctcctttttttcttctatggttggacttgagtgctgttttcatatttgcactctgcggtgtactgccgttaaggcaaatcagttgtttgcaagtttgagtgctattgggggccgttgattacttacctgtcttttgcaccttgttggaagttttgctacttaattgaatgagtgagggaacttgtttataaaaaaaaaaaaaaaaaagcggcc

SEQ ID NO: 99662 - DNA, 563 bp, Zea mays
  Clone ID: MRT4577_22406C.1
tgcgctcaccattacaagtcttttttcataaaaacaaacccatacccagtgtcacacatcattcttttaaaaagaaacaagttttaattctctaggcagggctaagcctcattagttctttttgtaaaacaggtatcaaggaggataatcaaattccaaggaatggcaatgcatcaactgtttcatcactcaactcctatcatctaatgcaacatataagtgataaaagttttaaaacaacaaggaggtggcaaatgcaccggggcttgcctgggataaacactacgttagtgttgttaattgacgaccacttggtgagcatcttccattctgttgctggcttgatgcatccacaagattaatccaccaataccatcttatggttcgctctgatccatgtccttcagctcgcataatcatctagcgtaccatagtcaatccccactagacaccatgagattgacgatgatttttggttcgggccttcaatcggatgcctagcaagcgtcacccggacctcgcttggctttcacccaacatccgggattctccccacgcgtccg

SEQ ID NO: 99663 - DNA, 495 bp, Zea mays
  Clone ID: MRT4577_22407C.1
gcctcagcaaccttggacttgagagcataggggactcgagcaggtggaggacctcggtctgatccatctccaaaagcattccagcaacctgtgccaccatttcagcagcagattcttccgcgaggacggatgtaccgttacccaactggtcgcaacatgcctgaagctccagcgatgccaggggttgctggaggtatgattcaggcatatgatatgggaggcttccctgtgagagatgctgccttatcaccggccgctcaaattgggactctgacttctgcccttgcaaatgctaatcctgagcagcaaagaacgatacttggtgaaaacctatacccactggttgagcaactggaaccaaaccaagctgcaaaggtcactggaatgcttttggagatggatcagaccgaggtcctccacctgctcgagtcccctgatgctctcaagtccaaggttgctgaggcgatggttggtctcggccgggcttgtgggccc

SEQ ID NO: 99664 - DNA, 1301 bp, Zea mays
  Clone ID: MRT4577_22408C.1
aattctctaggcggggataagcctcattagttctttttgtaaaacaggtatcaaggaggataatcaaattccaaggaatggcaatgcatcaattgtttcatcactcaactcctatcacctaatgcaacatataagtgataaaagttttataacaacacggaggtggcaaatgcactggggcttgcctgggataaacactatgttagtgttgttaattgacgaccacttggtaagtatcttccattctggtgctggcttgatgcatccacaagattaatcctccaataccatctcatggttcgctctgatccatgtccttcagctcgcataatcatctagcgtacctgggataaacactaggttagtgttgttaattgacgaccacttggtgagcatcttccattctgttgctggcttgatgcatccacaagattaatccaccaataccatcttatggttcgctctgatccatgtccttcagctcgcataatcatctagcgtaccacgactaaactcgacacggcatccgcgaacatggcgatagtttcggttcagtctttctatttgacacctagcaagcgtcacgcgtcttcgacagagggcggggtttgacgacactgcatccgggctgcccaaaaatcacggagccgacgacgtgctgttcgaccaccaccgaggcgttgttgctgacttcaagtgaggagaggccgcggccatgggagtagggctggcgttgggaggtaggagacgggtggcctgacggcaccatggctgggggtaggggcgaccagcgtgcaggaaacaggtgctgcggcggccatggaaagaaactcggccaggggctcagcgggagcacctgggaaggggcctggacgagcagaatcttggagctcgcgtccatggcagaggaagggaaggggaggagacgccatggctacctaggcgtcgagaggagcagaggcaccacgagctgggaacgagagggtaccggagggaaagcaggaggccagatccgaccgcggctaggagagcacgccggcgaggcttggtggaggtgaaacggtgttgaggccgatcccagtgagcgctgaccaccagcgaacagaggcccgacgtcgagattggccggcacgagctgggagagggcgcctgtgccagaacaggatgaggaccagagggcgcatccatgcgagcaggaggcttggtggcttgcagttggaggcgatggcggatgtgtgatgaacgttgagcacgtgagaggcagaggtaagctaccgaccccggccggcctcgaggtaccc

SEQ ID NO: 99665 - DNA, 2546 bp, Zea mays
  Clone ID: MRT4577_22409C.1
actagaaccccccctctcgtcgagagagtcgtccccccgcgtgctctccgcctgcggcctctgtatcccgcaaccaaaaactaccccccaaaaaaagaagaaaaccccaaatcctcgagatctatcagtatcgagcgacttaccaatccgattgctagggtttagtttcgaaaaaatctgaaaaaaaattctggtcgaggggaggaggcgatgtcggcgcaagtggcggtggtgcctaatgggggcccgggcgctgtccccgcggtggtgtcgccgggagctgtcggcgtggctcagcctctcccgaccacgtcgctctacgtgggcgacctggagggggccgtctcggactcgcagctgtacgaactcttcagccaggcggggcaggtggtgtcggtgcgcgtctgcagggatgtcacctcgcgccgctcgctcggatacgcctacgtcaactacagcaatcccttggatgctgcgagagcattggaagtgctgaactttgctgctcttaacaacaagcctatccgggtgatgtattcaaaccgtgatccaagcagccgcaggagtggatctgctaacattttcataaaaaatcttgacaagacaatagacaataaaacccttcatgagaccttttcttcatttggtaccattctctcgtgtaaggtagctgtggatgaagcaggccaatccaaaggctttggttttgttcagtatgacaaagaagaagctgcgcagaacgctataaaaagtcttaacgggatgcttataaatgataagcctgtttttgttggaccttttgttcgcaagcaagaaagagatcattcttttgacaagacaaaatttaacaatgtctttgtgaaaaatttgtctgagtctaccacaaaggaagatttactcaaaatctttggtgaatatggggatattacaagtgctgttgtgatgattggtatggatggtaaatcaaggtgctttggtttcatcaattttgagaatccagatgcagcttcccgtgctgttcaggaacttaatggtaagaagataaatgacaaagagtggtatgttggaagagctcagaagaagtcagaaagagagatggatctaaaaaggagatttgagcaaagcttgaaagatgctgctgacaaatatcaaggactgaacttatacctcaagaacttggatgatagcattggagatgatcaactttgtgaattgttctctaactttggcaaaattacttcgtacaaggtgatgcgtgaccaaaatggtcttagcaaaggctctggatttgttgctttctcaactcgtgaggaagcatctcaggctttaactgaaatgaatggcaaaatgatatctggaaaaccattgtatgttgcatttgcacagcgcaaagaagatagaaaagcgatgttgcaggcacagttttctcagatgcgccctgctgtaccaatgacacccactctagccccacgccttccaatgtactctccgatggctcctcagcaactcttctatggacaagcgccaccagctatgatgccccctcagccaggatttgctttccagcaacagcttgttccaggcatgaggcctgggggtccccatatgccaaactattatgttccggttgtccaacagggccaacagggtccacgcccaggtattaggcgtggagctggagcccagggccagcaacctgtgccaccatttcagcagcagattcttccgcgaggacggatgtaccgttacccaactggtcgcaacatgcctgaagctccagcgatgccaggggttgctggaggtatgattcaggcatatgatatgggaggcttccctgtgagagatgctgccttatcaccggccgctcaaattgggactctgacttctgcccttgcaaatgctaatcctgagcagcaaagaacgatacttggtgaaaacctatacccactggttgagcaactggaaccaaaccaagctgcaaaggtcactggaatgcttttggagatggatcagaccgaggtcctccacctgctcgagtcccctgatgctctcaagtccaaggttgctgaggcgatggatgttctccgcaatgtggcccaccagcaaaacccaaacctcccgaccagtcagcttgccgcattatcactgaccgaaggcattatgtcctaacttgaaggccataacaaactatcttcagtttccaactcagtgcgggtgtttccagaggttgtctggcacatgacagtattgttccttcgatactatggttggacttgtgaatgttgtttccatactggatgttaggttttatatgcgccctacggtgacctgccgttaaggcaaagaacttatttgcaagtctgagcactattttggggggtggggtgggggggtgcgttgtttttataactgtcttttttcccctagttggaagttttcttactcaattgaatgaacgagggaacttattgcatactatcaaatgttttgtgatatggtgttgagtaattatcaacaccttggattttaaaaaaaaaaaaaaaaaa

SEQ ID NO: 99666 - DNA, 1001 bp, Zea mays
  Clone ID: MRT4577_2240C.1
aatccacgtgcttcagctgggctttcggggttacatcaatatttcccttcctccacttcacatcctgttcgtgactcgtgatttcgccgccggaaagccgagggagagggagcgagatggggttcgtcggcgacacgatggagtcaatccgctccatgcagatccgccaattgctcacgcagatcatcagcctcggtatgattgttacctctgcattaatcatatggaaggggttgatagttttcacagggagcgagtcaccagttgtagtggttctctctggtagcatggaacctggatttaaaaggggtgatatcctgtttttgcatatgagcaaagatcctattcgcacaggagaaatagttgttttcaatatcgatggccgtgaaattccaattgtccaccgcgtaattaaggtccatgaacgtccggacactgcagaagtggacatcctcaccaaaggtgacaataattttggggatgaccgactattatatgcacatgggcagctttggctccagcaacatcacattatgggacgtgctgtgggctaccttccatatgttggctggattacaattatcatgactgagaaaccatttattaagtacctgctgattggtgcactgggcttgctggtcataacgtcgaaagattagagtgtcaaacttcgcgcagtatagattttgctcttatggtgcaacatcagaggttagtggctttgctgcgttaagagaagccgttctgttgcaccatggatcaaacgagaatatttgtttatagactgtgagagcacctgcccactaattagatagtcggttctcatccagcatccatcttttggtatttttagcctagctaatgagttgaaccagttcgttgttctatttgatgatcactattcattgcagctttccaggaaaccccctaggctagctatttgcaatgaaaaaatctgcgcaccaggacaaatttgggatagacgattgttgcttttgttt

SEQ ID NO: 99667 - DNA, 2674 bp, Zea mays
  Clone ID: MRT4577_22411C.1
ggccgggccggactgactctcggcaacggatatctcggctctcgcatcgatgaagaacgtagcaaaatgcgatacctggtgtgaattgcagaatcccgcgaaccatcgagtttttgaacgcaagttgcgcccgaagccttctggcggagggcacgtctgcctgggcgtcacgccctcgttgagagagtcgtcccctccgcgtgctctccgcctgcggcatctgtatcccacaacgaaaaactaccccccaaaaaaagaagaaaaccccaaatcctcgagatctatcagtatcgagcgacttaccaatccgattgctagggtttagtttcgaaaaagaaactctgaaaaaaaattctggtcgaggggaggagacgatggcagcgcaagtggcggcggtggtggtgccgaatgggagcccgggcgctgtccccgcggtggtgtcgccgggagcggtcggcgtcggactcggcgtggcgcagccgctcccgaccacgtcgctctacgtcggcgacctggaggggtccgtctcggactcgcagctgtacgagctcttcagccaggcggggcaggtggtgtcggtgcgcgtctgcagggacgtcacctcgcgccgctcgctcggatacgcctacgtcaacttcaacaaccccttggatgctgcaagggcattggaagtgctgaactttgctcctcttaacaacaaacctatccgggtgatgtattcaaaccgtgatccaagtagccgcaggagtggatctgctaacattttcataaagaatcttgacaagatgatagacaataaatcccttcatgagaccttttcttcatttggtaccattctctcatgtaaggtagccatggatgaaggaggccaatccaaaggctttggttttgttcagtatgaaaaagaagaagcagcacagaacgctataaaaagtcttaacggaatgcttataaatgataaacctgtttttgttggaccttttcttcgcaagcaagaaagggatcactcttttgacaagacaaaatttaacaatgtcttcgtgaaaaacttgtctgagtctaccacaaaagaagatttactcaaaatctttggtgaatatgggaatattacaagtgctgttgtgatgattggcatggatggtaaatcaaggtgctttggtttcatcaattttgagaatccagatgcagcttcccgtgctgttcaggaacttaatggtaagaagataaatgacaaagagtggtatgttggaagagctcagaagaagtcagaaagagagatggaactaaaaaggagatttgagcagatcttgaaagatgctgctgacaaatatcaaggactgaacttatatctcaagaacttggatgatagcattggagatgatcaacttcgtgaattgttctcaaattttggcaaaattacttcatgcaaggtgatgcgtgatcaaaatggtcttagcaaaggctctggatttgttgctttctcaactcgtgaggaagcatctcaggctttaactgaaatgaatggcaaaatgatatctggaaaaccattgtatgttgcatttgcgcagcgcaaagaagatagaaaagcgatgttgcaggcacagttttctcagatgcgccctgctgtaccaatgacacccactctagccccgcgccttccaatgtaccctcctatggctcctcagcaactcttctatggacaagcgccacctgctatgataccccctcagccaggatttggtttccagcaacaacttgttccaggcatgaggcctgggggtcctcatatgccaaattattttgttccagttgtccaacaccaacagggccaacagggtccacgcccaggtattaggcgtggagctggagcccagggtcagcaacctgtgccaccatttcagcagcagattgttccaagaggacggatgtaccgttacccaactggtcgcaacatgcctgaagctccggcgatgccaggggttgctggaggtatgatgcaggcatacgatatgggcggcttccctgtgagggatgctgccttatccccggctgcccaaattgggactctgacttctgcccttgcaaatgctaatcctgaacagcaaagaacgatccttggtgaaaacctatacccactggttgagcaactggaaccaaaccaagcggcaaaggtcactggaatgcttttggagatggatcagactgaggtcctccacctgcttgagtcccctgatgccctcaagtcaaaggttgctgaggcgatggatgttctccacaatgtggcccatcagcaaaacgcaaacaccccgaccagtcagcttgctgcattatcactaaccgaaggcattatctcctaacttgaaagccataacaaactatcttcagtttgcaattgagtgatgtttccagaggttatctggcacatgacagtattgctccttttttttcttctatggttggacttgagtgctgttttcgtatttgcactctgcggtgtactgccgttaaggcaaatcagttgtttgcaagtttgagtgctattgggggccgttgattacatacctgtcttttgcaccttgtcggaagttttgctacttaattgaatgagtgagggaacttgtttgcactgttttgtgatctggtgtggagtaattattcaacaccttggatttta

SEQ ID NO: 99668 - DNA, 338 bp, Zea mays
  Clone ID: MRT4577_22412C.1
aaactgttaatttatttctgtttttttacatcattttagtttactgacaatcctactacgaccggcagtcctacttagctgggggctacttctacaagctgatattttggcccattcttaatattcactaattaattgtcaagttacacctaagggtggtttcttctcatggttgtagtaatgcttagttgtcaataatctcttgttggcagttcttgtgttttgtcttattgcttgtagttaatgagtcctttttagcttcaagatcaatctaaatttttcttgccaactttcttttgcttgtcttgaataagttacgttttcagggtcaaagacaa

SEQ ID NO: 99669 - DNA, 546 bp, Zea mays
  Clone ID: MRT4577_22413C.1
attgccccagcctcacaaaataggggtttggcagcatggacggcgacgccaggcggcggctcctctcccgccgcacctcctcgagctccctatccgaactcctacgtctaggggctggacccagagcaagagctggggttgcaacggggtgaagtctgggcagactacagccaaggattcgaacgcgggatgatgcgtggggctgggggtgacggttacgtttagaaaaggttagacgcgggaggggaccaagcgcccatgaccaccaaggaggtggctctgaaacaagggtgcgagtacgaaaattgtctcattgcaatggacaagcccggaggtgagggcgctagcaagcaacagaagattgactggtacatccagaccctggccaagggccttggaaaccacgaggaggcaaagaagaagatctacaacatctagagcgaacgctacatcatgttggggtgccagaacgatgaagagacatgtaacaaggtcgaagtactccctgaggctctcatagtgctcacgcattagtatgaagatgct

SEQ ID NO: 99670 - DNA, 122 bp, Zea mays
  Clone ID: MRT4577_22414C.1
acctactgctagagttacataactcacccaatagaacaattctatgcccggtgattataagcgacctgaaagtaggaagaagcactaactgaagacagaaactacgaagtaggtgattggat

SEQ ID NO: 99671 - DNA, 528 bp, Zea mays
  Clone ID: MRT4577_22415C.1
attgggtccctcgaggccggccggggcaattcttttgctcttactcgtgctgaaactgaactgctcatccgctttgcatgcagtggccgtaatccctgcgtgctgatcctcgacgaatatcccgtgttacgtcaacgcatctcgtctaccattctctaccacaccaagaaggacccccctcttgggttactgagacggcccggctcgctctcgctctcattctcaccacatgatgcatactatcgcccggagtgcgtgctaaggagcagaatcgcatttctgacagctatcacaccaacaatgacctaatgagaatttcggcttgccaacctcggatgtctggctagtttcaacgcttgattgttgttggttggaatggataataagcttatgctggaacatatgatacagtgcttcgcactactatgacatcacgccgccttataggacgatatgtcctgttacggtgttgactgggcttgcactgatctagcaccaggtgcttgtgcctaagtatcgcactgggat

SEQ ID NO: 99672 - DNA, 173 bp, Zea mays
  Clone ID: MRT4577_22416C.1
gtcccgcagaaagagaaagacaacgccgccgctcgctaacgacgttccccggcgacctcctccaacgatgaccgttgatccagctatggatcacttggacgaacatgcacgtgctgccatgaatgtcggggtcagcttcagcatggccccaccacactcagaaagacgaggtc

SEQ ID NO: 99673 - DNA, 374 bp, Zea mays
  Clone ID: MRT4577_22417C.1
ggaagcaaaattccaggggcttattattaaaaggccccaaccccccataatcagagcccttataaatcccccaggacaaaaccgccccccaaaaaggaaaaaaacattttttttcccacccaaaccacgggggggcaacccgaaaaacccccggggggagaccttaaaacatgggggggggggattcaggttttattcacaaaagcggggaaaccacccccatttcaattgagaaaccgccccgggtttggcatctgcaaaagggggcacaatcctaatgccaaaaccggccatgcggacccccccataaaagggcaaaaaaagggggaatccccccccaaaaaaggccacttgtccccttttcaccccaggga

SEQ ID NO: 99674 - DNA, 120 bp, Zea mays
  Clone ID: MRT4577_22418C.1
cccacgcgtgcggctacgtatacgtagaaacaggggctggcagcatattgatattaagcgaatgctagaaggggcaggtttagtggacgaatcaaaggtcaaccctgggaggcaagaaaa

SEQ ID NO: 99675 - DNA, 666 bp, Zea mays
  Clone ID: MRT4577_22419C.1
ccggccgggaaagcctcagtccaatccgcggcccaaaaactccccccgacaaccgaacaggagcggcggcggcggcggcactaccctctccagcaatcggcatgggcacgcgggaggtgtacgaggagaagctccgcagcggtgcgcacctccaccgcgatcccaccatcaacccaggcctcggctcgccccggtgcccgcgatgcctctccctcctcaaccccaccgcgggaaagagggactgggccatcacctccgtcctgcacgacgccactgccgtggctggttccggtgccggcgctttgctcagtgctgtgcacgggtttaacacagggatcccttttgtccagaagcatgtcaaggggccgaagtggctgcagttgctcgttggggtgccaccactgctgatattctcagtatgctgtttcacatatcacacggcagatcgaaagagctcattttccagaatcagcccaggaatctgagtgagttggttggcattcagtctgttctattgggggtgcaatgtacatggtatagaaggacgtttagtgctgcttttgccgtgttgcagtacagtattagttttactgtgtttcagacagcacgcagtgaataaaattatattgtctttggtccaaaaaaaaaaaaaaaaaatttgcggcc

SEQ ID NO: 99676 - DNA, 830 bp, Zea mays
  Clone ID: MRT4577_2241C.1
ggccggccgggagtccacatccttctcacccacccaccagcctctccgtcacgcgatgcttctaggaggatctccaccttttcaggctcccatccgtcacccatggccgcacatgttcaccgctctgcctccgccgccagcagctccgactctatgccccgtgcccgccgccaccagcttcactcccggtgctccgtggcttcgccttggcgtgggtcggccgtgcccgcagcttcgctgcccctgtagaatcggtgcacagccgcgcctacagagcggcacaacgctccacacatagcttatgtcgactgcctcggcgcgtgctgcgcgggtccgcgcccggcttcgctttggaacgcaccgagctatgcctgcagcccgacaccccctctagcacaggctcacaggaatacaggattatctctgacctcgtctccctgttgtacgtcatatttgtccctaattagcatgttctccgaagaccatccttccagtgaagttctttccaggaaacagttagctccctcccgattgtccttcatatatacttcataaacatcattgcattcacttttttataacaggattagtcattttgtgtcttcaacattatgaagcaatgcctttcttttccctctaaggtgttgtctgtggcattaaaatctctactcaagtcacttacagtaccatgtacagttggttctttagtagtaggtaaatcctccccaagactcattaatctggcaatgacacttggatgtcttctcttcgatactttgactctgcttctttagacatctccttctctaaagaatgattaatggatggga

SEQ ID NO: 99677 - DNA, 953 bp, Zea mays
  Clone ID: MRT4577_22420C.1
tcgccgcggaccggccggaattctggtttgcccacgcgcctcccctagatcgcgagcggcgcccgctttatatatatctaaattatagttatcatgatctcaaagaacggggctaagtgaaaaaaaaacatttccaaccgcgcttttgtttttttttttttagaccaagacaatataatttttattcactgcgtgctgtctgaaacacagtaaaactaatactgtactgcaacacggcaaaagcagcactaaacgtccttctataccatgtacattgcacccccaatagaacagactgaatgccaaccaactcactcagattcctgggctgattctggaaaatgagctctttcgatctgccgtgtgatctgtgaaacagcatactgcgagccagttgatgccgcgtagtaagacgtcactgtgagctgaacaaaccttggaagtgcatatgcaccaaatacagcactggcacctgagaatatcagcagtggtggcaccccaacgagcaactgcagccacttcggccccttgacatgcttctggacaaaagggatccctgtgttaaacccgtgcacagcactgagcaaagcgccggcaccggaaccagccacggcagtggcgtcgtgcaggacggaggtgatggcccagtccctctttcccgcggtggggttgaggagggagaggcatcgcgggcaccggggcgagccgaggcctgggttgatggtgggatcgcggtggaggtgcgcaccgctgcggagcttctcctcgtacacctcccgcgtgcccatgccgattgctggagagggtagtgccgccgccgccgctcctgttcggttgtcgggggaagtttttgggccgcggattggactgaggcttgcgggcgggctgcatatgagccggctctacttgtagggagagattgtgccgcatgtcccgcgctacctcccggccgg

SEQ ID NO: 99678 - DNA, 406 bp, Zea mays
  Clone ID: MRT4577_22421C.1
ggtccctgcattctcgtgcgcgcaccactgtgatgcctgagcggggcctgttctctcatgcgtataagaagtactcatcacttgtggagccgcttaatgaagcacaagtttggtttgggtgttcaacaagccttgttgatgcagctacacttggtttgcgtgatgattatactattatcaagcacccaatggatcttggcacaataaggaggctggtgacccgctggctgaccatgaaccctcacgagttagctgaggatgtgcgcattactagccataacgggaggacatataatcccacgggtcctgttgtacattttatggtgaaacaaaagttatgaatctttgacgcacagtggatctgagaattgaggctgacgttaactacctattattatgttctcca

SEQ ID NO: 99679 - DNA, 181 bp, Zea mays
  Clone ID: MRT4577_22422C.1
attcattgggatcgacttctctataaaggtcaaattccacgttctaaaagataagataaaaattacacattttgcaactatatagcgcaaatataacgcgagcttggtaccattggacacgagttttaactgtaagcgcatcaaggtcataggcaatggggtataatgctataaacaggca

SEQ ID NO: 99680 - DNA, 556 bp, Zea mays
  Clone ID: MRT4577_22423C.1
agaagcttttcaaagagtcgtaggagacctctgctctactattgcgtctcaagaatctctgcccgcgcccactcgatgtgatatttgcaccccttcggagatactccaggcgggcatattccttgtactagccccagccccaggcagatggagactattccagattatggcaccaaacagacgatcccgtgcgacgtcacgagatcgcttagcctcctcatggcatgactttctctacgatccggtgccttcatgttcgaattctagatgactctctgagcttccaatggagaactaggagctatcctctaagctgacgtcgatgatcctttacgacctcttatttttgactgtccgggaccacgctagagaacgccacgatgagttccctcgacctgatctgctcgcggagcgcgtgacacgacctgcatctcactgcctgtattgcctcctcatatatgaggagcacctgtctgctcatatccatcctagtggctcaagtgctagcttgccaatgacccttgagctctgcagcttctgctctagctcgatgtag

SEQ ID NO: 99681 - DNA, 608 bp, Zea mays
  Clone ID: MRT4577_22424C.1
ggggccaaggattttttttagcaattaaaaacttgttaaaacccccccaacccccaaggacccaaaagggggggccccctcacggccttggaaggagccaaaaaaaaacgggggtccaaccaacctacccctaaaggaaaaaaaaaagctgcaagcagggcccattggccccccaaaaccccaaagggggcagctaaattatgggggggttcagccggggaaatttttcctatggcaggcaggagggggggaaatttcggatctaaggggctaagggccctgtcctttttcccacggggggaaacaggaccaacagcataagtctactacagggggggggcccccccgggggacggccaggccacggaaagggggcttggaacgtcgggccccccctccttccaggggggggaccccaacaagtagttggaatccacaaaccccgggttgccggaccctgggagggggattttgaatcccaggttttggtgtttcccggaaaacgcaaatttgttgggggtccccgggacatccaccccgaacgggcgggaaatcggggggtggaaccccggcctggatttgctgccaaccttgcccaccacccgggg

SEQ ID NO: 99682 - DNA, 453 bp, Zea mays
  unsure (1)..(453): unsure at all n locations
  Clone ID: MRT4577_22425C.1
tgccccgaccccgacctctgctctctggttgccggttgtgctaaacttctccatctagtctgtactggatttgcagtcaatgctactgggatggccaaccaactacaactaggaaataggttgccctgggcaaactattcaactaaactaatcgcgactcaccactagtcggctagttgttgctcaggtgactagacttgatttatgatttggaaacactagtagctgcttatcttttatttacgctagttatcctcaaaagaccaccaaatgttattatacacattcgtagcaatcgtataaggttatattatgctacagtgaacgatgtgccaaaaaatggataagcgtgttcatttaaattctaagagagccattttatgtccttgctggatacaacaacattttgatttactgtctngcatncgaagggtgcattccaagcctatatct

SEQ ID NO: 99683 - DNA, 1001 bp, Zea mays
  Clone ID: MRT4577_22426C.1
ggccgcgggttttttttttttttttttaaaactcgggtgtcattcatcaaggtatcaatttccatatccctgtcatgaatccctgtcatgagtaaaacgccgagcagccaatgcaaatttttttgaatccattaggtcctattgaccgatccttaaaagccttttttatcacaatcccttagttcatctggcggacgagagcgttgatggcgtgctcgcggttaccaaggtcaccaccctcgatgaagtgcttgaacttgcggggacggaagccaccagtggggttggagagcttgaagggccagaggaagttggaggcctgcttgaagttggggccgacagtgtagatctcgtggatgagatcctcaacacagacgataccgtacttgccgaggttctcctcaacaatggagttgtcggtaagagcagtgcgctgcttgttgacctttccgtaaccacgcttgtagacgagctccttgacggtcttcaggttggggtaaccataggcgatccagggctcgacaaccttgagcatctcagtgatggccttggtgaccttgacgaagacaccgttgttgatctggaggagacggagaagctggaggatcttgcggggcttggggggcatcttgttgatacccttgatacggacgacgaagatcaggttggcctcagcggggacgtaggcagagtcctcagacttggcaacgcggtgaagacggatcttctcacgctcagcatcgcggtactcttggacgtacttctcagcacgcttgaagatgacctgacgcttctccttgttggcagccttcttcttctcaacggcgtcgctgcgctcagcgcgggccttctcctgagacttgcgcttcttgagaagggtctcggggaccaggatctggtcgttggtaggaacggtagcacccattttgtcggcgacggctgttggaagagtcggttagtggttcccggccggcctcgaggaacccaatcgcccataggag

SEQ ID NO: 99684 - DNA, 136 bp, Zea mays
  Clone ID: MRT4577_22427C.1
acgcctctatgtgcaacagtagtagagaaggcattaatacttgttgctcacaatgcctaggttgtgttctttagtccagacaagaaaacatgttaatccgcagctgattaagagcttcaactcttgcaactactct

SEQ ID NO: 99685 - DNA, 723 bp, Zea mays
  Clone ID: MRT4577_22428C.1
gaggcgggcgcaagaagcagatgcagcatttccccccctgtaatttgttgctgacaaggctggcgtatttggggtcgggctgcatgccccaaatgagaagctacaggagacgattgttcctagcgccaagtcttaccccttgggagcactaatggatgactgcaagagttacttccttgaaactgggcgcagggtatccttcgagtacactctgctagctgggattaacgatgaaaaggagcatgccgaagagctagctgaactacttcgtatgtgtggaggtggttaccatgtgaacctgattccctataacccaattgaaggctccgagtacaagagaccttacagaaaagtggttcaagcatttgtggatgctttagaagctcggaagataaccgtcagcgttcgacagacccgtgggcttgatgctaacgcagcctgtgggcagctgagaaatgagttccagaagaatccactgcttgcaattgaagcgtgaccctccacagagctcagcccaccatcgtagcttcttaatgagaatacctatgaggtcgacgcagccaattcaagcatacaaaatcgccgtttaactgctggggaacaatataggtgttgtaaagtgacagcaaggtatgcataccgctagagaattttggaacattctgcgcgtgcccatctgatatcatgagctgcaattaccatgcttgtctcagatattattat

SEQ ID NO: 99686 - DNA, 705 bp, Zea mays
  unsure (1)..(705): unsure at all n locations
  Clone ID: MRT4577_22429C.1
gacacgcgctcggcgccggcgggtggacggtcgaggcgttccctggccgacgacgctcgagaggcctcagagggtgcggggacgttccaggggctgcaggaggggaagtgcgagggcggggtgagcaccgggagcggcgggagcgcggggggggacgcggacccgctgctgtacggggggggccccgcgggagtggatagcggcgtggagtcctacttccccgggggggaggggcactaccacgactgcgggacgatggggcccgtgaatcatggggccggaggaggcgtccagtcggacgacgacggggccggcagggacgaggggtgcanctactacgccgacgaagccggcggcggcgccgccgcgttcttcggcggacacgccacccaccaccacgcggacgaggacgaggacgccggccagatcagctggtggatgtggaactagacgttcgatcttcccacgccgatcgatcgaccgtcttcgaatgctgtgtcaacaagaagaaaaaagagtcgtgccgtgatttttctttgcgcaacgctggtgggagcctgtaagggtgaatttctagctatgggtatgccgttatgaaggaagaagggtatgcatgcatgggaggggaaagaggggtaattaatatcggtgatcatcccagtgactcgggggtggtccagaagatcaaggggggggggggaggag

SEQ ID NO: 99687 - DNA, 442 bp, Zea mays
  Clone ID: MRT4577_2242C.1
gtcatcgtcgcatttactcgccgttctttcgtagactcgttcatcgcttcgtcctctggtccttccaaaattccaaatcccattctccctgctcgtgcagttgagcagtccatcaaccggcactccagcttctctagcatcaagcgtgcgagctactgctttcagactgtatagccatcttagcagttacaatattccttcattcttttgttcatggtctcatctttatatgtctttttttctttttttttttttttttttttttttattctttttttttatatttttttttttttatttttttttatatttattttattttttttttctatttatctattttttttattttttttaattttttttttttttttatttttttatattttatattatttattatttttatttttttattattttttattattatttatttttt

SEQ ID NO: 99688 - DNA, 193 bp, Zea mays
  Clone ID: MRT4577_22430C.1
ggagcgacaggagccgtggcatacggtgaagacatggccacgtcgaagagccacatcacacacaaccagtcacgacaatggaagagagatggtatcaagatacaccgatcacatagatacgaatctcttgatgggatggacccaacttcctaaggagtatgcgctttgtcaagaggcacgacaagaagggcct

SEQ ID NO: 99689 - DNA, 265 bp, Zea mays
  Clone ID: MRT4577_22431C.1
gcgatctagaacgtaagatagcgagagagtgaactgatgtgacaaagagcgaaaggggggcacatagtaggtgacatctataggagccactcatgctcgaccatagcctaggatacacacatcgtattgtgagacacatcattgggaacgaggaattcgctgaagcacttgtgtagaactggggtagaagtcaactcgatagtgtaacgagacggtgccttgcggtatcaatacaaggtggagctgatcatgaagaggatcatga

SEQ ID NO: 99690 - DNA, 329 bp, Zea mays
  Clone ID: MRT4577_22432C.1
gcttgactcaaggcatgacaagctggtggagtgtatgagaaagggggagagaactgtagatgtcgaagatctcactccaccagcacatcccctcttgtcccccggatacaagaccgaaacaggtgctcaacatcgcttgatcggccatcgagaactacatggtacacatccacgactgccgccataaccaagaccatgtgaaccttatcgacgaccaccatgcctagatcaaggacatactcttcaatacccgagataacgtcctggaactgattgactcccacctactgccttactataccactgctctatccatggagctctacctc

SEQ ID NO: 99691 - DNA, 374 bp, Zea mays
  Clone ID: MRT4577_22433C.1
cccacgcgtccgaatcaacccttagtggtccgaaaggtggtccggtggcctggccgccacggccagcatggtgcccggtgcggcctcggtcagcgcgaggcgcagccccggcgcggcgcgggcgtggctgcccggccacggcacgagcgcgtatgcggcggcccagccctggcgcggcggcccccgtccccaacggcgcgaggcgtgttgccccctccgtctgcgcgcgagcgtactgctccggcagcgcggtcccggccaggcgcggttgcgcggcctggcgcggccctgacggctacggttctggcgccgcttcccgtggcgcgggagtcacccgacccagcggatctggcacggactcaactgtccggcac

SEQ ID NO: 99692 - DNA, 544 bp, Zea mays
  Clone ID: MRT4577_22434C.1
cactcatgggaatctttttacatgacacaatttaagctttctatattcaagagattagttttctagggaaatatctctttatggtttcagtttttgtggttttacacatcccttaaccagaatgatttagaaatttggttgtagtttctagagaaaattctctctatagccagctttcctttttgagtcatggtttatcattaaaattttacttcacacaatggaaacctagagactaacatcaacactaagggaccaacggaaagaaaaatgagcaaaagatagaagacaattatataccttatttttagattgatatctacagctacatagacgctagataaaaatgatgacaactttattgctattgttaagtagttaacctggatcaacatgccttgaaaataagcatggtgaagcgcggctatcttgtcaaacagttatagcatgctcccgaggaaggtcgcacgcccctatgctgtcatttggcaacattttttatttgcttcggtgcctccatggtctatgtctggatggcctcctt

SEQ ID NO: 99693 - DNA, 381 bp, Zea mays
  Clone ID: MRT4577_22435C.1
caattgaccatatcaaaacggttacaataagcacatctgatcaattggaagagctaagtttatattgaatcttttttcactaatggctaaatagagatgagtgaagtttgagaggcttgtcataaatttattataggatagaaagagtccaacctatgagggtgtttggttccttgactaaagttaagttcatatcacatcggatattttaatgtttgccaaacataagattgatttgtcctttgtggttcgggttggtgatgagtgattgtcaacgggtagcgtctcaagttgagttgtagaccaaccgatgcgtgagtatatatatgtgttgtgcaaccatgtctgtcggtttgtggtgtgcaggtgtggagctcaagg

SEQ ID NO: 99694 - DNA, 216 bp, Zea mays
  Clone ID: MRT4577_22436C.1
tattttttttttttttaagaataataaatggggctaaattaacgaaacaaggcttacacaagtatacccaataccttgcccccccaggcttcctaaagagacaaccatcggggattcctctataaattagctaatctacccagccatagcatgacatgcatagacacgatgatttcatatatagatcaattgaaccactgacagctcatgtgataa

SEQ ID NO: 99695 - DNA, 400 bp, Zea mays
  Clone ID: MRT4577_22437C.1
ggccaaaaattaaaaggacaataaaaaaacagggtaactaacaagggaccaaaaaaaaaaaaggctaatgggggccctttactaaaaaaaaacacaagctggataaaaaacccggggaaaaaaccaccaagtaaattcggggacacacgggaggggacatggaaaaacaccaatccagctacccacaaaaaaattatgggtttgggcccaagaacaaatggaacaaaaaagggccccccccaactaggaattaaaacccattatttttttaaaaaaaccggagaaaactggaggggcaccatttttttgacacaacgggcagggttttaaacgctgaatttttttaaaccccgggtcttgcacttggccttcgttcttggggcaaaacctaaggcttaaa

SEQ ID NO: 99696 - DNA, 422 bp, Zea mays
  unsure (1)..(422): unsure at all n locations
  Clone ID: MRT4577_22438C.1
ccaggnaccccataccctctaaacaatgaatttaaagtggtaagctagactacctcgaactactattcattggccggatcaaattgattttccttggttggtgttgggtgtgacatgaagtcctgaggacccccccttaaatgttgctctaccccttcctgttatagcctgagggagaggttgagtttacatgtatacattatttgcaagccctacctatcatcgagccaactgcctccgtcctggcataaccttgtgcaatggtagtttcatttccttgtaatcatacaataaaagctggtgtgttttagtgtaatcgtacctaaaaggaacgataacacctaagagggaggtaaattagtgtaacaccctgaatttgggggtataaatttcttttctaatatccaccaaattctagtgtt

SEQ ID NO: 99697 - DNA, 664 bp, Zea mays
  Clone ID: MRT4577_22439C.1
ggaccatttaccactgaccctgtatttcgtgtgaccgggcgactccgacgagcccgaaccccgcgcgccggtgaccatggagttcatcgacccctgggactcccagtcccgcgctcgcgtcgtccattccggcgccaactccacttcgttctcctcctccactgccaaagcacccctctccctccgccacgccgcatcttgcgccgccgcggccgtcgcacttctcgccgccgcgttctacctcctcccgacctaccagatcctctcctccctcctcatatggatcgcttcgtccctgctcctcgcccccttcgcgcccttgtcggccactggcggcgacatctccgtcggccgaggccgcgtcgttccggctccagaaccggccccagaacccacaccggaacccacgcccgccccccgccgcggccgtcgccagaacccagtcccgacgcccacaaaaccctcagatccgggcactccccccgtccaatcggccgcatcactgcatccgttgcagaaggcgacaactgcggatggagccgtggtggacggcggcgagagggaggaggacgccggcgagtggactgaccaagagctggagctgctccggcggcagatggtgaagcacccggcgggtgagccccagcgctgggagaagatcgcc

SEQ ID NO: 99698 - DNA, 299 bp, Zea mays
  Clone ID: MRT4577_2243C.1
cgctggagactttcccatgggaaaaaaccccccaaaaaaaattccaccacagaaaacaaggcccggaaaaaaaacaggtaaaaaaaaaaagggggggacataaccaagggccctgggacaaaaagcaggccgggaaaatgcgaaaaggcaaaagcaaaccacggcggggaaacaggggcgggggaaacaagatcgggggggcaaaacaaagtaacccagggccccctttgtaagggaaaacccttcatgcgggggccaacgtttaagggcccccccgctaaaagggggtcccgagaaaa

SEQ ID NO: 99699 - DNA, 227 bp, Zea mays
  Clone ID: MRT4577_22440C.1
ttcctcccactcttccgcccactcttcctaaataataaaacaaaacaaaaaaaaaaaaaaaagcgaggcaaaataaaaaaaatcccaaacaaactactacataacaacaacaaactaactaacaccaacaaaatccatactctactaatgtcaaccaaacaattctacctcttcaagctatccaatctcgtcatctcttcccgcttctaatttctccaaacctatct

SEQ ID NO: 99700 - DNA, 123 bp, Zea mays
  Clone ID: MRT4577_22441C.1
ttggactgcaagtacttgtataacgctgataacaacaccggttcatcacaagcacacacatctcctgcttggtcttattacaagcacaaacatcacgttgccaagactctccctcccggccat

SEQ ID NO: 99701 - DNA, 672 bp, Zea mays
  Clone ID: MRT4577_22442C.1
accaccaccgtggccccggcaaattactcaaatttgcccttcctgtctcggttccctcttcccggcgcaccagcctacctcgccgacgccaggccgccacgccgccggagacatgaaccagcccgtgcagaagaacaccctctacgtcggtgggctggcggaggaggtggacgagaagatcctgcacgccgcgttcgtgccctttggtgaggtcaaggacgtcaagacgccgctcgatcagtccacgcagaagcaccgccgagctcttcggccgcgtgcttaccgtcaactacgccttccccgagcgcatcaagggaggggagcagggatgggctgcccagccaatctgggccgatgcggacacttggttcgagaggcagcagcaggaagaggagatgcagcgcctgcaggcagagcaccgtgcagcgatgcaggcagcagagaagctgcacagggagaaactggccgctgaaagggaaggcgagaaagaagaagatcccatggctgccgcagaggcccaggctgtgaaacaaagttcttaagaaccggatatcaactcataactcatgtgctacgttgctgcctgtttgtcagatatgactaaacgaatcttgcgaatgctgtttgttttgctgaaagaaccctatttctcacctgacgtgggattcttat

SEQ ID NO: 99702 - DNA, 446 bp, Zea mays
  Clone ID: MRT4577_22443C.1
gaaccaaaaaaatgctatataccttttccacaattgttctttggaggatttctatttcaacatggctatgatatacacattgaacgggtctgacctaggggtgaaagccacctttccatatttacgggaaaaaatgcttttgcctcggtttatccaccccacttgggggggagcctttagcactagggctatttttttacgatatacacattgggtttgggtcctagttacatgcatcgggaatacatgggctttactgaagagaaactttatcaaaaatgcctattgctttctcttactcaaattttaggtccaaagccggggagacctttgcctttaacttcctgacatcgttaggtaaatgaactttaccggcgtagtttcataatgactcgggctcttgattcaaagctgttttggaattctctaaggaataaaacccattt

SEQ ID NO: 99703 - DNA, 978 bp, Zea mays
  Clone ID: MRT4577_22444C.1
cattgggtacctcgaggccctcggggccggccgggaccaaccaccgtggccccggcaaattactcaaatttgcccttcctgtctcggttccctcttcccggcgcaccagcctacctcgccgacgccaggccgccacgccgccggagacatgaaccagcccgtgcagaagaacaccctctacgtcggtgggctggcggaggaggtggacgagaagatcctgcacgccgcgttcgtgccctttggtgaggtcaaggacgtcaagacgccgctcgatcagtccacgcagaagcaccgctccttcggcttcgtcaccttcctggagcgcgaggacgccgccgctgccatggacaacatggacggcgccgagctcttcggccgcgtgcttaccgtcaactacgccttccccgagcgcatcaagggaggggagcagggatgggctgcccagccaatctgggccgatgcggacacttggttcgagaggcagcagcaggaagaggagatgcagcggctgcaggcagagcaccgtgcagcgatgcaggcagcagagaagctgcacagggagaaactggccgctgaaagggaaggcgagaaagaagaagatcccatggctgccgcagaggcccaggctgtgaaacaaagttcttaagaaccggatatcaactcataactcatgtgctacgttgctgcctgtttgtcagatatgactaaacgaatcttgcgaatgctgtttgttttgctgaaagaaccctatttctcacctgacgtgggattcttattggtttcccttttccctgtctgtcttagtatatatgcacactggcgcaaagtacaattcttgtattatccgcgacactcatacagaagacctggagatgcacgcagcatttaccaaactggactagtggagcaggagatgcggtctgatcgtggccacacagtcaagcagagcttactaaaaaaaaaaaaaaaaaagcggcc

SEQ ID NO: 99704 - DNA, 658 bp, Zea mays
  unsure (1)..(658): unsure at all n locations
  Clone ID: MRT4577_22445C.1
cacacttgaatgatagtgaatacgtcttgagaaagcctgtcttgtttacagaagtaggttacctccaacatgcagaagctaacagcacagttgatggagacattcttctaaaagttgtctatgataaactatacgattcggcaaaaaagctgcaagcaggaagtggcgctcttatttggcagttgatggtcgaaggcacgcagatgtaccatgatgacttctccatggtggcacgggatcgtccgtccacatataagctgatgaaggagcagtcatgccgactgcagagtctatatggaaaagagggagaccctacttggaaatgctcaccctaagggctagtttggcaacccaatttttctatggaattttcaattttctaaggaaaaataaactaatttcccttaatctgtcgtatcacctcttgctgtacggggttcccttattagcccgtagtagtggtctctgcctatggggctccaatccttcctctgcttcctactgccgcgattgttggaatcattcagaaagaggatgattagggaaagtatgaacaaacatctgtgtggtaaatagcttgttcatagatttgtagctgaagagactagactgaatagtggaaaatccacttcttcnnnnnnnnnaaaaaaaaaaaaaa

SEQ ID NO: 99705 - DNA, 1714 bp, Zea mays
  unsure (1)..(1714): unsure at all n locations
  Clone ID: MRT4577_22446C.1
gcacgagtctcgctcctgagtgcagtctctctctctcgccctgcgctctgcgccgccgccattggaggacgacgatgactgccctcctctcgccgttgagcccctccgcggcagctcttgagctctctcgcgctcctgagtgcagtctctctctctgcgccctgcgctctgcgccgccgccatggaggacgacgatgactgccctcctctcgccattgagctcccgccgcgggtgccgtcccctccagagcaatctccctcggacgccgagccagttggcgtcaccgtcatcaccggctacctcggggctggcaagtcgacgctagtcgactacattctgaatgagcaacatgggatcagttgctccgtgatactcaatgaggttggagagcttgagcgggtcgtgaagacgaaggatagaatggatcatatattacttgagacaacagggttggccgatcctgctccacttgtttctgttctttggctagacgatcaattggagtcgtcaattgtgctggattctattattacggttattgatgcnnnnnncttcagggttcagattgacgagcacnnnnnctcttcctcattccctgaagcatttcatcaaattgcatttgcggatgttgtgatattgaacaaaattgacctagtggaagacagtcttgaggatctggaaaaacatattcgtgatgtgaatgctctggttacagtggtgcggtccgtccgttgccaggttgacttgaatgaagtatttaaccggcaagcatatggtgccaagaattcatctcatctgcaagaactgctggactatagtaaatcagtgccacctagtcgccgtcatgataacagtatttccaccttgtgcatctatgaacaggattctgttaacttggctaaggtggagtcttggcttgaagatcttctttgggaaaagaaatctattatggacatatatcgctgtaaagggattttatatatccatgattcagaccaagttcatacattacaggcagtgagggaggtctatgaagttgtgccggctcgaaaatggtctgagacagagtctcgcatgaacaagatagttgtcataggccgcaatctggatatcaatgtacttcaagattcttttagtggttgcaagagctgataatgagtatctgtttgccttgcacaatgttagttggccatttttctgtgaggtacctctgtgcaagtgaatactgaattggaggagaatcttaggtagggaatatagataacaggcgctccatatataaacttcgttattaggtgctgtatggactatggttcacatatttgtaacgtgaacggtaaccgataatgttaaaacatgtttgtttaagtccaaccgtaatcagataccacactagaaactgatatcatcctaaatcattattgttgcaatttacgttagtggagaatctttagcgggcagggctagcaactcacaatgtgaagagtgggcgtagccgaacacctcaagactgatttcatggctgtattacatgccaagtgcttttccgacgcaatttgacaattttttttcgtaggcccccattcacactgtccatttccggggcatcaggtgccatcatggatagctttgctgtttgtggcattgagctgccatcatcatgggttgctatgttaacaatgcttgtatactgtttaagacaattcaactctt

SEQ ID NO: 99706 - DNA, 274 bp, Zea mays
  Clone ID: MRT4577_22447C.1
agcgggctcacaggggcgggggcgtccgaaccgctacgggtacacctgacgtgccaggttacgcgctaatgctttcggaggaggcgcgggccccggggaaattgggaccacgcacacgcgcgcttgctgcggctggttgatcttggcactgattgcaccaatggtggccacaggcgggacgtgcggcatgatgaagcgcaagcctggggggcggcacattaagccgttgccggcgccggcggcgacagcggccatctactccaggtgcggggac

SEQ ID NO: 99707 - DNA, 1098 bp, Zea mays
  Clone ID: MRT4577_22448C.1
ttgggtacctcgaggccggccgggcttgagctttctctcgctcctgagtgcagtctctctctctgcgccctgcgctctgcgccgccgccatggaggacgacgatgactgccctcctctcgccgttgagctccctccgcgggtgccgtcccctccagagcaatctccctcagacgcctcgccagttggcgtcaccgtcatcaccggctacctcggggctggcaagtcgacgctagtcaactacattctgaatgagcaacatgggaagagaattgccgtgatactaaatgagtttggagaggaaattggggtcgagagggcgatgatcaatgaggggcaaggtggtgcacttatcgaggaatgggtggagctggccaatggatgtgtctgttgctctgtaaaacacagtctggttcaagcacttgagcagcttgtgcagagaaaggatagaatggatcatatattacttgagacaacagggttggccgatcctgctccacttgtttctgttctttggctagacgatcaattggagtcgtcaattgtgctggattctattattacggttattgatgcaaaaaacttcagggttcagattgacgagcacaaaaactcttcctcattccctgaagcatttcatcaaattgcatttgcggatgttgtgatattgaacaaaattgacctagtggaagacagtcttgaggatctggaaaaacatattcgtgatgtgaatgctctggttacagtggtgcggtccgtccgttgccaggttgacttgaatgaagtatttaaccggcaagcatatggtgccaaggtggagtcttggcttgaagatcttctttgggaaaagaaatctattatggacatatatcgctgtaaagggattttatatatccatgattcagaccaagttcatacattacaggcagtgagggaggtctatgaagttgtgccggctcgaaaatggtctgagacagagtctcgcatgaacaagatagttgtcataggccgcaatctggatatcaatgtacttcaagattctttttagtggttgcaagagctgataatgagtatctgtttgccttgcacaatggtagttg

SEQ ID NO: 99708 - DNA, 567 bp, Zea mays
  unsure (1)..(567): unsure at all n locations
  Clone ID: MRT4577_22449C.1
agtggtgcacttatcgagnaagggtggagctggccaaggntgtgtctgttgctctgtaaaacacatctggtntcaagcacttgacagcttgtgcagagaaggntagaatggatcatatattacttgagacaacaggttggccgatcctgctccacttgtttctgttctttggctagacgatcaattggagtcgtcaattgtgctggattctattattacggttattgatgcaaaaaacttcagggttcagattgacgagcacaaaaactcttcctcattccctgaagcatttcatcaaattgcatttgcggatgttgtgatattgaacaaaattgacctagtggaagacagtcttgaggaatctggaaaaacatattcgtgatgtgaatgctctggttacagtggtgcggtccgtccgttgccaggttgacttgaatgaagtatttaaccggcaagcatatggtgccaagaattcatctcatctgcaagaactgctggactatagtaaatcagtgccacctagtcgccgtcatgataacagtatttccaccttgtgcatctatgaac

SEQ ID NO: 99709 - DNA, 208 bp, Zea mays
  Clone ID: MRT4577_2244C.1
gcgacgcgttcgtaaccttcctcccagacgatgtacatcactagatcgacgccgtcgacgagaagctcaactcctgggcgggcggctagtccactctcctgccgtagaactccaggacgatcacaggagtgctgtacctcatggagcacgaactgtctgctgctgcaattgctatggctggcctatcaatactcggattctggctctc

SEQ ID NO: 99710 - DNA, 439 bp, Zea mays
  Clone ID: MRT4577_22450C.1
aattaatgtaatgtgttattatatttttcaagagaaagggaaaaaagggaaggggtgataacacacaccacgggaagggcaaggcacacaaggggaagggcgacacaagacctttacaaacaacaacaaaaaagggagggaggcaaccggggccaagccaacgagaaaaaggggtaagggcccgggacatgacaaagaaaacacgaagaggcggttggctagaaaaccgccaagggggaacaaacctagggggatgcaccaagatcaccctgtgaaaaaacagacccgtcccacaaaattggggtggaaaaaaacccagcccgtaaaactacgggggggacaaacggaccacagcacacacacaaagggaataaagaagaaccccaacaacaaccggatcacccaaaaaaaaaaacaaccaccacaacaggtgcacgca

SEQ ID NO: 99711 - DNA, 555 bp, Zea mays
  Clone ID: MRT4577_22451C.1
tgttggcgatgcccatgccgtctccaccagtccgccgcggacatgctggccaggctgccgaagctgacgtagagcacggacgcggggccccgcgcgtccagccagtccaggcaccctcggtcctgccgcagcaggctgctcgaggccgccggcgagtgcacgtgcagcggcccgatgtcgaacaccgggacggcgaggccgcgccggagcgacgccagctcgtccgtctccagcgcgtcgaacgtgttgatgatgagacccgacgaggcgttcacggccgtcaccgctcgcgaaatcaggtcccgcattagcccgagggtggccccgctggcggacggcatgtcacggacgcggtacggcggcagctccgtcaccagcatgtccggctcctgcgactcgtgagaggacaggtagcccttgtcgcagagcatgggaaacgccatgaaccagcggaagcacgcggcgctgccggtgcggagcgcgagagtcggcacgccgagcccgcgtgccacgtccatgagcgtgagcaggtgcgcgtcggcgacgaggcacgcg

SEQ ID NO: 99712 - DNA, 345 bp, Zea mays
  unsure (1)..(345): unsure at all n locations
  Clone ID: MRT4577_22452C.1
atcctttcctgactaatactcccgaaacagttcttctacatatctccgacagctacncaggcgaaccttacagcgggaactgggtccccctactatctcacatataaaagaacagacttacacacacccatctcatcagcctggtatacaccataaatgtcatggccatactgaaggcatgatcaaacatcttaccaaaccataagcactctctacaatacttgagataatcgatatatctaccaaccatcttatcatcgatatacttatacaaactgtggaccacaatatcatgccctctattgctcattacgtaaactgccacgacaagatcatgctactttc

SEQ ID NO: 99713 - DNA, 440 bp, Zea mays
  Clone ID: MRT4577_22453C.1
gcggagctgtacgaaacggcatctgggagacgcacacgcccgctcgaagcggcgaagcctcgaacggggtgaaaggcatactgtgagaccccccgcgtagcttgatcttcgagatggaggcggcgctagtggagcggctggaggccgcggtggcgcggctcgaggccgtcgtggcctacggcgcctcgctcgcgtcggcggcggcgcgcgacctcgacgctcctgaggcccggatggatccagctatcgtggcctacgacgagttcgtcgcggaggccgtcggacggctcacggctgcggccgaaaagatcggcgggaaggtgcttgacgccaccaaagtgctcgccgaagcatttgccgtcgacaaagacctgctcgtacaagccaagcagctccagaaaccagcatcaatggctgatgcacatggcttttttaagccc

SEQ ID NO: 99714 - DNA, 267 bp, Zea mays
  Clone ID: MRT4577_22454C.1
cttattctacctttcattctaacttacatacgttcaatcataatcctacacacaatatctattatccactgacttttcataccaatcgctattcaccaattattataatcaacatgttcctcattccactactcttaattactttctcatcacactcattatttttttctaactaacctatctcactacattctaaacccagttcacattccctatttgtcttataacaatccaacactatttcaattcttcttcacactcataata

SEQ ID NO: 99715 - DNA, 414 bp, Zea mays
  Clone ID: MRT4577_22455C.1
tccaaccatgcggcaggccaagagtatgcagacccttggggcataacctgaggtgctcactggacattgagatataggctaccgcttccttcagcagccccttcgcaccaacgccgcaacaacctggcccccggattcctctatctccgcgcgagcacgcacgatcatccggacaacgggggcgaccatatagattagaacccaaaaaaagagcaatatcgactctgctacatgtagcggttgtggggacatgccatccagcacggggaggccacagcgggatcctctgaaactcaaccaaagcaaacgacatgccagcatcacacgggggatacgcctccatttcttagaacagaaggcgaaatgagtgagggacaacgggaatatcatctgccttgatatccatcaattgat

SEQ ID NO: 99716 - DNA, 370 bp, Zea mays
  Clone ID: MRT4577_22456C.1
cgtaattcggctcgagctggcgggcttacctatagtttgtgcgcacggatcatttttggaaattggagggtacaacttggaaggggttcgaggacttcagctatggcatatgtgggacgtgcaggacgaggagggaaaggagatggagggaagggagaagggtagctggctcgcaaggcgtggaggcagttcctgctacagctccagcaacatcctctgcgaacaaagatgatcacggcggcgtgccttggcgtcatcatgagactcctgacgcataagctctctgggttccagacgattgagaaacgcaaactacagctcaagatgctgtgtggtactgatatgggtggcccatttggacatttcttgc

SEQ ID NO: 99717 - DNA, 211 bp, Zea mays
  Clone ID: MRT4577_22457C.1
tcgctccactggaggagagttctttaactttttcaattttctggtcagtgtgccttagctccggaatggccgagttgtaaatacgaactacgaactttgtgcgtatttatggttgttgtattaaaaaacccaaaaaaaccccttggcccccttctttttaccccaaaatccccaggagtcccaaccccagttctccccccccatttctccc

SEQ ID NO: 99718 - DNA, 220 bp, Zea mays
  Clone ID: MRT4577_22458C.1
tcgtgcagacgtccctctactcgtacgtaggggacattgtggacacatggaggttactgggagtcggggggcccgcaacatgacattacattgcatagcggaggatcttcgagtccctcgtgaaaggctgggccttattcggaatgtctacatttcaaaggactactactctggagagcctggtggatttccctttatgcgagtttgtcgatccttacga

SEQ ID NO: 99719 - DNA, 199 bp, Zea mays
  unsure (1)..(199): unsure at all n locations
  Clone ID: MRT4577_22459C.1
gtggggncagaagagagcattgtgggcaagaaaaccactggaagaaacaagctctggcttattctaaatctgggtggcgtactaggaactttccgatcaattcctagaacgttttcaggtcggatcctcgtcagaaggactgagattacgtaccattaatatgtggaaacgcgagaatttagtagtccgtgcgttgccc

SEQ ID NO: 99720 - DNA, 336 bp, Zea mays
  Clone ID: MRT4577_2245C.1
atcccgggcacgacccacgccgtccgcgtgacgcgttgggaacaaataaaaaaaaaaaaaaaaataaaataaaaaaaaaaaaaaaaaaataaaaaaaaaaaaaaaaaaaaacaaaaaagcaaaaaaaattataaaaattttggattcaaaacagaacaaaaaaaagggcgccactcataaatggttttaactttatttaaggtggcggcccccttaagggttcaccccttatttccccttgatttccatctccgggcccctcttttggttccccccaacttgtgtatacggggctttttttaaaattttccccttgggaaaaccctctccttttcc

SEQ ID NO: 99721 - DNA, 350 bp, Zea mays
  unsure (1)..(350): unsure at all n locations
  Clone ID: MRT4577_22460C.1
gggtacccccggagccggccgggnagcaagacacgcccactcctgcggatcttattctggcactcaggcaccagtcacaccacctcccacactactgccaccgtgcgtgcccaaaagactcacaccgcagtgtactagtggctggcagcggcgccactcagcggagagagacccagtgaactggggcgcaggcggcggcggagctggacgcgagccacctggacgatggggaagctgcatggtggcgcatgcccggcaggccgcggccaagatcgaggctcccaccctccgcgtcggccatgtggccgccggcggctccggcaatgacgcgaccggcgtgaccgtgaagc

SEQ ID NO: 99722 - DNA, 1398 bp, Zea mays
  Clone ID: MRT4577_22461C.1
ggcatgtgtgtccatgtgactgggcatgtttgaattttttatccttttaagcatgtgtgcttccatttccagtagaaagctgtacttttggcggacccggaccgttgtaccatgtgtgagagaaagaaaacgttgtaccctacggagctgggaagctatatatgggccagatggggtgttttggcatgtgtgtccatgtgactgggcatgtttgaattttttatccttttaagcatgtgtgcttccatttccagtagaaagctgtacttttggcggacccggaccgtatttctatctattatatgaatttctatatattattattaaaaaaaaaaaaaaaaaaaaaaaaaaaaatacaatgatatttaaaaatgggaacaatatttggttgtgaaggggcaccacttctaccactactatttgtgttggttaacatgggattcaatatatcattactaaacctactaaagatctcctcagcagtcatatcttccttggcttctacattctcagttccgctgtccatctacgctttcactctgccactgccgtatatcggtgcggcgtcatctctgccacctggctttgttgcgggtgcagcggtactcaccaccggcttactactatacagcctaccacaggcacaacattatgggaattctttccacaacaagaatgatgactagtcagcattcatttcttcattggtttataatcacccttcactccaagatggtgcgccatctgggttcgaaaggttggagcagaagttctcctgagggccaccagactgttgtatgttgtatgaaacatatcatatatatatacccaccaataaaggtgaggaaatatcatatggatatactgggaataaagagcgagaggatgtataaccgaacaagtacctggccgtcatacattgttgtttactgagtgaaggtcggagaagagcatggacagtggttagacgggaagaaaaccagggagaagagcaggagcatcatcaccacagggacgaagagaagaaacagcggtggtggcggaaggggtggcagcaccaacggcaggcacaggaggatcactgtcgccgccagcaacatcatcagtactctcttgctcatcgccgccgccctgcgctcgctgtgatggaacttgcttgtgccaacccccaatggctgcccggctccagtctttttctaggctttcatgtgaggaagttgttgactatgtgtgagagaaagaaaatgttagttgcccccgatgaaggaactggcaaggtatatgtacatggccagcttgaatcagcaggccagatggggtgttttggcatgtgtgactgctggactgggcatgttcgatccttttctgctttccagttccagttcagagactgcactg

SEQ ID NO: 99723 - DNA, 533 bp, Zea mays
  Clone ID: MRT4577_22462C.1
gccggccgggtcgggccctgctccctatggagtcggcggcgattgggtcacagtctccgctctccttcccctccagcctctggtgcgtgtctctgctccctgcgagtccccttgcgcgcgcagtgtgtcactgtcagcgtctcagcggaccgtgggtgaggaacaatttatccgcgcgccgcgatggtgcgggtttgttgtgattcgcggtggggatgtttatgctcttcactgtcccgtgggtggggagtggattggatgcggctggcattggcgtcacaggggaagactctagagctggtagcatttggcttggagcgttactttgtttaatttcctccagacccgctggtgggtctccaattcgcggctgcctccgtgttattcgactggtggtagacgtctgctcggcttgcgcgcgcgaatatcacggtgtacaaatgtggccttctccttgacggactgcttccttctgccttggtcatgaatggtttgtcaaacaaacatttgggatggcaccactgcacattttg

SEQ ID NO: 99724 - DNA, 341 bp, Zea mays
  Clone ID: MRT4577_22463C.1
ctagatcgcgacctgccgcctttttcggggcttttgcctccgtctccgtcgggatggctggcccctaatccgcgccttcaccgccacagcggcacagcctgagccacttccaggtccactgcctcgcccgaaactccgaacgcgctagcacgctggaggtgagcgccgggactgtgagctagctagggcttcgcttctccggcgcgggatgggctacctcgtgctctcgccgtcaccgtcgccgtctccgccgcacgcctttcaatacgcctcctcgtcctcgtcctcctcctcctcgggcgctacctcctgccgtcgccgcacgcggcgaggcggggcct

SEQ ID NO: 99725 - DNA, 678 bp, Zea mays
  Clone ID: MRT4577_22464C.1
agttcctgaagagacattttcatttcatctcatacagagtgtgaaagagtttggtttctatacagtagaggtgaaactttcgcaagcggccgcccttttttttttttttttccttcctgaactgttcttttcatttcatacagagtgtgagagagtttggtttctatacagtagaggtgaaactttcgcaaggcaataaaatagtaacagctgctactatctactgaacatgctgcgtagactgccgcgctccagcctctcgtgcagcttcttggcgccggccacgtccatgtccgagagcttcttcaggtaaccgatggcgccgtgcgagaccatgaccttcctgcatcgtttggtccccgagagcgtgaggaggcaggcgatggcgtacttcttagccgtgttcgcggggctcgggtccagcagctgcaccaggctgggcacgcatttgtcgtccttcttcatctcccgggcgttggcagggcagctcgccagggccgccagcgcctgcgcggccacctcgcgcgcgccgttcgacttggcctccagcatgcgcaccagcggcgctacgcagccgtgctcgccgacggcgcgcttcatctcggcggagctggagatccggcagactgccgccgccgccgcctgctgcgcgccaaccgacccgactttgagcacgtg

SEQ ID NO: 99726 - DNA, 653 bp, Zea mays
  Clone ID: MRT4577_22465C.1
attgaggtccggaacaatattttgttacaataaattaagtttcaatcaaacaaataaatagacaaaaacagttattcacattaatttacaaaaatacattttctctgacatttgtacttggtttgaaaatattaactgaaaccttaagtctttggttaaacaacttaaaactagaaaataaattaaataaataatcttcgtctcgcgtcgtatccgggttttcaggcgcctaagatgtcatcgaagaatctttcgaagtagtcttcgtcgtcgtcatcgtcatcgtcgtcgtcagcagcagttccgtcatcgtcgtcatcgtcatcatcgtcatcgtctccgagatgtaagtcgacgtcatcgtcgtcgtcatcgtcatcgtcgtcatcgtcgtcctcgccggcttgcggtgctgccgcgacaggctggacttgctccgcgggcgcttgcctcgacgtcgactttgctccgctttcgttgagtacaggaacgggtgaacccgaatgccgaaccggcgatggcacataggcaacaaaccaataaccatccgaacttcattttaccccttctctaaaattaaaaaacaaaaaaaatacagtcacacttctcaagtccttttttcccccacaacttcactcggacgggtgttcccc

SEQ ID NO: 99727 - DNA, 369 bp, Zea mays
  unsure (1)..(369): unsure at all n locations
  Clone ID: MRT4577_22466C.1
gaacataatgagannnnnntttgttaatttgatcaacgactattctttttcagttacttcttttttgaaagatcatattttcaaaatttacaccgaccatgtggtgacaaaattggggcgcacgaaagggggtgcaaaccgcgcccaaactaggattattttccatgtctttacaagctacccgttgtttgatatcttcgctacccaatgatccttttattgggggccggacagccacaagggtgttgggatctcgcgaattgctactctacttttagctggtaactgaactgaaccagccgatagaactaagccacctaattcccttgaaacacaaaataaacgtggaagatgtctggggcccttttg

SEQ ID NO: 99728 - DNA, 354 bp, Zea mays
  Clone ID: MRT4577_22467C.1
attcataagattctggcatgcatacactaggataaacggtcgcttgttgcagtccccttgttggcctctgatgttctgaattcggtagtcttcgtagaagttgtcgccgccttgggtggaggaggtagaggcatagggccacgagcataagatttgctcgcgacagtagaatccagcttcttatagtccttggtccgggaaccatcgacgatctcctcctgcaactgagcaagaacgtaggcagtatccaaatcttttggccgttgaatcataacagtggatttaatatcaaaacgaaggccatctagaaatcgcatggtgtaatacagtgggtctgacatttcctggtaacta

SEQ ID NO: 99729 - DNA, 313 bp, Zea mays
  unsure (1)..(313): unsure at all n locations
  Clone ID: MRT4577_22468C.1
catcattcgtcggcgatcgtctcggctctccggccgacctgctgcgatcagccgatgcgttgtctttanaaggtgagacgatgcgttcatgggactactggatccacctatatgcctaggcgatcgacaatgcgctactggtttccatggtcaaattagcataacgtgattgatcttctaccgaaggagcttctagcgtaatgtataacgcttccgagtagtaccgtcaggtcctgggttcgatcttcctcaagagtgaatttctggcttggttaataacaatcctctcgttgtgtcccaccgctctcgagtt

SEQ ID NO: 99730 - DNA, 341 bp, Zea mays
  Clone ID: MRT4577_22469C.1
cagagcgcacttgctcctagtgccagaattacacagaaggggggggggggactaaaataaccttctaacatccagtcgcggaagagtagacgggagaactagcgctagcggagagcgcgtaacaacaacgaagcgaggaaccccctgatgagcaggaacctggagaggaatggcaagaacaccagcatgacaacaacaacaacaggtgctggcaagaacgagacacctagccgcggagaacccaacacttaaaggagcagaaagcgtccgaccaaaacagaacaggcgtaagggctcttcttctaagcatcggcaggagctggccaattcccacgcccccg

SEQ ID NO: 99731 - DNA, 101 bp, Zea mays
  Clone ID: MRT4577_2246C.1
ggctcgagatgtacctcggatgtgctctcactggctttgtaatttcactcggaggaagtaataatacgctaaatggatggcgtaacaagatactttgcttt

SEQ ID NO: 99732 - DNA, 247 bp, Zea mays
  Clone ID: MRT4577_22470C.1
ttacaccggggtggttttaataggccaacctgccttaacccacggatagggacctgaaacagatccaactattcttatggcccaaacatacatatgaccaaccaggttctccaaagaggtgagtgagaagaaaaacaacagtacacacgctatgtacaacgaaaagcacacctaacacgctaatgaccaatttttagagacaactccatctactgaggatgcgcttagaacgaatccctttttaaag

SEQ ID NO: 99733 - DNA, 376 bp, Zea mays
  Clone ID: MRT4577_22471C.1
ccgcgccatcaacgccgagcggaacgtccctgctgtcccgcgccgagcacaaccgcctgccatcgcgcgctactctccctccccgcgcccgcagtccgcagtccgcgccatcaacgccgagcacagccgcctgcctgagcgcgctacgctccctccccgcgccccgccccgcagtcccgcgccgagcagagccgccccgcagtcccgcgccgagcagagccgccccgcagtcccgcaatccctccccaccggtggtctggcacgtcgcctcctcgcctagatccgtccgtggtgcacccctccagccttgcccagctccaaagttccctcctgctcgcgggcacgcggactcaccctaggggccaggccctgggcc

SEQ ID NO: 99734 - DNA, 347 bp, Zea mays
  Clone ID: MRT4577_22472C.1
tatggaataaaattccaactggtgtacatactggaattgaggggtacaccatgcaaaaatcctaatctgttagatgcgcaatctattcacgcattcctccttcatcttaatactactcaagttatcagcccagaaaaacaaaacttcgaaatgtgtccacggcccacagccatagcatcttaactaataactcatagacaaatataatgcaaagataaagtcgaaactgcttaattcctgtgcactaaagccaaccactaattgtacattgccctacaattggttcaaatcctcttactctgcgacagccataccacacccaaatttgtaatctcgtgccgaattcc

SEQ ID NO: 99735 - DNA, 123 bp, Zea mays
  unsure (1)..(123): unsure at all n locations
  Clone ID: MRT4577_22473C.1
tgtaacacctatgccgcctaatggatgtcgacctcctttaaaaagacgtctgtttnctattcctttttatanaagattttcttcctcggtttggcatcggacgaaaaataggttaacaaggac

SEQ ID NO: 99736 - DNA, 221 bp, Zea mays
  Clone ID: MRT4577_22474C.1
gagataaaattcgtggcatcctactttacattcgatgcatttccttcttctcagcatactgtccggatgtcataaatcaaggcagttctagatcatcagacaccagttgctgaggatgtccctgaacagtttcaagcagcggcactctcactttcatacacttattcttctgatataggtaaggacatgcctaacactgatgataacccaatgtctatctg

SEQ ID NO: 99737 - DNA, 824 bp, Zea mays
  unsure (1)..(824): unsure at all n locations
  Clone ID: MRT4577_22475C.1
cacccaaggccggccggccccgagcccaaacctgcaaccaccttcccaaatcctagttctcgcttctcgtcgtctagcctcggcccgttccaaaagccccgcagctctcgcatctcatcagacgccaccaccacctccggcgaccgaagatgatctctccggatgcagcccgcaacgtcgtaggcatcatcggcaatgtcatctcctttggcctcttcctctccccagttctgacgttctggcggatctgcaaggccagggacgtggaggagtttaagcctgacccctacctggcgacgctgctcaactgcatgctctgggtgttctacggcatccccgtcgtccaccctaacagcatcctcgtcgtcaccatcaacggcgtcgggctcgtcatcgaggccatctacctcaccatcttcttcctttactctgatggcccgaaacgcaggaaagcgttcggaatcctggccgtggagattttgttcatggtcgccgtggtgcttggtgtgattttgggcgcccacacgcacgagaagcgctccatgatcgtcggcattctctgcgtcattttcggctcgatgatgtacgcctccccactcaccattatgagccgtgtgatcaagaccaagagcgttgagtacatgcccttcctcctctcgctggtgagcttcctcaatggctgctgctggacggcctacgcgctcatccgcttcgacctctacgttacgatccccaacgcccttggcgccttcttcggtctcatccagctaatcctctacttctgctactacnagtcgacccccagggagaaagatgtggagctg

SEQ ID NO: 99738 - DNA, 446 bp, Zea mays
  Clone ID: MRT4577_22476C.1
atcttttaactcaggggacacgatcgccatggccgccacatggaccgccgacgacgtgctgtgcccgccgtccgtggccgggatccgactggagccgtctcccggccgggcgcgcgtgtcgttccgagcggagccggcagccggcacggcagtccgtggcggcgcacgcggagctagagctcggcgctggtgatcagcctgagcacgggcgaagggctcttcctgggacgattaggattgttcaacttccagcgggagaacgcggcgaagcatgtgcccgctcagaacggaaagacgcacttcgacgccggcgacgagcgcgccaaggagaaacgcggccctgctcaagtccaacgaccccgtgggcttcaacctcaaaaacagcctaggctggggcttgctcggacacatcagcagctactacatactagacaacctcagcaacg

SEQ ID NO: 99739 - DNA, 1125 bp, Zea mays
  Clone ID: MRT4577_22477C.1
aaaaaaaaaaaaaaaaaaaaaaaaaaaaaaaaggacacgggccccacgttccacagaatcgggaggaagagcacttggctttgtattcccttctgcacgagagacagcccggctgggcgtcgaagtctctccgctcaagacacgggcccactccacagggcgaggggcgtcctcgaggcgggggagagcactggcttgtatccctctctcgtctctccagcgacggcagcgggcgagggttacgcgaaggcgaagcggagtagtggaagcagaggcggcagccatggccgtgatggagaagctcaagatctttgtcgttaaggagcccgtagtcgcggcctcctgcctcatcgctggattcggtctctttcttccagcagttgtccggccaatcctggattcatggcagaccgcggaacaagttcctccacctcttctaaatgatccatgttcttgatgaaggtgatgaggagcacaggaaaccacagaacccagcaaccccctttggtttcccacgctcctcatcggcgtcagcaactattcgatcacatcccctatttcaaactttactcggtggttgcaggtgtcaccggcaagaaaaagtagtgaacttgcattgttttctcatgccaatgttgccccacattttcttccccgtgttttttctggcgaccagattggaaggcttttcccaagagtcacggtcttgaactctagatggtatccgcggaataatcattgtacctgaatcatatactgcaatgtggcagttttgaaaatgtttcccctcctacaaaggttgatagaatgccataaaaaaaaaaaaaaaaaaaaaaaaaaaaaaaaaaaaaaaaaaaaaaaaaaaaaaaaaaaaaaaaaaaaaaaaaaaaaaaaaaaaaaaaaaaaaaaaaaaaaaaaaaaaaaaaaaaaaaaaaaaaaaaaaaaaaaaaaaaggggggggccgtttttaaggaaccaaattttacttccccgggtttccaaggtataattttttttttggggcccccaaaataaaataaatggcccgcgttttaaaaccgccggactggaaaaaccccggggttacccaaattaaatgccttggagaaaaatccccttttcccc

SEQ ID NO: 99740 - DNA, 630 bp, Zea mays
  Clone ID: MRT4577_22478C.1
attctacctaaaatgctaaagactctagaacttacaaaccagcgacggcggaggggatcgtacagccaccttggccgccggcgtgaaatggccagctctccgtccgggattcctagtcacgcagaacaagacccggatggatcggtactaaggacagctgctatgaccgcttttgcgccaaaccttcttatgcagatgcaaaccagagctccaactatatgacggagaacatcatttcgacgatatatgaaatggaatgcgagaattcatgaattgcaaccgagcctccaggacctccatgttgcatatacgtggtgaacgcatgtccaccccatctaatatgaaggaatagtcaatgacctatcggacagctccacatgactgcagatcacttctgatgactcgtttcagaggccaacgctgcgtcttgcgttcattactaacaaatactcccccgcccttgttcaaaacgtgcgtcttattgctaaatgaactgagcagcgacaaatatatgagaactgagactaggacctgattactgcctcatgtgaccagagattgaaacctgagctacttgtgatctgctgattgggatgccataacctctatccgccttcgaactgcgtagac

SEQ ID NO: 99741 - DNA, 497 bp, Zea mays
  Clone ID: MRT4577_22479C.1
tgcaactgaaataagttaattcggagttaaaatggattttctaggaattacacaacttttagaattatttttgtgctagaaaagtattttctatattgttttttctattttcttaagtcactggactaagcatactaatttagagaagcccgagattaaacttgcaaaagtctcaaactactcccacgaagactgcgggttgttttattgtttttctaggggctcttaagtaaaaatcgctcggctgttataatgcgcgacatcctggacccaccatcgcgcgatcagcggctgggattttattaaagcggtatgcagccttctaatctcgtacgttcattcggccatccacgacccgcgtggtttcttcctcaccgcaacggggcatggtggcgcatgagctcctcacggcggcgcacgcggggctcgaggccacggaggagactggttcatgaagtactgcggctcttgcgcgttgctcgtccatggtgtgagat

SEQ ID NO: 99742 - DNA, 302 bp, Zea mays
  Clone ID: MRT4577_2247C.1
gagacacgcgtccaaacatacagctagatagcctctgcatgcctacgtacagcatggcgaagggccaactgctcctgggccttgtggcttcgcttggcgtgctggcattcttcttccttggcgggtaccaagacttctggattggcgacctattcggcggcggcacgccgggcgggtacccgtgcaagcccccgaaggacctgaccggcgaccactttcactatggggggcttggcaaccccggcaccgggcttaaacccttcaagaacttcctgggcttgggcgtcgtcaacacgtttccc

SEQ ID NO: 99743 - DNA, 253 bp, Zea mays
  Clone ID: MRT4577_22480C.1
taatgtcggcacgagggctgcaatactacagtgcgtgctcacgctgcagacgaatgcccatgccattatagctggctgcctgcagagtccctatccctctcgtgctcctgtgcaatgctacgaagcggcggcggcgacgcgcgccccctgccccgggcagcgtacccatcatcggcatcctgccgtggctggccctgcgcagacggcctgggtgagctggacatcctgcgacgagtgcacttcggctttggcc

SEQ ID NO: 99744 - DNA, 181 bp, Zea mays
  Clone ID: MRT4577_22481C.1
ggaaaaccgcgggccgacgcacgcgtccgcccacgcctacgaggacttctgcaatcattatcatagaagtttgctcaaagacgggaagggtgttctcttatggggagaccagcccaaggcactatccacagcattgcggcctctgccatggccttaactactaggatgtcttccagatagt

SEQ ID NO: 99745 - DNA, 261 bp, Zea mays
  Clone ID: MRT4577_22482C.1
aaaaaaaaactgccccatttgaaaatacctcataattcttccaaaacccgaaaaaaactttgttcccaaacaccaccttaccctttaaccctacaagggaaaaagcggccaatccaaaggcctttttttaatcaaccgtttccccgctggcaaattgcgttggcaccgacatgggtccccccacaggcaaataacaccacccactttcatggccccaatggtactctagcccaattcccagcttaccttccccttctttcc

SEQ ID NO: 99746 - DNA, 503 bp, Zea mays
  Clone ID: MRT4577_22483C.1
cccaactcttcgtgtgatttgcattgaccagggccgcacaggctgtatatgagggtccattgcttatatatgtagcatgaactcgtgcatcccattcccagcagctaagcctaaccatctgctccaccacttctgttccttgtataccttagtcaacaatgcacacacttgccatagcagctctgcacctgttgcagcttctagcaacaataccaacactatcctcacaagacacagaggcaattcccggttgcacctccagatgccacaacataagcataccttaccccttcggtatcggcgatgagcgatgctacttacatgaggggttcaagctcgcgtgcaagacggaagaacagcctccggtgctgtacatgaacagcgctggatatcgagttgtgaaaattaagctgaaccctagggtcgtgtacctcgacactcgtttccaccaactgttggggaaaagcagctatggcgagagctggaacctcagcctggacaac

SEQ ID NO: 99747 - DNA, 141 bp, Zea mays
  Clone ID: MRT4577_22484C.1
gcataaccatcagatctagcaaaactctcgccactttatcaacgttgtccgaacgcgtattaaccggaaatggctcctatcgtattgagtatgaacgcctgctcccttttctacttgccccccgccacctttttttttttt

SEQ ID NO: 99748 - DNA, 131 bp, Zea mays
  unsure (1)..(131): unsure at all n locations
  Clone ID: MRT4577_22485C.1
aacttcaagttcaaccccttcaactgctcatcacattcatctactaccattgatatcattattatctatctagctctttgtgggtctttaacaataataanctaagcctatctggcttccatacataatta

SEQ ID NO: 99749 - DNA, 170 bp, Zea mays
  Clone ID: MRT4577_22486C.1
cacaggcgtaggagccattgttcttgaatcccgccttattcaagtgacatctgtggagcctgctctacccgcagctggatctgaacgcagtttcaccacaatagctttagctttcaattcattggggcaacgaattttttggccgggggtgtctatacagaacaatatgt

SEQ ID NO: 99750 - DNA, 452 bp, Zea mays
  Clone ID: MRT4577_22487C.1
tcgaccaagcctctaatcaaattcgaacaaattgaaaaggctttccagaagcagcatggtatcttccaaaacgccaaggttgctggcaagaagtccgtcaagaacaaccgctggtacaaggaggttggtctgggcttcaagacccccagggaggccattgagggacactacatcgacaagaagtgccccttcaccggtgatgtttccattcgtggccgcatcctcactggtgaggttatctccaccaagatgaagcgcaccatcgtcatccgtcgcgagtaccttcacttcatctccaagtacaaccgttacgagaagcgccacaagaacttggccgctcacttgtctccttgcttcattggagtccaacagggtgactctgtcactgttggtcagtgccgccccctttccaagactgtccgcttcaacgtcctcaatgtccagaagaagat

SEQ ID NO: 99751 - DNA, 351 bp, Zea mays
  Clone ID: MRT4577_22489C.1
gtcttcctctgactgctcatcgccaatcctaaagggacacaacacagagaatcacaaaagggaaaaggacgatggtcaaaagaaatgctcaccgataagaccccaccctttgcttcacttggtattagattctgttatatgctgatggaacatacaaaaaataaaataaaaccaaggacttcactttaaggatatgaaattttagcaaaatcatgtcagcttttgcaactaaaagttgtcaaaggtaattcctacatctgttaattatttgctttgagaactcccccaatgtacctgttgaactggataaatctcatacagctgcaaacataatactccactttcgaactg

SEQ ID NO: 99752 - DNA, 228 bp, Zea mays
  Clone ID: MRT4577_2248C.1
gtcgggttcatggtgtcggccgccatcatggcgtccgtcacgctcgtgaactgcgcggcggcgtcgttctacgtgaaggtgaagccgcagaagagcatgtgggttggcttactgaaggtggtggttgttgctgtcaagaaccgtgaccttgtgctgccagaggcagatcatggcgctcagttccattggttaccgggttcgacacagacggttccatcaaacaaaatc

SEQ ID NO: 99753 - DNA, 490 bp, Zea mays
  unsure (1)..(490): unsure at all n locations
  Clone ID: MRT4577_22490C.1
nctcncncncnananacaaaatgtattatgaggtctttcttttttttttttttttttgggaaccccccacatgactacctgaaaaaggcctggggcagcatccggtccattgatgggcaccggactcttccaacatgtttttaaccaaacttgcaagcttcgaaaaaaaatgggggggcgagctgatgtcaacgacagcaaccggggcaaggcattccattacattacattacatgcaaaaaacaatagccatttgagcctgtgcacactgacctaggcctgatgccaaaaaaaggaaaagcaagccggctcaaaatggtttttccctctccttccaaaagtaacgtggaaacaaccaaaattgatggaattcaggagggcccaaaggggcttggaacctatgtaagccagaaaaaaagagggggggggcaaggtttccccctggaacaaccaatgatgttggcctctggaaggaaaaagtatttaatcc

SEQ ID NO: 99754 - DNA, 867 bp, Zea mays
  Clone ID: MRT4577_22491C.1
gaccctccgggcttggccggggtcccatagtggcaaccagaaaactcgcagacctcgggccgggagagcacctcgcttgcgaaacagaggagaggacggcgcgcgagaggaggaaaggaaaacaaccacgagtccacgagaccacgaccccccatccattccattccacttccacccgagcaccgatcacggcggcgatggggaaggtgccatcgtcgcgggcgggttcgcggcaccagcagttccgcgcccgcgccatgacccgcgtcgacgacctccaggaggtcttctcgggcctgcagtccgcgcgcaaggactcacgccccaccgacgccgccatcctcgaggcgcagctccaacagatgctgcgcgagtggcgctccgagctcagcgctccgtccccggcctcctcgctccagggcaacgccagggaactgtcggatccaccttcggatactcttcgtatgctgcaattggcggcggccgaggaggaggacgacgccacgagcaagatggtcgagcagcagcagcagcctccgcccccagctaaccagaaccaggggcacgcgcaggtctgccaggacatgaagagggagccacgcgaggaagcagttgacgtcgctgtggagaagccgcagccgctgagtcagggagttctgcttaatggtgctgctaccgcgtctgcggtgttccatgatcaggaacttacggttgaagattttctttatgatgatgattacaagatagacctttccgggtctaatctggatgtccttaataacctggaagggatcgttcagctggaatatccacagttaaatttgccgcaagagttagcccctaatgtgtacattgacatgagttact

SEQ ID NO: 99755 - DNA, 346 bp, Zea mays
  Clone ID: MRT4577_22492C.1
gccggccccgttgtccgttgtggcggccgtggggcccggcgccgcggtggcggcttacgggcacgggcacgggcacgggcagccgctgtgcggcggcggggcgaggaagaggaaggacgtccgggaccatgaggttggattgccgggtagcgacggccgcgcggcggcgcggcgtggggccgggctgttcgtgctggagacggtggaggaggaggaggaggaagaaggggcggacgccgagaggtcgtcgtccgtcggcgcggcgtccgaggacgactcggaggaagaggaggacggtgacggtgacgaggtggacagcggcgggacgaggtggacagcatggaag

SEQ ID NO: 99756 - DNA, 1288 bp, Zea mays
  Clone ID: MRT4577_22493C.1
cgtatacatcctatgggcgattggcgtccgcccacgcgtccgcccacgcgtccgtccacgcgcggcatccgatccatcttgggcgggcgccgcgcgtcgagggccagccaaagcttgccatggcggccgtccggtccgacagggtccaccaccaccaccgccgctccgaggcgtcgtgtccggcaacctccgcggccgtggcggcggcgagggccgatgacgccctgcgccagcgcccgcgggggctcgtgcaggtccgggagcgggaccagggcccgctgtcgacggggcaccagcacctgcaccaccatcaccaccagctgcggcggtcggcggcgttcccaccccgccgcccggggccggggcgccgccctcctcagcgctgcgaaagcgacctcaacatcagggagcaccgctcctgcagcgaggtggccggcggcaccgcggcgggctgcgccgctgtgtgctgctgcttcccctgcgtcatggtggaggtcgcggtgctcgccacggtgcgcgcgcccgcggcgctgtgccgcaaggccgcccgcgtgcgcaagggccgcaggcgctctgcctccgcgggccaggccacggagatatacgagctcctcgtggacgacaccggcgtcgtcgaggtggatgccggcgccgccaatgcggtggcgctgcccgtgaagcccgccttgcagctggaggaaaagggggagctggagaaggaggtgtgggcgaggttctacggcaccggcttttggaggagcccgtcgcagctggacgacaacgacgacaggtgatcgggacaggcccgcgagcgagctatccacaagctcctccggcgatgcgtgggcttccttcgttttccgcgggaagaagagaggatcgaggaaagggaaacatgattgtgtgttcgatactacgattacgaacttcgttttcccttcttttttgtttgtttggaaggggaaatacttctcttctattctacaacaatgtcacgtacatgcaatgtaataataaaaaatgtatgtgatatatttaacaatgtgattgatgattgataaaaaaaaaaaaaaaaaaaaaaaaaaaaaaaaaaaaaaaaaaaaaaaaaaaaaaaaaaaaaaaaaaaaaaaaaaaaaaggaaaagggactaaagaattaaaaaaaaaaaacccgggcatcaaataacaaagccctattggggggggccctttttaaaaaaactatttttcttgggcgggccttgaagatctatttttttttttggggcccccaaatatctattttgggg

SEQ ID NO: 99757 - DNA, 338 bp, Zea mays
  Clone ID: MRT4577_22494C.1
cgtccgtaccatttctgattctgcttctcgacgcccgaggaaggcccatgagggggccaggtcctgtcattacccatggctgaacacaaccaccagctctagcagctcggagcagctcaagcatgacgacagaacacgacgggttcggcgcctacagccagtaccccaactacaagaacgactccttgaccgaaatctactgctccgtctagaacaattacgtcgagtacattaatgcattgaaccaacgcatgcacaagcagcacactctgagacgcctatgacatcgaccgcggctcctccgcactctacgacaagcactatgcaaagaacgaccc

SEQ ID NO: 99758 - DNA, 1884 bp, Zea mays
  unsure (1)..(1884): unsure at all n locations
  Clone ID: MRT4577_22495C.1
ggccgggacgcacccctcaccctcacgcctgctgggagaccgaagttacctgcctacattcttgcaccaccgctaccgtcctggccaaaaccaagtcgtgcagggagctccccttgaccctggccgatggggccgccgaaaacaggggtactgacgaaaccttaatgaaaggtgcatactaggaggaatggtgcgaggaaactgccggaaccacacctatgggggacgtctaacgtcttgctttgcatccaatctggagaagcctgaccattaatgctgcttgaaaaggaagacctagcttaacatctacaagcaaccagggcaggcgcataaccagcaacacgtgcgaacatggagtccccggctcgcgctgagggtctccatgccatcaggcgctatgctatgtaccaacgccttcaatggctaggccagcacgaaagtctggtgaagatgtgcacagagcatgaccaactggatgacgacaaaacgcttcgtgccactacatcgtagatcgccggctaacattaagaacataaggtgtgtcacaacctttactacgactgatgctgacaacctacaccaccgtaacacgcgcttgtgaagacgccctgctctctttgccctctattccaggatttgcatttgccattgcaagagcctactgccatattatcatagctatgccaccggagtcatcgcctgagataagtagcgtggctgcgattctgggcaggctgaaccagattagcatggccacggtggagggcgatcaccgagggttcggtgatctggccatggatgtgctaggggatgctttagcaaatcgcaaccttcctgttcggaagaaggctctgaacctggtgacgagcctcctcaccccaaggaacgtctgcgatgttctagggctcctcaacagcgagctggtcgtggcagcctccgccaacctccagattgagtaccgacagatgctggagaaggcgattagagagtgccattctgctcatccggggagtatcctagaattcacgctagatcccaagtatgccgtgttcacggattgtatccgctacaccatggatatcatgaacagcaaccccttgctgcgagtccagcttctgaaaggtcttctaaggacgctccgccatgtcaggtncaccgccggtgtgcgccgctgctgtctggatcatctccgtcttctctgaatcaccggtagaggtcgacgacgccatcgctgcactctcgtgcctcttcaaggacctgctggaccggcgcaaaatcgagaaacagatacttgggagtgaaatggaggacgaatacgtactccctactgaatattatggcgtcactactgcgcgaggcgcacagggagagcgccagcagcggccatggctggtggagatggacgaactgctgtttgtgcgcatagggctcacacggcaggcggatgggagctacgacattgcctcgagttccaagcagagcagtagtagtgctcgtcacgcagataggccgccgtcgttggagcttacagacaatctagcattccttgtgcattctggagattccctcttggcggatttcgtgcaggacatgctgtccgagcttgtagtgaaggcccagagttgcagtgagtccgtttgaactgatggtgatttaaaggtctcaactctcaagcacaatggttgtgctgatcgttggctacttttcttccttacagctagtagtgcttaaaaataggaatggatcggagtagtagaaccttacatccatacctcaatatgcatgcagaatcatgttttttttagagagagagagagaggcaaggaaaaaaatgtttgttctatgttctacttctattactattatagtactttttttaaagaa

SEQ ID NO: 99759 - DNA, 709 bp, Zea mays
  unsure (1)..(709): unsure at all n locations
  Clone ID: MRT4577_22496C.1
tgcagcacttggatgcttgcctccctggccgcatcgcttctcagaccccccaagcagatgtgccatctctcagccgtcgtattcgtcggaaccagcgtcgcgcgctcctcctctgtcgcccatggcgcgcgcatattccctggccaggttcgccggcgttcctcccgcgccctgctcgccgatgccgctcggcgcccagctttcctgcgcgccggcctgaactccagtcgtcgcgccctcctgctctctatttcctgctcgccctccttgcttctttcttccttgcggcgctcactctgtttctctccctcgagctcgccgcggtgcttttctcctgctcccatggctgctcgcccaaccatcttccatggccgccgcgtccctgctctcctctctgccggcgtccagccctaactcggattcccctctctcgtggcgcgtccaaagcactgctcgtccaccgtgccgcgttccagctcggactactctgctcctgcgtatccctcagccctgcgcgcgagctcagcatctccctgtgcaccgcggcatcgcctctccctggctgcggtctcctccagctcgncggagctctctgccgcgcctgctgcttccccggccgtggtagtcgttgctccagtccatggccaagcttgcccagccccgtagcttcccaattccttctagtcgcacgcccgaaatctcttcgtct

SEQ ID NO: 99760 - DNA, 257 bp, Zea mays
  Clone ID: MRT4577_22497C.1
attcggctcgaggtttcactgatctttagggacttctggtatccttctgtagtttgctgccgcagttagccttgtataaacgtactacaagctgatgtagcaataatactactttactttcgggtataaaccgagatggaccgttgctgcataaacgaaaaaaaagaagacaaagagcaatgtgcagcgcaagcttgacatgcctgtgcatcaggatgagagcatgcgaccgtccctagggtttgcagatgtggaac

SEQ ID NO: 99761 - DNA, 321 bp, Zea mays
  Clone ID: MRT4577_22498C.1
ggcaaaaaagggggaaaagcgttgggtgatggaaactgcaaaagctaggattttttttcccagaaaacaaaataaaaacccggaacccatttttttttctccacccggggaacgggaccactgaaccaggggggccccgccttttcgagggagggagatatggtgcgggcccaagactcaagggcacaaacattatgctggggccagggggggcttttcactttaaaaggacacactcaggggaaaaaccgtggatggacaaccgctccaatgctcgagcatgtcacgggaacttcagaagggacagttttaaaaatcggg

SEQ ID NO: 99762 - DNA, 855 bp, Zea mays
  Clone ID: MRT4577_22499C.1
attgggtccctcgaggccggccggaggtgcactccctctcacgttgaggctctcttaggctatctccagctgtttacccatccccatctccatattcaaactccactctgcgaaagtgcagtgtacagtgtaaaacaatgttttgagtgaccatatgagtgaattgctggagatagccttaggtcttagacatggaatagcaaatggacctctagttgagttggttaggtcatgggttcgacttccagcggaagcggattttaggtaggggttaaaaaaaggtcactcgctgatgccccaggttatgcgcacatgagacagactgatctataaggggtggatcctcgtgtaagggctaggaggctaccgtggggatggtctttcaccaccggctaagtttttttatacatggaataggatttgaacttgaggcttctggctttgataccatattcattgcatgcactaaccagttcaatccaaaaacttaagccgataggaagaggtgtcatttatattccaacaagtatcttataatacaattacaaaatttaggagaatgtaagcaactaagcatcgacaggcttcagtgagaccagcatgggctatgccgccccaccccccttccctctcagtttttcccaactcctttagatgtatacattgttagatagcaaagctttgggaataatcaatctatctattgctctgccattgaatgtaaggctacacttttctttctccaagccttttttaacccatgacttgttagagatagcacatttgcaaattgaagcaatgtgccattttgatgtggtggttatattgtttacatcatgattcaacataaattat

SEQ ID NO: 99763 - DNA, 422 bp, Zea mays
  Clone ID: MRT4577_2249C.1
cgtccgcctccccttcccgggctcctcgaccacctcatttagcttctgctccgacgacgacgacgtgccgtggcattggcatggttgacgacgccgtcggcggcggaccggccgttcgctgcgcagggcctgcgcctgcctcgctgtcttctagcaggaagcagcatcagcagcccgacgacgccggctgccgctgctgcgacgaccactaccatcacgacgtgatcatgctgaggcggacgatgagcggtcgggcgttcccgccgccgatctccgcgatcggcaagggcggacggtcttggctctgcctgcaggcgcaccgtgagggtggacggctcgtgcttcggcagatgcgcctgccgtctcatgatctgctgcagccctgccaggaggacggcacttcacgctcctcatgcaccctg

SEQ ID NO: 99764 - DNA, 546 bp, Zea mays
  Clone ID: MRT4577_224C.1
ggtaccctcgggcctgccgggaaaaaaaaaaactaatcgagcatcgcagagataggcgtcttgcgtactcgcctacctgcgcggctcaaactctttccccctatctcccaattgccctccgagcggagcgccgctccatcccgtacgacgacaccatgagggagtgcatttcgatccacatcggccaggccgggatcacaggacgaaaacgcgtgctgggagctgtactgccttgagcatgggattcaggctgacggtcagatgcccggtgacaagaccattgggggaggtgatgatgctttcaacaccttcttcagtgagactggtgctgggaagcacgtgccacgtgctgcttgtgatgaccttgaacccactgtcatcgatgaggtgaggactggcacctaccgacagctctttcaccctgagcagctcatcagtgggaaggaggatgcagccaacaactttgcccgtggtcactccaccattggcaccgagattgttgacctatgccttgatcgcatcatgaagcttgccgacaactgcact

SEQ ID NO: 99765 - DNA, 362 bp, Zea mays
  Clone ID: MRT4577_22500C.1
catcgggaataccgcgcttaagcggaagcgcgacaaagctcaccggcgggtgcacggggcccacgccaaccggggggggggggggcggccgggtcttccccttgcccctgtggggtcccccgcgcccccgggggggcgctggcgggccgcccggcgggccccggacggccggtctctttgaaaccggtccaaatggggtcccgtccggacaccgactcctcgccggcccgaccgcccaaatcccgcccggctaccccccccccccccgttggccgagcgggccccgtcttgctctcacaatccccctttcccccccggcgccccccgcccccgtgggccccccccccctgccccccccccct

SEQ ID NO: 99766 - DNA, 506 bp, Zea mays
  Clone ID: MRT4577_22501C.1
ccaagcttttttgtttttttttttttttttttttttttttttttttttttttttttttttttttttgtttttttttcttttggaacacaaccaggagcagccggccccggggaggaaggaaaaaaaggggggggacgccgcgacccccccggggggggcggggggaaacaccaacaaacagggggggaacaaacaacgcgaccaaacaacgcggggcgggcaacaaggcccccaccccaccaaaaaacaaaaaaaaggttcccaacaacttacacgaggacgacgaggcccgcgccggcgggagggagccgcttgccagaccagcccgcccgaggcgccccatggtggctggaaggggagggcccgccgggaaaacagaggcaccacggccgggggaacccagggggggcattatacaacaacaacaggcaccattcaggggcagccccacagccacggcgatcgcacccaagtgggtacagcaacccctcggtggggctgcattc

SEQ ID NO: 99767 - DNA, 1445 bp, Zea mays
  Clone ID: MRT4577_22502C.1
ttgtatcagaccactccactatggctagtccgctagtaccagcccatttggccgtcaccgcgcacccaagttcagcaaaccacatctaacccttcgatcctcccaaattctccactgccatggctctctcctccctcttcatcaccctccccatccccaatgtcccttcccccaaaccccgccgcatgctcacctcccgggcatcctccgatgctcccgccgcctctgcttcctttgacctgcgccgctactggacctctctgatcgccgatgtggagtccgaactcgacgcggcgatgcccatgcaacctccggaaagcatccactacgccatgcgctacgcggtgctcccgggcgccggcaaggagggagccgccaagcgggcgccccccgtgctctgcgtcgccgcgtgcgagctcctcggcgccccgcgcgcggccgcactccccgccgccgccgcgctggagatgctccacgcggcgtcgctcgtgcacgacgacctgccctgcttcgacgcagcccccacgcgacgcgggcgcccatccacgcacgcggcgtacggcaccgacatggccgtcctcgcgggcgacgctctcttcccgctggcctacacccacgtcatctcccacaccccgtccccggacccggtcccccacgccgtcctcctgcgcgtcctcgcggagctcgctcgtgcggtcggatccacgggcatggcggccggtcagttcctcgatctggccggcgctaccgcccttggtgaggccgaggtcatgcaggtcctgacgaagaagttcggcgagatggccgagtgctccgccgcctgcggcgccatgctcggtggggccgggcccgacgaggaggccgcgttgcggcgctacggccgcaccatcggcgtcctgtacgagctcgtggacgacatccggagcgcatcgggaaacggcaagatgaggagcaacgccagcgtcctgcgctcgctggggatggaccgcgcgctcggcattgtggaagagctcaaggctcaggccaagacagaggctgacaggttctcggataagtacggcgatcgggtgctgcctttatacagcttcgtggactacgcggtggagagagggtttgagctccaggatgcagcggcaactctgtagagtggacgatcgctgttgctactaaacattggaggcttcgagctagtgagatgtacatggcccaggaatttggtgagagctttatctggcatagatctaatccctattttatctagatgttctgaagctcgtaattcgggggatggttcataatggagaattgttatcccggcattagatgtttagaacttgaaattgggtttgatactcgtagtaagctaataaaagtaagtggtaaatgttcatgcaaccactcggttcaaaaaaaaaaagaaaaaaaaaaaaaaaactcgagcccgg

SEQ ID NO: 99768 - DNA, 184 bp, Zea mays
  Clone ID: MRT4577_22503C.1
ggaccgaatgtgacatctttactatataacaggagttggatccataattgataacttatcacattatgagagaaacaagggtcacatgatcgccaaagttgactgtggaacgacgggctagatcactgacgaaattatcaccgcatactccaagagcctaaatatctggtacatgtaattgacc

SEQ ID NO: 99769 - DNA, 281 bp, Zea mays
  unsure (1)..(281): unsure at all n locations
  Clone ID: MRT4577_22504C.1
caccgagcacacccctcgagctcaccttacctccactccagctccaatcagggtggttaccatagcgagagagctagctanaaagcccctatctcccgcaggcacctgaaccctgccgtgaccttcgacgcctctcgagtcggcaacatcaccctgtctcgagcactcctgtactgaaccgcgcatgtagtagcgtccaccgtgacgtgcttcctgctccgcttctaaacgggcaggcatggccacattcaccttcaggcttactttcacgtcgttgtata

SEQ ID NO: 99770 - DNA, 461 bp, Zea mays
  Clone ID: MRT4577_22505C.1
gccgcccctcgaatcctggctgcagatacggcggcacgcgcctgcgtgctgcgcctagcttagaaaggcaccgactcacgaggcccccaggacgcaagagaagatccgggataacaactacaaacgcctgcgtctatagcgagttatgcgcccggacggaatggaccatcagagcgtatatgctcaggggacacagagtgaaacaattgacgtgagcatgcaagccaggagcgagaggctcctatatatgaacacgattgggagacgagagatgctctaagggaaacgaggaaagagtggggtcgtggacgagaccctagatgttgtccaagaacatcaattggaaagggagctggtgggagctgagatctagatggatgggtagaaagaggcaacaacaacctgcatatgtggaagcaagacgagccacattgaccaataatacttacggttcgagaaca

SEQ ID NO: 99771 - DNA, 1770 bp, Zea mays
  Clone ID: MRT4577_22506C.1
gccgggaacggggcacgactctgaccaccgcgccgattcgatcttcctgccggcgcggggcgcggcgcggggcgagggctcgagcggagcaatccatataacccgtttataccctacctcaattccactcatcagctcactccggcgccatcatcttccttctctcagttcctcacctcgatggactcacttgccgccgcctgcctctgctcccgccgtcgccgcgctcgccgactcctcctggccgctgcggcggccaccactgggtacggcctctaccgcctctaccgttaccaccgccgccgcatcgtcgctgccctctcccttgccgacgccgtgtctcaggtcggttccgacctcgccgaattcctccgctccgagtccgaccaggtcccacgaagcctcctccagctctccaagctcgccgcttccgaacccgtctcctccgccgcgtcttccctctccgagtccctcgcgtccggcgtcctccgcgccatctctcaccagcgccaattacatcaacaacagcagaaaaacccccaaaccccgctccaagatcggatcttggatcgtctcctctccccggagggcgccggattcgcttccgctgtcgtcggaagcttagcgaggagcctcgtcctgtcctcctgcgacgcccgcagggcggaggccggcgaccgcgaggagccgcggtggctggctgcgctctgcagcgccacgggcaaggaggcttctgcggacctcgtccgagtcttcgtcagcaccgccgttgccgcctacctcgaccgcaccgccgcagtgcgcagcaacaaccatctgctcgctggcctctctgatccaaggcacgaagcccaggtcaaggacctggctgtctctgtctgcaacggtgctatcgaaaccttcctcaggacgtcgcggcagcttgccaaggaggcctccagtgctcgcattgaggtaacatcaatggagcgtgtggtggaagattcagacagcaactgcgtgatccacaaggtttcaagcacgctggccgctccgagcaacaggagatttgtactggacgtcacaggcagggtcaccgcggagacggtgcggtcattcctcgacttcctagcacagcggatgtctgatggggcacggaagagcatcgtcatcgcccgtgatgaagttgcggagagagggctcgttgctgtcaagtacctcggtgccaaatccatggctatcttcaccatctccttggcattatgcatgcacattttgatgggaacaaggttccttttgccggcatagctacctagcttgtggggagctggaattccatcgcaggtgattgattactacttgtcctgattctaggtgcagagtaagttatgtagattgcaaattgatcctataataccagttgtctttgtgtgtgtgtgtgttggtgaaaagtatgtaaactttagctagaacccgctgggatttgtagttggtttttgtttgtttggttgaaggaagtatatatgcatctgaaatgacactggccaatttggcaatgtgattttgaggttagacacctctattgttgcgttctaatagctgtcactagattgttgttgctggttgtttttgttgtcataagctgttgatcaatgtaaaacaaccaaacagagcagcacgagctggaatcttgactgcttgctcttgaaactctctcttttgtacacttcttcagttgtaagaaagtggaaaatgaagtgaataatgaagtgaagcttccctttgtttcag

SEQ ID NO: 99772 - DNA, 284 bp, Zea mays
  Clone ID: MRT4577_22507C.1
agcccacccgacgccagcacggaaataacccacgggggcaacgaagaagagggaagcggaggccagaagccgacaacagacaggggagggggacgcgaagaagagagcatgaggcgaacaagggcgacggaccgaaacgcagcgagcacactcagacaacacccccacacaccacaaacagaaccggccacagactgctcgccacgacgccggacccgagccccggagcccaagagcacaacccgcgacggggccgacggagaacccggcaccgaggagagaaa

SEQ ID NO: 99773 - DNA, 229 bp, Zea mays
  Clone ID: MRT4577_22508C.1
actgttaattcttgagcccacgcgtctccagagtatcttgcctccaactcttttcagcagtgcggcactttttggcacagtcttgattgactatcatctaacagccagaatacagaagctccagcatgggttccatacacgtcatttccacatttcgagagtccatgatggcttgctgaggcaacctttttctgttgttctggatgccgccagggcctgcaaccaaacc

SEQ ID NO: 99774 - DNA, 773 bp, Zea mays
  Clone ID: MRT4577_22509C.1
agaatccttcacatccagctagctagctaacagactaacaatcactccctctcctcactaactaactacacactagctagtcgatcgatctgtccggcctgaatgaacggtcgctcctcctccctcccactggctgcgcgcgcgggcctgcctgcgaccctgcttgttgttgctgcgggggccggcccggactccgtcgccgtgagctacctgcaggtaactgactccgtggctgcctgcctccctcacgcactggatagcgagcgcgccccctccctccgctgctggatgcagctgcgctcgctcaatcaacacgcgcccgccgtcggggaccgaccggccacccgcctctgactgcctaccaagactgaccggctcggtcgcgggcgcagtatggacgaccaccgccacctacatccccagtgagtgcgctccctccgtgtgcgcatccatcacacccaccactgaatgaacataaactgactgatcgaagcaaccataatgtaggtcgctcgctcgatggatgcgaacgtacgcatccatcacatgcatgcagccgccgaccaaacatatacgacctacctacgtgtgatgcatgcaactgactggtacttaataaagaaatagagcatgcactaacgatcgatccctccagctaccctccctccaatgaatgccgccgccgcctgcaccttacttaccatgcttgatgaagcacgctagctaagcaacacctacctgcacgtgcgtgtgctttcctggctcgctgtctg

SEQ ID NO: 99775 - DNA, 367 bp, Zea mays
  Clone ID: MRT4577_2250C.1
agtgtagacatctagcagctgcactggcactgccctcccaggtggtttggctcggtcatggtctgcctctggctgagttttaacaggcaccgtgcgcgcgccggtgatggatatggccgactggggccccgaggtggtggcggtggccctgctcgtgctgctgtcgccgggcctgctgctgcagctgccggccaagggcgggcgctacgtggagttcgctatcttccagaccggcggcgcctgcatcttggtccacgccatcatcttcttcgcactagccaccgagttcctcatcgccatcggggcgcacatcagcacggaactagtcgaatagccccatatccgggaccgcaatctttattcctta

SEQ ID NO: 99776 - DNA, 254 bp, Zea mays
  Clone ID: MRT4577_22510C.1
aaaaaaaaaacccccccgggccccttaaatataaatggggataaaacaggggggaagggccaaaaccttccggggacccggttggagatacaaaacccccccttggcccggccccggtattaaaaaaaaacagggggcttccaacaaaaaacccccccgggaaaaaaaccccacattttcgggttagtccccctccccccatgggcccaaaacaagggccccacgggaaaaaaacccgctggtacaaaaggggg

SEQ ID NO: 99777 - DNA, 524 bp, Zea mays
  Clone ID: MRT4577_22511C.1
catcctctgcatgctagcaggctaggatacagacgaactggcgaagggcaacatcagttatccccaacgcggcactgtcagcaagcactgaacgcaccatactgtacaagacatggaggcacccagcccggccgcaagcaagggccccgcatagctcggcagacgaagcgtgcgaagaattgccacgcccaactgctgggcctcgtggggccattgtgcaatgccagactctgaggtccaacatgccagcggcggctgggagaggatgaaccctcgaggagctgaaggctggcggccttccaaagaagcttgaaccaaccataggcttttctggggaacaccgccgcaggaacaaatcttttccgggactgcatgccaacgtccagaggcttaagacgtacaacgacaaactggttatcttcccaatgcccgctcacactgccaatgccggcaactctactcctgcagagcttgccacggccacccaggcccagggtgactacatgcatattactcggggtgag

SEQ ID NO: 99778 - DNA, 3184 bp, Zea mays
  Clone ID: MRT4577_22512C.1
atgacaagtaacttcgtcacgacgataaagagcctgaaactgatcgagggttgcaaggccgcgcaattatacgccttaagctccgtcggggcagcctccacgtccggctcggcggatgccggcgggagcagcatgggcaagccccagcccccgcctcctccaaagaccatctcgatgcggtccggatcgctctactacccacacacggcgccgtccacgtcggggtccttcgtgcccgaaccgcacctgccgtgcggccttccggtggccgacgcgctcgagccggccctggacgcgtgcctgcgacccgtcgaccacgtcggcgcgctcgccgcgtcgtaccggcgggtgtcggccgccacgtcgggtagcgacgacgatctctgcgacgcgtacctggagcagcacgcgctgttccagtcgatcggggacgcgcagctgatccggggggcgctgcgggctgcgcgcgtccacgcggacaacccacaccgacgcgccgtgctcgccgcgtggctccggtacgagcgccgcgaggacgagctcgacccagcaccgccgccgctcgcgccctgcaccgcgacgacaccgatgctcgagtgcccccgggccgcggtcttcgccagcgtgtcccacagcgtggacccggcgtccccgtgcccgtgccgccgcccatcgcattctctcgtcgtccctccaccccaccgcctcaggcgcagcacgttggggttgggcgccgcctccgagatgagcgaggaggaggagccggagaccaacgacctgtggttcatcatcggcgaggaggaggtggcgtgcgagcgctcgtgcatcgcggcgctctcaaagccgctcaacacactcctctacggcgggttcgccgaggcacaccgcgaccggatcgacttctcccgcgacggaatcacgccgcgcggcatgcgcgcagtgtccgcctacagccgccacggccgcgtggacgactttccgcccgacatcatctcccagctcctcgcgttcgccaacaagttctgctgcgagggcctgaaggcggactgcgacaaccggctcgcagccatggtgcggggtctcgacgacgcccgaaccctcatcgacatcggcctcgaggaggcctcccacctcctcgtcgcctcctgtctccaggcgttcctgcgggagctccccaagtcgctcacccacctggacatcgcgcgcctgctctgcagcccgcaggggcgagagcgccttgacgtttccggtaacgcgtccttcgcgctgtactacttcctctcttacgtcgccatggagcaggacatgaggtcgaacaccacggtgatgctgttggagaggctgaatgagttcgcggagcagccatggcagaagcagctggcgctgcaccagctcgggtgcgtgatgctgcagcgcggcgagttcgaggaggcgcaggagtggtacgaggccgccgttgccgaggcccatgtctactcgctcgccggagaggcacgcgccaagtacaagcgcggacacaagtacgccgcgtacaagctaatgaacagtgtcgtcggcgactacgacgaacccgccgggtggatgtaccaagagcgctccctgtactgtgtcggcaaggagaagttggctgatctgcaggcggcgacggagctggacccgacgatgacgttcccgtacaaataccgtgcctgcacgttgttagaggaggacaacgccgagtccgcggtcgcagagatcagcaaggtcgtcggtttcaagatggcgaccgattgccttgagctccgggcgtggttctaccttgcactcgagcagtgcgagttggctgtgcaggacgtcagggcgatactgacgctggatccaacttacatgatgttccatgggagaatgcacggggagcagctgattgagctcctccgaggacaggtgcggcagtgggatatggcagattgctggatgcagctgtacgatcggtggtcggtggtggatgacatcggctctctggcggttgtccagcagatgctcgccagggagcccggaaacagcagcttgcggtttcgacagtcgcttctcctgctaaggctaaattgccagaaagctgcaatgcgcagtttgcggtgtgctcggaacagttcactccatgagcatgagaggcttgtatacgagggatggatcctgtatgacagtggacatcgggaggaagcattagccaaggctcagcagtcgattgggcttcaaagatcattcgaggccttcttcctgaaggcgtacgctttaggagattctagccttgacacagattcttcgctctccgttgtgcagcttctggaacacgctaacagttgtgcgtccgacaaccttcggaaggggcaggcatacaacaacatggggagcacctacgtggactgcaacatgctggatgaggctgccgagtgctacggcatagcgctgaacataaagcacacacgggcgcatcagggtctagctcgagtccatttcttgaaaaacaggaagaaggctgcgttcgaggagatgacgaagctcgtgcagatagctaccaacagcgcgtcggcgtatgaaaaacggtcagagtatggtgagcgcgacgctgcgaggagcgacctggacacggcgacgcttcttgatcctacaaggacgtatccttatagatacagagcagctgttttgatggatgagggcaaggaagaggaggcgatcgcggagctgtcgggagccatagctttcaagccggacctccagctgctccacctccgcgcggccttcttcgactccatgggcgacagcgagagcgccctgcgggactgcgaggccgcactctgcctggacccgacccacggggacaccctggagctgtacagcaaagcctccaccaaggccggaactgaaaccgagagctaggcagccagccggccggccggccggcaggccgcagctctcctcgtcgtcgagtcagctgcggtttttgcgaggcaggatgatgagacgatctcttctctactctcatggggtggaagctgcagatcagtgaggcaggagcaccggaacatgcacatatctcttctaagagtatatacaagagccttagttctgttactgttagagttggacatggggaggcaacacgcactcaatctcctgctgacctggctctctttctccagccgcc

SEQ ID NO: 99779 - DNA, 3707 bp, Zea mays
  Clone ID: MRT4577_22513C.1
atgaccaataacttcctcacgacgataaagagcctgaagctgatcgagggttgcaaagccgcacaattatacgccttaagctccgttggggcagcctccacgtccggctcgggggatgccggagggagcagcaacggcaagccccagcctcctccgccgccaaagaccatctcgatgcggtccggatcgctgtactacccgcacgcggcgccgtccacgtcgggcgccttcgtgcccgagccgcacctgccgtgcggcctcccggtggccgacgccctcgagccggccctggacgcgtgcctgcgccccgtcgaccacgtcggcgtgctcgccgcgtcgtaccggcgggtctcggccgccacggcggggggcgacgacgacctctgcgacgcgtacctggagcagcacgcgctgttccagtcgatcggcgacgcgaggctgatccggcgggcgctgcgggccgcgcgcgtccacgcggacaacccgcaccggcgcgccgtgctcgccgcgtggctccggtacgagcgccgcgaggacgagctcgacccggcgccgccgccgctcgcgccctgcaccgcgacgacgccgctgctcgagtgcccccgcgccgctgtcttcgccagcgtgtcccactcccacagcgtggacccggtctgcccgtgccgccgcccaccgcttcctccagtcacccctccaccgcaccgcctgaggcgcaacacgtcgggcgccgcctccgagatgagcgaggaggaggagccggagaccaatgacctgtggttcatcatcggcgaggaggaggtagcgtgcgagcggtcgtgcatcgcggcgctctcaaagccgctcaacaccctcctctacggcgggttcgccgaggcgcaccgcgaccggatcgacttctcccgcgacggcatcacgccgcgcggcatgcgcgcggtctccgcctacagccgccacggccgcgtggacgacttcccgcccgacgtcatctcccagctcctcgcattcgccaacaagttctgctgcgagggcctgaaggcagcttgcgacaaccagctcgcggccatggtgcggggtctcgacgacgcccggtccctcatcgacatcggcctcgaggaggcctcccacctcctcgtcgcctcctgcctccaggcgttcctgcgggagctccccaagtcgctcacgtgcccggacatcgcgcgcctgctctgcagcccagaggggcgagagcgccttgacatctccggtaacgcgtccttcgcgctctaccacttcctctcttacgtcgccatggagcaggacatgaggtcgaacaccacggtgatgctgctggagaggctgaatgaattcgcggagcagccatggcagaagcagctggcactgcaccagctcgggtgcgtgatgctccagcgcggcgagttcgaggaagcgcaggagtggttcgaggccgccgtcggcgagggccatgtctactcggtcgccggagaggcacgtgccaagtacaagcgcgggcacaagtacgccgcgtacaagctaatgaacagtattctcggcgagtacgacgaacccgccgggtggatgtaccaagagcgctccctgtactgtgtcggcaaggagaagttggctgatctgcaggcggcgacggagctggaccctacgatgacattcgtccgcccacgcgttcggtgcgcgctgctggaggaggacaatgctgcgtccgcgatcgcagagatcagcagggtcgtcggtttcaagatggcgaccgattgccttgagctccgggcgtggttctaccttgcgcttgagcagtgcgagctggctgtgcaggacgtgagggcgatattgacgttggatccaacctacatgatgttccacgggagaatgcacggggagcagctgattgagctcctccgaggacaggtgcagcagtgggatatggcggattgctggatgcagctgtacggtcggtggtcggcggtggatgacatcggctctctggcggttgtccagcagatgctctccagggaacccggaaacagcagcttgcggtttcgacagtcacttctccttctaaggctaaactgtcagaaagctgccatgcgcagtttgcgatatgctcggaacagcacgctccatgagcatgagaggctcgtatacgaagggtggattctgtatgacagtgggcatcgcgacgaagcgttagccaaggccgagcagtcgatcggactccagagatcattcgaagccttcttcctcaaggcgtacgccttaggagattctagccttgacacggattcttcgctctccgtggtccagcttctggaacatgccaacagctgtgcttccgacaaccttcggaaggggcaggcatacaacaacatggggagcatctacgtggactgtaacatgctggatgaggctgccgagtgctacggcatcgcgctgaacataaagcacacacgggcgcatcagggcctagctcgagtccactacttgaaaaacaggaaaaaggttgcgtttgaggagatgacgaagctcgtggagatagccagcaactgcgcgtcggcgtatgaaaagcggtcggaatacggtgagcgcgaagctgcgaggagcgacctgaacatggcgacgcttcttgatcctaccaggacttatccttacagatacagagcagctgtactgatggacgagggcaaggaggaggaggcgatcgcggagctgtcaggagccatagctttcaagccggacctccagctgctccacctccgcgcggcgttcttcgactccatgggcgagcgcgagagcgccctgcgggactgcgaggccgcgctctgcctggacccgacccacgccgacacattggagctgtacagcaaagcctccaccaccaaggccgaaccccagagctaggcagccagccggccggcggcaggccgccgctctcctcgtcgtcgattcagctgcggtttttgcgaggcaggatgatgagacgatctcttctctactctcatggggtggaagctgcagatcagtgaggcaggagcaccggaacatgcacatatctcttctaagagtatatacaagagccttagttctgttactgttagagttggacatggggaggcagcaccgcaggagattgagtgcgtgttgccttaagggtagactgcgcaggtgaggtgacaaagagcatgcactgcactgcactgcaccacatatgtgcatcgaaggttgaagacgaccagcacctccggtcagaagagaggaaggagaggcggctggagaaagagagccaggtcagcagggtgttcaaaccgccggcggtaccaacgaatcttcctctttttcttcttttgcttgaatttatgccttgtgacgtgcatctggaggcacgactgattacaaaagaatacgagtttttttaaagtaacgcagcgcgaaagggaagattcttcctgctgcggattgcagtgggtattatgtatgagtcgtggctccgtcgtgcctccagctaacgaggccctgacatgcatctgctgcattgctacacgttcgttcgtgttcacaactacgctttgttctttcgttcaaaatcaccgaccgcagcttgttcagctagtactttgttatttggccaaataaaaaaaaaaaaaaaaaaaataaataaaaccaaaaaaacttaacaaaaaaaaaaaaaaaaaaacaaaatg

SEQ ID NO: 99780 - DNA, 317 bp, Zea mays
  Clone ID: MRT4577_22514C.1
ctttagaaaaaaaaacccaccgcgctcgcgtcgctcccacgcgcggctcccaagcccgccgccgctttccctctctctcttctcctctcctgccacgccgccgtcggagctggccgccggcatggccgtccggccggcagggagggtggcggcgaggctctcttcttcgcgttggtgacgcgctccgcagcaggccggctattcatccctcgcgcggatgcgtggatttgactgggtggctgctgcggatgaggaggcgccgcctggtgcccgtgcaggggcaggggacgatggttgtgtggggtgggccggggccc

SEQ ID NO: 99781 - DNA, 368 bp, Zea mays
  Clone ID: MRT4577_22515C.1
atgccgacaaagctcttcattctagttatggttacatgcatggcaacctagttaactgcccgcctgattcagatattccatctacataaaatctatctcactgagagggcgtgcacacttacagaggtggaaaagcatgaatagcacaaagatataggcatgtatgatacatgccttgatgcgctccgtacttaggtgaccccatcttacgtggtactagaccgccagatagtgggccccgacagggccacgggttacatatgggaggaggtcatgagctatccgcttctctagcatcttctttaggaggggcttgaagagagaccatgcggcattcaacatatttgagcggatgaaaagcctgcgct

SEQ ID NO: 99782 - DNA, 813 bp, Zea mays
  unsure (1)..(813): unsure at all n locations
  Clone ID: MRT4577_22516C.1
gggtacctcgaggccggccgggaacttcacttgataccccaaatcatcaatcaacatggcaccctcagcagttgattccacccaccacagcgccgacggtaaccgtcctggcgacatccaccgcgactatctcgacgacaggaatgccaaagcccaggacaccctttacacaacctcaaatggcgttcccatgcctcacccttacgagacccagcgtgtcggcgagaacggtcctctcctcctccaggaccaccacttgatcgacttgctctctcacttcgaccgcgagcgtatcccagagcgtgtcgtccacgccaagggtggtggagcacacggtatctacaggacgaccgatgctctcgatgacctttgcctggcagacatcttccagcagggccatgagtgccccatcaccgtccgtttctcgaccgttggtggcgagagcggaactcccgacttggctcgtgaccctcgtggtttcagtgtcaagttcaggaccgcagagggcaactgggacatggttgcaaacaacacccccgtcttcttcttacgcgacccagccaagttccctcacttcattcacacccagaagcgccaccctcagactcaccttacgcactccgatgactctactgtcttctgggattacctctcccagaaccccgagtctgtccaccaggtcatgatcctcatggcgtgaccgcggtattccccacagctggcgcaagatgcacggctacgccggccacacattgaagctcgtcaacaagaacggcgactgggtctacggncagatgcacatgaagagcaagc

SEQ ID NO: 99783 - DNA, 501 bp, Zea mays
  Clone ID: MRT4577_22517C.1
ggggggcaaaatctttttttttttgcaaaaacaattttcccccaaaccccccccttttttaaattttttgggagtcccaaaaaaaaacaccccttgccgggaaaaaaaaacccataaacaacttcctttgataaaacaaaaccttttataagggtaaggcccttttccctgccccagggaaaaaaccgggtaaaaaaaaaaaaaggcaaaggcccccccctttttttgtttttttattgaccgcccaagtttgcccaaaaaggggaagggttttcccaccccctaaaaactaattgttctaaagggttcaaacccaatttttgggccaagccccattttttggccaatgtttttccccctaggaaaaattgccccaacggtctttttttttttaataaaaaaaccccctcccacccccaaaattcctgagattaccgccattgggggaaacccccggcttaacccttgggagcccatttttggattttcaacccccccaaa

SEQ ID NO: 99784 - DNA, 253 bp, Zea mays
  Clone ID: MRT4577_22518C.1
cccacgcgttcgcccacgcgtacgatcacgcgttcaccgactcgtatgacattattgatgaggagcttagcgttcgcggtcagagggcttacttcttgcaggagttagcacaccggtcctagaactgcgaacgcatggatgccaatgtctaagctcacagacttcgtctcatgcgctaactaccattcacttgagctgcatgatactcaggagaaccttacgcaatgtgctgacgaccttggcattccatttg

SEQ ID NO: 99785 - DNA, 625 bp, Zea mays
  unsure (1)..(625): unsure at all n locations
  Clone ID: MRT4577_22519C.1
gagaaaagtaaccacgccacgtccccacagcaagcaaaaggaagctgccccacctgtcggcgacaggcgagtaggcagtaggcacggccggggacggctcctccttgcccaccgcggcgtgcgcggaccgtgcgtccgtgccctccggctccggcgcaccgctccgctcattccatctccatccaccgcgccccaaatcgcacggccccgcctccccattcgcgccgatcgaatcccgaatcggcggccatgagcgtggtcggcttcgacgtcggcaacgacaccctggtggcggcggcggcgcggcagcggggcattgatgtgctcctcaacgccgagtccaagcgcgagtcacccgccgccgtcgccttctcccacaacgcgcgcctcatcggctgccacgccgcgtccgcctcgtccgcccacgcccccttctccagcgtcaaacgcctcctcctgggcgccacggggaggaacccggactcctccctcctgcgcgacctgccccgcctgcctttctccgtctgccacgcctgcggtggcggcgccgtcgtccacgttgaccacatgggggcgccggatcgggctctctgcgacccatctgctnttgatgctggtcggctac

SEQ ID NO: 99786 - DNA, 796 bp, Zea mays
  unsure (1)..(796): unsure at all n locations
  Clone ID: MRT4577_2251C.1
ggatttgtgttcggtatanttggttgaaatttcaaacgagattgtgactggaatagcatgactacaggatataatgacagctcatttcctctagtgcagtattctaataaacatctagtcttccaatacttctgttctgttgttagaacttatttgcatataaaacattaggaaggaggagtgttgctcatgcttgtgtactagctcttagagaagatttccctgagccatctatatatttcttaatgtacactaaggaggaatgacaatctggtggcctagaccagaagaaaggatttaaactgttgctttctcattttcttgtaactggttggttgagtggtctttagttttcaaatgaactgtatatttagaaaaggtgtaactcatgcttcagttacttttctatatctttgaagattcatattttataacataattatgtgatttatgctgcataccagttgctatgccatacttcagggtggtaatgagctctaaactttacactataaaatttaaggatcggatcagattacaatcacgctctatttctatttaattttgaactaaaattaattaagggttcaaacaaattatgaagaaacatttggatcgcgatccattaccacccctagccacactattcttaaatcaattggtggcttagcttacaagagtatgagagtttccttcaaggctttgttcggcttgcttttttacatccagtttgtcaacgttggtttcaaaaggcttcatgtcttagctttcagtatatagttaaggaaacacttaa

SEQ ID NO: 99787 - DNA, 282 bp, Zea mays
  Clone ID: MRT4577_22520C.1
actaggggttaacagtttaattgggggaagtaacataaaatttaattttgggttcaaatttttcatacattccgaactgagccctttttaacaacctttccctagtaattcttgcaaatcgatgtttaacagcttgcctcgcagtttaatttttttaaaggccttgggcgacatttggggcttaatttgcccttgccaacttaaagagggaggttgcttgcttgcttgaccggggttttgttttacggccttaaaaaagcccggtggggaccgcccgacccc

SEQ ID NO: 99788 - DNA, 590 bp, Zea mays
  Clone ID: MRT4577_22521C.1
gccggccggtccgggtccttgaaaccctctggattcattccgccgcagccggcagcggcgcgccgtgtgctgacgcggccgcattttcgggttggggtctttgcaggacggagtatgaccgtcgcggccggcgagctcgaagacgaagacggcgtgcgcgggcggagccgtggcccgtgtcgtcagagcaggagcgggagcgggtggcggagcgtgggcgccgctcgccctgggtgttcagcagccgagacgtcgctgttgctgccgcgcccaagccgcccgcggacccgagcagcgggcgccgggccgaggacgaggtgcagctggccgccggtgcgcggcgcgggaacgcgaccgcggcgcgcttgaagctcaggctgcgcaggctttgcgcgtagggcggttctcgtcggagcggcggcggcggcgacggctacacggcagctctctccctaaccctagctttgtataccatgatgaattgagaattttgcaaacatgacacggctacggcgggcttcaaacttttggcaccgccgtcgtggcaattgaaagtgtggcatgaaaaaaaaaaaaaaaaaaggccccta

SEQ ID NO: 99789 - DNA, 2444 bp, Zea mays
  Clone ID: MRT4577_22522C.1
tttttttttttttttttttttttttcacaatgaaaagcaccacaaccgttccttttttttttcccgacatgtagctattattacatgaacaaacttggtgtgggtgtgcacctccattgcccaagtatttgatcctatttgaactaagatttgggcacgttaatgaaaaggtagaaattactctatggactattgtttgtttacaaacaaaagaacaactgccactaaaatttcagcaagaaggtgcgtatctccatgggtcctagttcaacgactagagccctactgtcaactgggccaccttttactgcggcaggaccagtttcagtgttcccaatgaccctccagctgagcttcttcatgtctgacttcttttggttcgcggagaggctagtctccgtcaattccttgatagttctctttccgaacacctttttcagatcaacctttgccaccttggaatatctcgggtcctcagcagcttgaaagagatgggccaagcggagtagtgtggtaccatcatctagattctgcaaagtaacaatggcgacattatcaggaaggctgtagttggcattcatcataccagctttggccacgctgtaggatttcgagctggtctcatcctcatgagtgaaagcaaggagaaagggtgagtagacttgctggccatatgtacgtcgccagtgagctccatgccctagcttctcgacattgacgtagtaattgcccctggccgtaagcccttggcaatcttgatccacgcaaaccacctcgtcaagtggctctccgacacccctgccatcatccttaagtaaacgcctgtgtagcataatctctagctgaccatcctgaatgcttgatgctccgacagcacggtccacaagcacagatagctcatatttttcatctgctacatacactcctaggttcaccggatagtaatttcctgcaactggttgagttacttgaagattccagtcctccctgtagtttctcacccttttgaggaaatcccttccattggagtctgtataaaacgtactgtttgtgaccatatttgctgtcagccgtgtgatgacctccttccctacatcatcatcgacagggatcggcccaatcgtgtattcaacttcagcatgctccttgtttttgtagagtcgtgtaatctgataaatccacgagctgaattgctgatgcacttcgtcaaccagtggtccacggataactttaagtggcaccgaggatgaaaccgtagtcggtgtattaccatctggtcgaaatatatatgctccagatgcctgtgagtctgaggcatcaccctcacttgatctgtaccaaagaaagctttgttgaactggtaaatccactcctgagatggaattgaatatcctattgagttgtccagatgcttttgagaaggacatctttagatgtcctggtccaacttcaatcgtgctgttacttggggaaaccacgtccgagacatgctcagtactgttgtatcctgctccagttgattttgaaatgaagtaggaattccagcccattggtggtacagaagcttgaaatagtagccaatacttaggggccttgtgtgttgtgattccaagataagccttcacataaaactttcttaaatttctcgtcacattatcaacctcaactagctgtgactcaacaatatttccatcagagccttttacaactaggttttgatcattgacaggaactcttatgaagtcactacgttcccatccaagaggattgtaaacaactacaactaaacgctttgttgatgaaattgcttcctcggtcgaagggcagtagcttatattgagaagtgaacactgactaaattttacaacagaggatccacatgtcccgttggagctggtcagacaagccagagcggtgtttacacctttttcaacctttgctgctcccagcgcaagccgtttcgcgtagtcatcagtcgtgtgctgtttcgcagtacctgagactgcatcgtgatgctgggcaatccccatcgcatcttccaagctggaaatgaacaatcccaaggagctcctaccgcccaccaaaaactctatctgacgtgcagccaagtagtatccgctttgtactcgaacatatcgcttgaaagttggacggctcgtaaagtacccagtccagtatgcattcgttgaatcagcgtaggggaaatagtcgtcttattttactggccaagattcattcgatgcatgcttagcatctgtgtagatagacggagtagaatacaacgcatgtactctgccgtccttgttcacatgttggataagtttgtccatattccggaaccaggattcagcgtactggtagttaaaatcatcccccatggtccacattatgtggtctgtacgtgtaacatttgcctgtgctaaggctgcagcaacaaaatcatc

SEQ ID NO: 99790 - DNA, 322 bp, Zea mays
  Clone ID: MRT4577_22523C.1
gcgttccacactccgctgctccgccatggcgaaccgctccaaggtctggatcgcgctgctgctcgcgctgaccgaagctctctccgcccggacggaagatgaacccgccaccgcggcagaaggcgaggccgtgctaaccttggacgtaaacaggttaaactaggacgctaccacacacagcttaatagtagctgagttcaacaccacatcgtgtggccactgcaagaaacttgctacatagtatgagactgcggtcaaggcacttatcacgcatgaccgaacgatagctctggctaaggtcgatgctaacgagaagaagaac

SEQ ID NO: 99791 - DNA, 312 bp, Zea mays
  Clone ID: MRT4577_22524C.1
gagtcctacctaccccaccagacgtgacgtcgcacggtcactgacgctgcccgcacccaggcgctgaaactcaggtgagcgccaacgagatgggcctcgtccaggccagtctgccccaacactagcaatgctgcccgctgctggacgacctgaaggagctccacgccacagtgcgcctctggacctgcatctcgttaacgatcctcgaatccacctcgacgagcccctgaacctcaacctcatcctccacaattgcggctacagatgtccacacgactttacttgacccatctaattgagctgaatatggag

SEQ ID NO: 99792 - DNA, 1936 bp, Zea mays
  Clone ID: MRT4577_22525C.1
ctacaaaacactcccttgctctaagcacaactgatggaccactacaaaacactcccttgctcgaatccgctaagcacaggcccaaaccgtccacttggaaactcgaagcccatcctgtctttcctttgcgtcagtcgtcttcgacgcaaggagaattgggaattcaggaatcaggatgcggctctccttcccccttgtcgccggcgccgtcgtgatcggagtgatttctgggaatgttatatttgggccaccgcttcagaagtactgggcagagaagcagcagcaagaggcagcaaaagaaggccaagctggttcaacctgacaaaatgtcctccccttctgcagttacacggagaaatgtgtactcctcggtcctgaactagcatcggcttttgttagcattggttacatttagttgcccaagttttcggcgctggaagaagacaccgtgcaatgcacagaaagatttgaaaaacgtttaaatgctggttgatctcattctgaaatacagtacctttgatgaatgcaccgtgcaagacacggtggagacaccttcgaatgatttcaagcctcctttgaaatacctttgaagaagacaccgtgcaagacacggtattgtagtttgcatatctccgagtgcaggttgatttctgaaatagctagaagtcaggatcacagcgctgtatatcctactatcctagcctctttttcgtggcttccggatcttgctgggccgaccgttcgtctgagttctggcccaaattggcttttccggaatacggctcggccctctccagtacaacctccaccgctttctgaacacgaattagaaaaggacgcgatattgcagaagctcccgcccatttttcaccaatcaccagccctagccgcccattttccccatttttcaccaatcacaagaacctttgcgtcctccggcgaggcggcaaccgccggatccctgaacgtctgaatcctggagtgaaccccgcacaggatggcgaggaaagcgaaacccgccgcccaaggcaccgcggtcgtggctgccgccaccggcgtccagtactggctcttgaagacggagccgggcgagtggtcgtggtccgaccaggcgcgcgccccgggcggcgtcgcgccgtgggacggcgtccggaaccggcaggccatgagcagcctgcgcgccatgcggccgggcgaccgctgcctgttctaccactccggcgccggcgccgcctcccgccgcgtcgtcggcgtcgtcgaggtcgccaggccctggtacgagggcgagggcgaggaggcggtggccggtggcgccgtggacgtgcgggcggtcggggagttccggaaccccgtccctctgggtgtcatcaagaaggcggcgggcgaggtggaggggatgaaggacttcgcgctgctccggcaggcgcggctgtcggtgatgcccgtgccggcgaagatctgggactgggtttgcgacgcgggaggcggcctcgtgcaagacggcgagggtgaggacgaggaagaggaagaagaggcttgattccgcagaccagcaaatgtgaagaaggtacacggccctgattttgctgtgcaacagagaacttgatcagtgttgctacatctctatagtaaatctgtaagttatctgcttattctgacgtcttcttgtagaaccaagttgctcctgctggtgacatgagcagttgcaacttgcaaggcggcgttgtgtgggagtccttttggcctgcaagtgttttgctagctttgacaaggcactcctgtttcttcagtgttcgccgtctcggcgccgaagtgcccaagaaaaaaatgtatttactatttgatctactcctatgtaagttcagtggttcatgtagccaagtagcttggatatctatgaaggtactcgagctgttgcatgctgcggcagttttgc

SEQ ID NO: 99793 - DNA, 166 bp, Zea mays
  Clone ID: MRT4577_22526C.1
gctcgtgagctggactggcttgatcatagcttcgagtcctaacgatcaaaggcaggtacacgagaccatatgtggaggagaagaggctttaaatactttgttcctccaaacggtggcagaaaagaacgggccgcagggtgatcatctgatggcctatggacccaat

SEQ ID NO: 99794 - DNA, 421 bp, Zea mays
  Clone ID: MRT4577_22527C.1
acctaaaaaacagggtccttttacttggctttaaatatgaggggtggccccccaaaattttcaaagccctccgggatttttccccctacgaacgaattgaagccacctggactccccgggccccggggttaaaaaaggtcctgttcccgcccacaggggggaatgggccccgggacaggggtttccatcgatcattagggcacccgggtgttgcaccagcaggggccggacccgggggggagttccccccctggggctggagctggacccccccggttttgacgttcctgaacccggggataattgcctgggcgaaattgtcggtcctccagcaaacgggggtttttttggggagggaattcctggggcttggccctttgggcccgaaaaagggccccgtcctaaaaattttctcccgggg

SEQ ID NO: 99795 - DNA, 343 bp, Zea mays
  unsure (1)..(343): unsure at all n locations
  Clone ID: MRT4577_22528C.1
aagggaccgccgacgcgnncggcaccctaccaacttcttgtgaaaaatcttaatcnttaaaacaaccaccgacacccagggccagatacacttacatcctgcgacccaccaaaccttctcccttcttttcatcatcctagacaggattgatgaccatcacgtcaaccatcgcgttcccaattacactaaacttatcgccaacgggtccctcaacaactgctacttcctacagcttggcagaataacatctaactctaagcccacccctcttcaacaacacgctcatataagcatgcacaaggtcaacgatatgaaacaactcacatgttgctacaacataaaa

SEQ ID NO: 99796 - DNA, 657 bp, Zea mays
  unsure (1)..(657): unsure at all n locations
  Clone ID: MRT4577_22529C.1
cctgccgggagaaataaattctatgcacaccaatagtgcaatccctgaacgacctgaaggaagggacaacgccaaaaagagatgtcgggtaatggctgatacctcgtcgtcaagtacagctgtggaaatgctacaaaaaatgcatgaaagaggagagaagaatgacgagaaggaagaccagttgaggcaagaaatgttccagatggaaagagagaggctcgagttgcaaaagctgaactgggagaagaaatgggcaataatggagtccaatgccaagttgcgacagaatgagtatgagttaaatcagtggaacgcagatcttttagtcatgtcacaggatcttgacaagttggctccaccattgcgtgcgatgtacgagcaaaaacaaatggagatcatgaagagaagaggcatcaacaccccttcagctagttaatcctaagctattatatgagggttgtacgagacttgtgtatgtgaatttgtttccagtgaagttgtttgattgttaagcttgtttgatcagatacacctattcgtgtctcatgtacccagagttaatttgttaagacttgtgtatgtgactgcttctgttggtcagtggagttgtttgagtgttaaacttgnttgaggaaaaaaaaaaaaaaaaaagcggcc

SEQ ID NO: 99797 - DNA, 491 bp, Zea mays
  Clone ID: MRT4577_2252C.1
tggaatgctgatcccagcaaagacacggctacttcaacctcagaaacagagcatcgtggcctggcaaacaacaccagtagcaataagcccaagaattcaggccatcgaaggagaaacagagctaatgcatcaagaagacagcctcaccctcacggccagcctgctaggcagcagtggcagaggaaagaagcagacacctgaagcaatgaggacgtgacttgtgagttgtttttatcggttgtgtatattaatgtcgtgccctgcattggtttcataattgtaaggcatgacatggcaatgttttggcgctgctatggcagttttatgctataggggtactctggaaagaacctgcactggattctatagaactagtataaaactctgcgtgcttggaagtacacactgtattttttttttgggtgtcattgccaggtacttgtcaaattgcttggccgtggtcagaaaagaaatggattacactatttcgt

SEQ ID NO: 99798 - DNA, 121 bp, Zea mays
  Clone ID: MRT4577_22530C.1
ttccgactcttgcacagatcgagaagggggcccaacacgaaactgggggactggacagcgaactctgacgcacactacacaagaacgtggctggagcaccgcaagacacaatacctacccc

SEQ ID NO: 99799 - DNA, 183 bp, Zea mays
  Clone ID: MRT4577_22531C.1
gccacagggtggtcgatttggcacacctagtagcaagcaagtgaccacgggcagctacagcagggagtggagacccattggaggaattctgcgagacatagcttgcctgatgagcatgcaaagtatatgactagaggagagcgccttttgctgatttgatgattaccattaccagcagcaaac

SEQ ID NO: 99800 - DNA, 307 bp, Zea mays
  Clone ID: MRT4577_22532C.1
atccatctatcggaggctgtcattcattttattttttgtatgtacttttttacatataatcaatggtcctgaagggcaaaattatttttgccgacgagctcttcctcatcatggtaaaattgtaccatcagaagggctgaatgtattataaaaaatttttgcgcccgatcgaccccggccacccattttttaaggaaaggggcacacccttttatgaaaaggcgcggggcgttcttatccctgaatgggtgacgcctaaccacaaaacggggggatggccataggggaaccctgccccttaaaatta

SEQ ID NO: 99801 - DNA, 223 bp, Zea mays
  Clone ID: MRT4577_22533C.1
cacagatattaatcctcaagacatgccgatgacgtttattcttcaaatactccagtagctatgtggttggcgttgaccagatacataaggactttgaatattgtttaaacatgtgctgaaacagttattgttttgtgagaagttttcgtatttgaaacaggatgaaaagcacgtcaaaatagtgttcactataggatttcaaacatgaggttcctgatgctag

SEQ ID NO: 99802 - DNA, 499 bp, Zea mays
  Clone ID: MRT4577_22534C.1
gagggaacctcccgagaagggtgatttcattcagctcaccatcggtcccgatttacctaagccgaaactcaaaaaaaaaaaaaaacagatcggaatttacaaaactcaagacacagcaacaggcgccgaagcttaaaacgagggggtgtcctcaacgaggcaaccctcgtcaaaactccacaggggcatgtcctggtcccccccggggggggggttgctttgcacggggtcggcgcttaacaggctgtccagggacttgtaccccccggggtcaaaaaaggcgaactggtcccccaaaaggagcgagtcaaacatcgcgtcccactcggagtcggaggcccggggcgaccccttgtccgcggggctttccgggcgcccctcgaaatcaaaggccgggcccggcgcggaggcctttttgtacgccgcccacacgccttgccaagaaaagtccgggagcccgtcggatccggagcacttggggggctcgtgctttaaggcc

SEQ ID NO: 99803 - DNA, 158 bp, Zea mays
  Clone ID: MRT4577_22535C.1
gagccctcacaccaaggatcacaggatccattcggaagcagacggagcaccattcgctagagaccacacgagaggatccgccaaggatccagcacaaggtgataggggcgccaacggagacacgaaccccatccctggtcaagaaattccgaaagata

SEQ ID NO: 99804 - DNA, 661 bp, Zea mays
  Clone ID: MRT4577_22536C.1
gggaccctcgaagccggccgggtttgtttggaatatgaatgatgttacggttcaacgtttattctaccctactatactgttggatgttctttgggcctgtttcattttgcacaaggattggagttccaataaaaaaaaaaaaaaaaaaaaaaaaaaaaaaaaaaaaaaaaaaaaaaaaaaaaaaaaaaaaaaaaaaaaaaaaaaaaaaccagggccgagttcaacttcgggatcccaacaatccgaaacctcaatttcctcaaaatgggaaggccctttttcaagcccaaccacctcataatcgggaaggacgggaacccaaccaaaaccatcaaggggcccaagggtttcaataacaagttctacaaccgaaacaacataaaccgaatcctcgggccaaaggcctcctgaatatccttaaagaactccgcctgccgttgtttcggtaacatggtctccaaaaaaaagaacttttaccccatcaacaacaattgtttctttgccaaggacccatcaggaaaggatatcaaggctcttgagaagaacataaaaaacctcctcagcccgtccacaccgttcttcttaaacacccggaacaacccctaccgggagggggctgattttgggcgggaataccccttcagcctaaggaagggggccc

SEQ ID NO: 99805 - DNA, 178 bp, Zea mays
  Clone ID: MRT4577_22537C.1
tgtcctccggggtgcttctgacctgagaggcatatgactcctggcgtcgcgggtagctggtgtcgtcgtcgggcagcaaggcacgcgacggcgggtcgcagacgtcggacagactggctggatcgttttaacagcatgtggatagcgtggagttctgctcggatgtgtgaatagatca

SEQ ID NO: 99806 - DNA, 346 bp, Zea mays
  Clone ID: MRT4577_22538C.1
cctttttgttcctgcttttgttattcgcgccctgttgcatcgatgttttttttttttgggcttaacaccgggaaacggcgcactgttggctatgaatctgcggaaccctacaatgcacgcgtaattcagcgccttataagtcaaaagcagctcctacagtggggaagacagccgctagttcaccggggaaactgttgacttttactaaggtgtgtgccgccaccaaggcagccacaatatggtcatgtatgctcgtgtgccaccacaaacatcccacaggtggccgggcagcaactggggggaactttcacattagaactgtacctctgatgggacgggagcccat

SEQ ID NO: 99807 - DNA, 490 bp, Zea mays
  unsure (1)..(490): unsure at all n locations
  Clone ID: MRT4577_22539C.1
tcccagcgtccgcggncgcgtgggggggggggggggggganaaacccataccacggggggcgacgactgggagatgtttctgcgacggatcctgaccggcggaggtggcctggcggcgctgagggcggcgcgcgccgtgtaatgttactacggggatcgtcngccttgagggggggcggggggggcnnnannttctcatcnnnctctacacncttactctcaaaganatctannccttccccaaatactatttctaccncaaggcctttnattccttcaccaatcaccncctccanatcttcctataaaataactactttaanctcatcnatnacctaatctnattccttcaattcnatgaactcatctaggaggcctaggacgagctcaagctcatcgccaaaatgattgaatgggatccgtggggtgttcctggtgactactaatgggaggtgattgaagactacacttctattgctaagcatgtttc

SEQ ID NO: 99808 - DNA, 320 bp, Zea mays
  Clone ID: MRT4577_2253C.1
tcgtccgcgcgcaaatatttgcattgtttcattgaacagatgaaagaatccaccatggccacaggtcactacactacttgaatcgacagacgcgtggtacactatcaacggacagcacctgccaccacataactctgattacgaccagagaaatctaaaccacggtggcgcacgacaacgtgtgcatgataacgagcgccggtaccagatacttgctcccgtgggccccgttggcattgaagctgggcccattggcctggtctaccagacgctagccccgttagccagggtgcgctcccttgccgtacacgccggcgcac

SEQ ID NO: 99809 - DNA, 543 bp, Zea mays
  Clone ID: MRT4577_22540C.1
cccatgtgttcggctaaacatagtttcgttcaagagggcttgctttgtttaaacaactaatacggttttagtgcacaatcgatgaatttgtgttggtcacaagtctcctgatttgtccatgttttgtcaagttctgtatatcgtcatagtttcattgattattaagatttcagattagtacacggagggagctgtggctcaccaagccgttccttttcccccttcaggaaaccatgctctgctcccaagtggaaggagatgacaggaagcggcatatttgctgctgggggcgaggctgaagaagatgaatctgccaatgcctctgcaactcccattcggaccgctccaaagaattatcaggtactgcttatgtaggttgatttttactctgttttgtttaggcttcatccctggcaacccttctgcgttgaactgttgatattaggattattggtttattttcaggtgctggctaacttgttgtgacaagatggatcacttgatttatctatttatgttcttgctgtgctactaaatttgaat

SEQ ID NO: 99810 - DNA, 415 bp, Zea mays
  Clone ID: MRT4577_22541C.1
ccccctcgagtttttttttttttttttttttttttttttttttttttttttttttttttttgtctggggaaggaggaccgtccctttaacgcaatacttaacgcgccagggtatttatcgtcgaacccccattctgaaccaatgtttaggcggcacgaaatattggatcaaccaaaaacaacctctaaacaaaaggttaattcaaaaaagcctcggggccggaacctgacaagcaaaacaaaagggcttacttggaggacccggcaggggttccccacggttgctcctgacagaaaggactctcatatcgggacgggtcttggtcataaggcaacggggactgggaggccaagggggatctcctgcgggacctgcgtcccctcggaccccgggaaaccaaccctatcccccatgc

SEQ ID NO: 99811 - DNA, 361 bp, Zea mays
  Clone ID: MRT4577_22542C.1
ctgtgtttgtcctttattttctattttttttattctcatcggaaaataaatacttcctcctacagaaacaggaactgctccgagagaaattttattccatggccattacatgtgggacccggggagcaagaaacgaagggagattgccttttgcgcacgggggtttctcttaactccacgtctttctacaaacaaaaacacaggttgcttttatatttttaacaccctttgcctgcaaacggggaacgaccaatggtcaataagccatctgtccacccaaggctggggaaaggcgtaaaaccagccggacaagccttctcgtttttttagcggccaaaatgtcctgtaaacagatgggaca

SEQ ID NO: 99812 - DNA, 501 bp, Zea mays
  unsure (1)..(501): unsure at all n locations
  Clone ID: MRT4577_22543C.1
gtgctaaggacccagcgatcaggagctgactgttttgtcctccgcaatcggccatgtcgtccctggtcaggtcgttcgggtctctctactcccagaagctccgctccaccacccgtctcggatccgcgacggcggcgccaccgcgtttccaggcgttggtccgatcgggattctcgggctccagccacgggggagacgtgagacgtccgccggctcggccgagccagcatcagtctcaggacaaggagcggacgcctttcttcatcttgtgattgctcgactgttctgtccgttgtacagttattagtgggtcccggtgcggctcctaattcctctgctgcactgcagggcaaggctggccgtcggttctattcttgctgctgcagcgccaatgctgcattccagatgggcgtcgttcctgctgattcagagtgaggtggatatggtgaaagacacngcggaggtagtggcggaggccgtcnaggacgcggccaccgtcgc

SEQ ID NO: 99813 - DNA, 294 bp, Zea mays
  Clone ID: MRT4577_22544C.1
aactaggtgttggtcttgtttatttttttttgattggtgaggaggaggtctttgactttgtttgacagcgtgagggccagacgcaccgttgtgagggtgagaaaaggacaggggacagagggacacagaagtgggagagagggagctctggggagagagtggggggcctttggggtagcggccggggcgccctttccgttggctgaggggactcggtgggggcggggctgggtctgggggggctttggagttggcgaggggctggggcgcgtggtggaaccccgttcaccgccc

SEQ ID NO: 99814 - DNA, 844 bp, Zea mays
  Clone ID: MRT4577_22545C.1
tttttttttttttataaactaatgccatttattagacttaaggtgacaaaagtcattttaaatacaaggatggggcaaatgcaccggggcttgcctttgttgccgtaaagatgtgctagatccttctacctaaccattagttagatagctccatccacttgatgagcaggtactggagtgactcctcttcatctgccacttcatcttgaatcttcactacttatgttgggagatcttgtggatgatgttctgtgcaaggtgtgcctcctcggcgacttccttggacgcgtgctccaggagcacgaccgctgtcctcagcctcccgttctcgggcagctgctcggccacttccgacgacaccttctctgcgacggtggccgcgtcctcgacggcctccgccactacctccgccgtgtctttcaccatatccacctcacctgatggcatcggcgcagagttaaattttgcatcggtgcagagtttcgcggcgcgcggtacagggctctttgctctactctgaatcagcaggaacgacgcccatctggaatgcagcattggcgctgcagcagcaagaatagaaccgacggccagccttgccaagatgaagaaaggcgtccgctccttgtcctgagactgatgctggctcggccgagccggcggacgtctcacgtctcccccgtggctggagcccgagaatcccgatcggaccaacgcctgtaaacgcggtggcgccgccgtcgcggatccgagacgggtggtggagcggagcttctgggagtagagagacccgaacgacctgaccagggacgacatggccgattgctggaggacaaaacagtcagct

SEQ ID NO: 99815 - DNA, 1199 bp, Zea mays
  Clone ID: MRT4577_22546C.1
gcctcattttttttttttttttttaatgcagacaaccaaacaaccgagctaattattacttgcatccatttgttcagactaggcttggcctacatcaaggtttgaaccaggaaccaaacatacgatttaagacaatctccggtagatcctctatcacatttcctatctcatcccatattttaaacttcactctgcaaacattttcaaacagcgtatctacaattccacgtcccatattctacatttactgctggagacaatctaggcacactttggttgtttcatagtggagtctggccgctccaaacaggctagcctgagcctggttcccgagataaaaaaataaactcgtttctccgtagctggctcggggctagatacttcatcccgcagtgtaggtgaccacttgtggatgatgttctgtgcaaggtgtgcctcctcggcgacttccttggacgcgtgctccaggagcacgaccgctgtcctcagcctcccgttctcgggcagctgctcggccacttccgacgacaccttctctgcgacggtggccgcgtcctcgacggcctccgccactacctccgccgtgtctttcaccatatccacctcacctgatggcatcggcgcagagttaaattttgcatcggtgcagagtttcgcggcgcgcggtacagggctctttgctctactctgaatcagcaggaacgacgcccatctggaatgcagcattggcgctgcagcagcaagaatagaaccgacggccagccttgccctgcagtgcagcagaggaattaggagccgcaccgggacccactaataactgtacaacggacagaacagtcgagcaatcacaagatgaagaaaggcgtccgctccttgtcctgagactgatgctggctcggccgagccggcggacgtctcacgtctcccccgtggctggagcccgagaatcccgatcggaccaacgcctggaaacgcggtggcgccgccgtcgcggatccgagacgggtggtggagcggagcttctgggagtagagagacccgaacgacctgaccagggacgacatggccgattgctggaggacaaaacagtcagctcctgatcgctgggtccttatgcacatcgatcaacaacgtggaacgagcgcgtatatgtacaacatggacacctcgccacgcgcaacggcgtgaggattgaaagc

SEQ ID NO: 99816 - DNA, 312 bp, Zea mays
  unsure (1)..(312): unsure at all n locations
  Clone ID: MRT4577_22547C.1
ccgtgggggnggctgcttggggggccgaggtgtgtttntcgtgccgtgtccttgggcttcgncgtcgnntgttgtgggggttcggatggtgaggtctttggagagatggtggtgttggtgaagtgggggtttntttttgtgtgggggttnatngggtgcttttttgtgggggggggggggtgnnttatctcctaggatgtgtttactatggatgatttggggggggtctattttaactggttgtgatgggtgggtctttgttggttgtgtgtggttgaggtatgtttgggattttttagaaagagtgggatg

SEQ ID NO: 99817 - DNA, 294 bp, Zea mays
  Clone ID: MRT4577_22548C.1
ctcacaaaggttaaactttacctttttcagcttttacatgcttattgggtattattgccccctggggcaaaagatgaacttaagttgggaacgggttccaaacatcccccgggaagggaaacagggaaaccgttcaaagggggggccaaattggtttacggaacaaaaaaaacacagggtgattacgcgtgcgagctacccaagaacccttggaagaagccttcgaccattacccggggtacaagggaacacaaccccggagggaatacctttccggactttttgaagggggac

SEQ ID NO: 99818 - DNA, 386 bp, Zea mays
  unsure (1)..(386): unsure at all n locations
  Clone ID: MRT4577_22549C.1
gtggggggttttttttttttttttttttttttttttttttttttttttttttttttttttttttaacgaggaaaaactcaatcaatatattgattatttttaggaaacacacctcgggttgagggcccccttatcgaggacatcttatatggaggggggagaggggggacctccaacgagggggtggtggcttnacaagacaggattcatcaaaaagaactgggtgtatgggaacaattgttgttgttgtaggaagggggggaccaatggggtagcccctaccaatgggttaagtaactggtgtcgctgttgtaggggcccagaaaagtttaacaaagtcaattggttgaaaggaaacaacttttgcaagtaaggcaaaaagggtt

SEQ ID NO: 99819 - DNA, 1144 bp, Zea mays
  Clone ID: MRT4577_2254C.1
aatttcccgggaagaggaaccttagtccctagcaacgcctacagcgtcacggaacaccggcgaaccaaacctcggagaaaccctagcaaggccgcttgcccctctcaggcgcgacacagcatcggcgactagcgatgacaggatatcgcagccgcagtccgagccgaagctacagcccacggaggcggtacagccggagccctcttaggcgcaagcgctacgacgacccacgcgaccgctaccgctgggccggggccggcggaggcggggaccgacgtggttacggtcggccgttggcgcagtccggtctcctcatccgtaatatctccctcacagccaggccagaagatattcgtgctacatttgagcaattcggccctatcaaggatgtttacctgccaaggaatttccacacgagggaacttcgtggttttggatttgtcaaattccgctaccctgaggatgctgcagttgccaagcgtgagatgcatcatcaagtcattggtgggcgagaaatttcaatagtttatgctgaggagaatcgaaaaacgccacaagaaatgcgcatgagaacaagaactagtggtaggtacatggatgaaagatacacaagactgtcaagatctccaaggtctcgttcccactcttattcaccaccgccttctccagttaggcgtgacttcaggggcagggagcgcccggatagttattcccctcagtactcgcactctccacgccctcgggacagcaggcaccacaggtcagatggtcgctctccaactccaagcctagatgaccacaaacctaaggcgacaccagtcaatggtggacatggtccagcagttgcatccagatagtatgatgccattatggatgccttgaattgtgttcggaggctggagactgcagactatcttttcaccaatcttctctaagagatgagtagggttgtagtaaacagatacttggtagttgtattacaggtgatggtttcggttatgaggtgcgctgttgcttttgtgacgctgctttaatgctttcccaaccgagggtagtagggtaccgtcgtggaattttgcgtgtttgttttttggctacaatattactaatactagtaacttgctcgcttcgagcgcgagtcttg

SEQ ID NO: 99820 - DNA, 312 bp, Zea mays
  unsure (1)..(312): unsure at all n locations
  Clone ID: MRT4577_22550C.1
gccanggacaaagananncgggcccacaccaccggggacggggncngcagngggagcaccnccgacaccgnccccaagcncggcgcggaacncaacaaggccaacagnggngacncgcgcgccgngccaggcncaagggacggcggcggcanggnggccgngcaacngacnggcgaccncaaaccaganggncccagcgaggcagaacggancaagaagngcaggggcagggnannngcncngcaggacgaaccggaggngccncggggcnggcggccggncgacgacgccccnggccnggcganggcccgg

SEQ ID NO: 99821 - DNA, 227 bp, Zea mays
  unsure (1)..(227): unsure at all n locations
  Clone ID: MRT4577_22551C.1
gcgaccgtggatncatcgatggccaatatgcgcgagccagttcatctttctgaaacgacaagaccccatgtctattagaacggagtgtgcacaagtttattctcgctatagaaggcaatctatctatgaccgttgaccttacacgaaattcagatgcatctggcgaggactaattctagttagtagtctcaggacacgcaagctactgaactactatatctctcact

SEQ ID NO: 99822 - DNA, 380 bp, Zea mays
  Clone ID: MRT4577_22552C.1
aaccagaagaacagagatgccttgattaatctgagaaaatagccagatattacacaaacaccatcttgtagtgtacacacaccaactcctcatctcgactcgccctcacatgcaacatctatcagtccggactactcaatctcagaacgggaagaagcagagatcgacgacgacacacatgcagcagcatccatcagccatgaagttgtcggcctagagcttgagctgacggcgctcacttgccggggacgaagttggtggcgaaggcccaggcgttgttgttgacggggtcggcgaggtggtcggcgaggttctcgagggggcccttgccggtgacgatggcctgcacgaagaagccgaacatggagaacatggcgagg

SEQ ID NO: 99823 - DNA, 683 bp, Zea mays
  unsure (1)..(683): unsure at all n locations
  Clone ID: MRT4577_22553C.1
ctcgggaaaaagggannnaaaaaaaaaaaaattacaaaaaaaaaaaaaaaaaaaaaaaaaaaaaaaaaaaaaaaacttttttttccttattaaaaaaatcccgaatttttgggggttttaaaatttagggggggaaattattaaaaaagggggaaacttgtgggggtttgggggggaactggatttacccaattctgggaaaaaaggagccccctaaaaaccctttcttttgggttcaaaaaagaaaagggggggggaaaaaaaaaaaaaaaaaagggccctaagggccgggccggtttaaaaattagggattcccccgggttgaagaatttcaatttaaggtttttcaaacccgccaacctcagggggggcccgggaccccatttccccttatagggagccaatttacccgcgttcatggcccgcgttttaacaacttcgggctgggaaaaacctgggggtaccccaatttattccctttgaagaaattccccttttcccaagttgggtaaaaagcaaaaaggcccgaacgaatcccctttccaaaaagtgggcaaccttaatgggcaaaggaaatttgaaaccgtaaaaatttggtaaaatttcccgtaaatttttggtaaaaccacttctttttttaaccaaaaaggccaaaaccggaaaattcctttataattcaaaaa

SEQ ID NO: 99824 - DNA, 1734 bp, Zea mays
  Clone ID: MRT4577_22554C.1
tgcccgtaacacggcgcaaccctacgtccctacctaccttaccgttctgccctcgtctcgcccatggagccgcccgcctcctcgccggcaccgccaaaccctaacccagtccccgacgatcggccgctgcagcagcaggtggaagaggcgcgggcgccggagccggagccggagcgggagacgtcgccgacgtccctgaccacctcaatcgatcccaccccttccggcggcgaggagagcgagagcgatgactcctcgtcagtctcgtcggcgccctcctccgcctccgctcccgcggccgctgcgcccttccccacggccaaggacctcctccacatctccttcaaccaggactacggctgcttcgcggcgggcaccaagtcgggcttccgcatctacaactgcgaccccttccgcgagatcttccgccgggacctcgccgccgatggcggcggcgccgggggagggggtatcggcgtcgtcgagatgttgttccgctgcaacatactcgcgctcgtcggcggcggcgataacccccactacccgcccaacaaggtgatgatctgggacgaccaccagagccggtgcattggggagctctccttccgctcccccgtccgaggcgtccgcctccggcgcgaccgcatcatcgtggtgctcgagaacaaaatcttcgtctacaactttgcggaccttaagctcgtgcaccagatcgagacggcgcccaaccccaagggcctctgcgctgtgtcgcagcagcccgggtcaatcgtgcttgtttgccccggtgcccagaaggggcaggttagggtggaacactatggggcaaggaagaccaagtttatcaatgcacacacttcccgcgtctcgtgcttcgcgctgtcgcaggacgggaggctcattgcaactgctagcaccaagggaacacttgttagaatctacaatgcagctgaaggcaatctcttgcaggaagtaaggagaggtgctgatagagcagaaatatatagcttggctttctcgaataatttgcagtatttggctgtgtccagtgataaaggaacaatacatgtcttcaatctaaagataaatgtgggatcgactgcaaatgataaacctatacctgctccagatcctgaagtttcgcatataagcccccctctttcgttcattaagggtgtgttgccgaaatatttccactctgagtggtcagtagctcagttcaggctccatgagggggagcagtacattgttgcatttggacatgagaagaataccgtgtcagttgttggtatggatggaagcttctacagatgtcaatttgacccagttaatggaggagaaatgctgcagctggagtgctacagttttctaaaaccgtcagatcaaccgtagcgacacacaattatcatctatcaattgatgccctcctccccgtaccaagaactgtacagtatctttgtgcgccctcgttggccggaggtctaagctaaatatgataatattttctttgtgtatatatatatttcttgttggctctgggtgatgtgtgttctgtctgtggaagggctaaaacacccatctgcagatggacgtaatagaacgtgtcgttattatttatggatggattgaataaaatagcctaacaatgttgctcgttctgcggaagggctaaatcacccgtctgcagacgaacgtagtagaatgcatcgttatttatttcatgaataaaataaa

SEQ ID NO: 99825 - DNA, 821 bp, Zea mays
  unsure (1)..(821): unsure at all n locations
  Clone ID: MRT4577_22555C.1
agtctccttccacttgtctcacggcctccgcccccatctccccctccgccgcttccgccgcgccgccggcgacgaccccgtcgagagatctccaccggcgccctccaccatgtaccgagccgcctccggcctcggcgccctcaagcagcatggggcggatacccaactgttgaatatcgcggttaggtctgctagcacaagtgttgcacagaggtcatcgggcggcttcttgggctggctgacaggtgcacgttcaaatgcactaccccctccagatttcgcactcccaggagtcactattcctcctccactagctgatcatgtggagcccggcaagacgaaaatcacaacactttcaaatggtgtaaaaattgcctctgaaacatctccaggatcagcatgttctgttggagtttatgttcactgtgggtctgtatatgaaacacctgagacactgggtgccactcagttattaaagaagttggccttcacaaccactagaaacaggagccagttgcgtgttgttcgtgaaattggtgcaataggtggcagtgcgaaagcatcagccaaccgtgagctcatgagctacagttatggagcccttaagacttacatgcctgaaatggtggaagtgctagttgattgtgtgagaaatcctgctttacttgattgggaagtcaaggaagagataatgaatctanaggcagagcttgcagaagcttcaagtaatccggaagctttccttttggatgctcttcattccagtggctattctggtgccttggcaaacccattgattgcctcagaggcctcaattagca

SEQ ID NO: 99826 - DNA, 375 bp, Zea mays
  Clone ID: MRT4577_22556C.1
gttgtacggttgtttatttgtgacactttcctctaacataaacacctgatcccattattggtacgctggcccacaaagcgacgcaatggatatgccccatccgacaaagggggaaaagcttttctaagcaccggagggcggatctgccccacaactgacctgggggcaaaaatccaggggccaaaaaagaaccgaaccgggggggaaaataaagcaaatccggggcaaaatggctccccacacctgcaaaaaaaagcaacgggccaatatccgcacagtttgggcaaaaaaaagggaaagcaagcccttcactaccaacaacccgggggaaaacccccaaacgaaccggggggggcccccctccctggaagaaaa

SEQ ID NO: 99827 - DNA, 293 bp, Zea mays
  Clone ID: MRT4577_22557C.1
cccacgcgtgcgaccacgcgtccgccggacatgatcaacgaggtcgatgctgatggcaggggcaccatagattgcccagagtggctcaaccttatggatcgcaatatgaacgacaccgactctgatgaagatctcacggaggccttccgtgtgtcagacacggaccagaacggcttcatctccgccgacgagctccgccatgtcatgactaatcttggctagaacctaactgattagcaggtgaccgatatgatccaataggctcatctcgctggtgacatgcagatcaacta

SEQ ID NO: 99828 - DNA, 519 bp, Zea mays
  Clone ID: MRT4577_22558C.1
aacactccccccctccctccttaaaaaaacaggtttttaattttataaaaccccccccttacccccccccggggggttgttttgggaaacaaaaaaaccccccttttatcccctgacggacccgaggggccaacccggggggttagaaatgaatttgcccgacaacaaggggggggatataaaataaagccggggggaaggggttaaattaaggggcgcccggggggggccttggggatggaacaaacagggggggatcgggggggggggggcttgtgggccatttaaaccccgttaaccttgccgggggccccgggggggccccctttgtttttgacccagggggggggaaaaaggaaaactaataggtgggggaggcaaacggggggaaacacccaaaaaaagttggcggggggccccttgttgaggccgttggcaacccaggggggggggccccccgtaaccctgggcccgggggaaacaagcgggggctttaaaaaaaacccccgcgacgggggg

SEQ ID NO: 99829 - DNA, 372 bp, Zea mays
  Clone ID: MRT4577_22559C.1
aagagttttacgtgggcatcgccgcgtacgtatgctcggaattcggctcgagtcattattcacagcaattaatactctttagaccggtttagtcactggaaccaaacgggttactttagcgcctaaactttagtcactaaaatttagtttagtgactaaaggaaccaaacagggcctaaagatacaatagatggacatcaccgtgctttaaatgcctcctcactagaccataaatgaagcaatatgccgtagtccgtagacatgtagaattactcatgcatgttgtattttacaaaaggcatcttacataaactatattttgcccctgggaagccaacgactaatgagtatatcgaccccgataattattca

SEQ ID NO: 99830 - DNA, 294 bp, Zea mays
  Clone ID: MRT4577_2255C.1
cccacgcgtccgaaaaaaaaaaaaaaaaaaaaaaaaaaaaaaaaaaaaaaaaaggaggaaaaaataaaaaagggaggtaagaatataaaaaatgcatgcatcattatagcatgtttgatagggtttcgttattttattttgttgccttaattttttcaactggccgactgtttaaaccttggtgtttgcgaactcagtggcgtttcccaactttttcgttttgcctgatgtcgtctttttgctggggctcgtatttatggttattcctgttattttcgcattttgaatgggttt

SEQ ID NO: 99831 - DNA, 462 bp, Zea mays
  Clone ID: MRT4577_22560C.1
cataccacggctgtaaagccagcgggtcggcgtccctcgcagtttggctactacgcggcgctatttccaccaataactctgctgtatacgctcttgtaccaacgcgggctctgctgctcagtacccgtacccctactgcgacggctgcgtgcggccaaagcaccgacgggggagaccaccgacaggcgcttcctggcgtccaagaccccggggtgctccgccacgtcttaggaagaagataacctgaggcgcatcaagagagtgttatagcgaatgcgtagcccatatggaggaaaccatgaccgacgagctcatagagctaccaaaggactaagctcctgagatcatacacaatgccggtgagcatgcaataaacctccaaagggagatggcagggcagacaaataacgctgacatatacaccaactttgatacagaggaacacgaggaagatgaggagga

SEQ ID NO: 99832 - DNA, 2149 bp, Zea mays
  Clone ID: MRT4577_22561C.1
cgccgagcttggctgccctggtcgcggttgcttctgctgctgcggacccggctgctggcgaggaggtgtaggcccagtggctagcgttgttcttcgtggcaacgtatggagatggtgagccgactgacaatgctgctaggttctacaaatggttcactgagggaaatgagaggggtgtctggctaaatgactttgagtatgctgtgtttggtctgggcaaccgacagtatgagcatttcaacaaggttgccaaggtagtcgatgagatcctgacagaacaaggtggaaagcgccttgttccagttggtcttggggacgatgaccaatgcattgaggatgacttcaatgcatggaaagaagctctctggccagagttggatcgattacttcgggatgaaaatgatgcctctccaggccctacatacacagctgcaattcctgaataccgggttgaattcatcaaacctgaggaggcagctcatttggagagaaacttcagccttgcaaatggccatgcagtccatgatgcccagcatccttgccaggctaatgtggtcgtgcggcaggaactccacacccctgcttctgatcgttcatgcactcatttggagttcgacattgctgcaactggtctcacgtatgaaactggcgaccatgttggtgtatacaccgagaactgccctgaggttgtagaggaggcagagaggttgttgggctactcgccagacacatttttcaccatccatgcagacaaagaggatggcacttcactaagtggcagttctcttgctcctccgttcccctccccaatcacagtgaggaatgcacttgctagatatgccgaccttctaaattcaccgaagaaggcttctctggttgcattagcttcttatgcttcagatcctgctgaggctgatcgtctgaggttcttggcctctgctgctggcaaggatgagtatgcccaatgggttgtggcaagtcagagaagcctgttggaagtcatggcagagttcccttcggcaaagcctccactaggagtcttctttgcagctgttgcccctcgacttcaaccaagatattattctatttcatcttcacctagtatggcaccaaccaggattcatgtcacatgtgcgctcgtgcgcgaaacaacacccgctggaagggtacataagggagtttgctcaacttggattaagaatgctgttccttcggaggagagcaaggaatgcagctgggctccgatatttgtgaggcaatcaaacttcaaactacccgctgatccttcagtaccgattatcatgattggccctgggaccggtcttgcacccttccgtggcttcttgcaggaaagacttgctcaaaaagaatctggagctgagcttggtcgatctgtgttcttctttggatgcagaaacagcaagatggacttcatctatgagggcgagctgaacaatttcgttgagcaaggagcactgtctgagctggttcttgccttctcgcgccagggccttgctaaggaatatgtgcagcacaaaatggcacagaaagcatctgaaatctgggacatgatctcccaaggtgcttacatctatgtctgtggtgacgccaaaggcatggccagagacgtacatagagttctccataccattgttcaggagcagggctccctcgacagttctaaggccgagagcttcgtgaagaatctccaaatggagggcagatatctgagggatgtgtggtaaagagcgattggatgaacattcgttcgtattacacacgtgtacaactactaccggaagagcactgacaatggactagatctgatatttttattgcttctatatttatttttattttcttttgcttcgttctcttcaagagctctttgctttctttgcggttctcccaagagttctttgtacctatgtattacaaattctttatatgtataagatgaggacaattttggcaataagcctgtcacgatgttattagtattgccaaataggctttcgtgtgattatgcataatgtataaatgaatccacaagagaggacgtgttataaataagggcatatattattagaatgaatggaaaatgtgctttttctccaaatatatattaaaatatatataatataaataa

SEQ ID NO: 99833 - DNA, 273 bp, Zea mays
  Clone ID: MRT4577_22562C.1
ataactcggcgacgcggtccaattcgcaagcaaacatttttttttgtcccacagggggatggtcttttcccatggggggatgagaaaccgaccccgcaaaaccaccaccaaatttacttgaaaacagctactacaatatgcgcacttggattccaacaacaggatggataataacttaagggggacaacccccacaagagacccgcagggcccactctttttgctccataagagtaaaccccgtttaagggaccccctccattttggttttgg

SEQ ID NO: 99834 - DNA, 492 bp, Zea mays
  Clone ID: MRT4577_22563C.1
atggcggtgacaactgtatcaactagcaggaaaagaaaagttggagcagcgagcctcacaatgcgataccgggagggagagagtgcccatcctttaaggagccgacctccaggaggttgcgcaggagatggcgtggatttcggcgggagccgaacagatcggccgctgagcgccgccgccagccccccgcttcctttctccctgtgcccgctcacttgcttcctcttgctgcaacccttttgccctaggaacgtgcgtcctatctaccagccggctgggtgggctgctcggcctttggtccttgtagcggcccagcctggctggccatttttttttaataaggtgaaaaacacaatatcggacagcagaaccttcgtgtcatctttcgttaaggagccgaaggagtttggcctggttgacaaggatcttaatgtaggtttaccagggaaaaaggaaaaggaagctctcaatgtagatggttgtgaaatttag

SEQ ID NO: 99835 - DNA, 915 bp, Zea mays
  Clone ID: MRT4577_22564C.1
cgccggtccgcaagcagcagcagcagcagcagcagcaggcgtcacctgctcgcgcgccgccggcggtcgtcggcaagaggcaggctaagaagaagaagaagagggcggccgagaagacggtggcggaggccgctgacggcgtgggcgtggcggtggagaaggagtcgtcggacccgcgcgcggacttccgcgacagcatggtgcagatggtggtggagatggggctgtgcgactgggacggcctccgcggcatgctccgccgcctcctcgcgctcaacgcgccgcgccaccacgccgccatcctcaccgccttcgccgaggtctgcacgcagatcgccggcgccgctgccgctgccgctccacctacccagccgtcgccgccagcgtcgtaccagtaccggcgctgatgtcgacagcgtccaccatagccatacccggctacacgctcgtgccggctgctgcgacggacatggtggttacaggaataggatctctgagcagaggaaaagggggacgacagctgcagccacaaagtacaaatttttaaccgtggttagtcaggaaattaggctaatcaaggacatatatatatatagtaagttagtaattaataaagtggtgtgtggcagcactattagactagcacaccatgttcttgatcccaggtagttgatgagttgttgctcttggtttatttatttcagtcttgcagttagaattgtgtgaggttgtgcttgcttgtctatgggctatggcttttcgtttttgcatgaaggccatcaatccatggacatgggagtatgatctgccgagtctactaccaatccgtagctgtaatatgtacacgtatgcatgtgtacgacttgttgaattgtacgcgtatgtatgtgtgttaaaaattagtcatggtttgat

SEQ ID NO: 99836 - DNA, 600 bp, Zea mays
  unsure (1)..(600): unsure at all n locations
  Clone ID: MRT4577_22565C.1
gtctcgtatcaatggnaaatccaaatcagactacctcccctcctcatccggacacgcaggagtagggtcgcgggcgggctggaagagatccgcctgtgctgtgatccgaagaaacgtcggtagcagaatcgtcgccgctgccgccggtggctggacgggcactgcagcatcctcgaaggggacgatagcgacggtgcagtccgggcgtgcaggagcagggccgcaccaggcggacggcggcggtggctgatcaggcgctgcagcgtcctcgaaggtcacgacggcggtgcggaggagcagggccgcgggcggagggccggaagcgagtatgggcggcgggtgcgcacaggacaggtgctgcggcacggcgatagcgcgcagctgaggcgtgcgggattaaggcccgcaggcggaggctgcaaggcgaggatggagaaggccgcgtcgttgctcttttttctttttgcctatttttcttttttcccgtcgctggtaggaggagcttcggcggcggtgcatgggatgcatgtgtggctggggaaggtgattgtctgaatatgtgtcaacaaatctttaaagtttaagattcataataataac

SEQ ID NO: 99837 - DNA, 200 bp, Zea mays
  Clone ID: MRT4577_22566C.1
aaaaggcaagtgggcagagtcaagcgaaaaccaagcacaagcagtacgaagcacacatgaactcccagcaggaaatgatgcatgcgccaactgaggatattcacaaggccacagaggacaaagaaaagcagcctgagaagcagatgcaggaagagcgctcaaaggccagacgcttcgatgatgatactggaactatgaaa

SEQ ID NO: 99838 - DNA, 884 bp, Zea mays
  unsure (1)..(884): unsure at all n locations
  Clone ID: MRT4577_22567C.1
cctcgaagccggccgggaggtgttttcacaaccgaaccgatggccgtcgcatttccgcctgctgcgctgccgtcccacatgtccgccgctctcatcaccttgccctcctctcaattggatccctcgctgccggccgggttaaaagaggaaaggcttgcggtggctacctaggcacccaggccccctcaactccacctcgtcccccgcgtcgccgcataccccgccgcatccgcggccaccccgcgccgcaaagcctcctccgcctccgccacggaacgtctccgcgttctcgtacgccgtggcgaactggacgatgccctccgcatcgtcgactcactcgcgggcctcaacccgccctcgccagcagcggtggggccctgcgccgcgctcatcaagaagctctgcgcgtcgggccgcacagcggacgcgcgccgcgtgctggctgcgagcgggcctgatgtcatggtctacaacgccatggtggcgggctactgcggggccgggcagctcgacgcagcgcgcaggctcgtggcggacatgcccgtggagcccgacgcgtacacctacaacacgctcatccgaggcctctgtggccgcggccgaaccagcaacgccctggcggtgctcgaggatatgctccgccgcggctgcttgcccgacgtcgtcacgtacaccattctgctcgaggccacctgcaagaggagcgngtacaagcaggccatgaagctactcgatgagatgcatgacaaggngtgcgccccggacattgtcacctataatgtcgtcctcaatggtatctgccnagaaaggccggntgaggacgcaatggagttcttgaagaactttacgtcctatgggtgcgagccgaacactgttagctacac

SEQ ID NO: 99839 - DNA, 454 bp, Zea mays
  Clone ID: MRT4577_22568C.1
gaaggaaggttgcggcggcgagcgctgactgtatctaaacctcgatgatcatggtgtccgcttccaagcgcttctgctgaggcgcaatctacttcacatccagaagacaccgaagaaactcaagacatggacattgaaccaactgggtatgagtaagataaacttcattcttaccttctatactaaatcttaatatctttcaaataataccattttatattgaatttccataatgaactatatgtgtgtgtatgtgcataaaaagattatacttatttgtttgatctgctataaaaatatatttgagaccactgaaatattgcatattagtttaacatatttataaacatctttaatagcttatgtcatgaatgccctatgaagccatatttcagagaccatgagctatgcgacacaatagttctcttatttcgtgtactgttggacagagtaa

SEQ ID NO: 99840 - DNA, 776 bp, Zea mays
  Clone ID: MRT4577_22569C.1
ctcgagccggccgggagacgtccttacaccgctgaccttatcgtcgccgctgcgctgcctcgtcgcccgacaccgatggccgccgcacctccgcctgctgcgctgccgtcccacatgtccgccgctctcatcaccttgccctcctctcactcctatccttccctccccgcgccacccaagtccccaacccccaggccccctcaactccacctcgtcccccgcgtcgccgcataccccgccgcatccgcggccaccccgcgccgcaaagcctcctccgcctccgccacggaacgtctccgcgttctcgtacgccgtggcgaactggacgatgccctccgcatcgtcgactcactcgcgggcctcaacccgccctcgccagcagcggtggggccctgcgccgcgctcatcaagaagctctgcgcgtcgggccgcacagcggacgcgcgccgcgtgctggctgcgagcgggcctgatgtcatggtctacaacgccatggtggcgggctactgcggggccgggcagctcgacgccgcgcgcaggctcgtggcggacatgcccgtggagcccgacgcgtacacctacaacacgctcatccgaggcctctgtggccgcggccgaaccagcaacgccctggcggtgctcgaggatatgctccgccgcggctgcttgcccgacgtcgtcacgtacaccattctgctcgaggccacctgcaagaggagcgggtacaagcaggccatgaagctacctcgagagatgcatgacaaggggggcgcccc

SEQ ID NO: 99841 - DNA, 642 bp, Zea mays
  Clone ID: MRT4577_2256C.1
gaattcgccgagttcattcatgcgtagactgttcagataagacgagggccgacggcctctctcggctctacgagtctgcgtgaggaactccatctccatataagaacgagggcgtcacgctctagcgcagctcgcagcaggaacgaacgatactgatctagtgctcgcggtcatgtggaggctgaaggttagtgaaggtggcgggccgtggctgcggacggagaacggcttcctcggcaggcaggtgtgggagttcgacgccgacgccggcacgccggaggagcgcgccgaggtggagaggcttcgccaggagttcacccgccaccgcttccagaggaaagagtcccaggacctcctactgcgcatgcagtatgcaaaatcaagccaacgattaagcccttcaactccatcgatgaagcttgaaaacagtgaagaagtgactgaagaaataatactaacttcgttacggcgagctttaagtcaacagtctattttacaagcacatgacggtcattggcctggagattacagtggatttctggttattatgccaatgtttgtaagtactttagggttcatccgtcagcgaccgattgttttcatctgtcttttctgtgtttgaatcacttcattttaggggga

SEQ ID NO: 99842 - DNA, 462 bp, Zea mays
  Clone ID: MRT4577_22570C.1
attgggacctcgaggccggccgggagctgcctcgtcgcccgacaccgatggccgccgcacctccgcctgctgcgctgccgtcccacatgtccgccgctctcatcaccttgccctcctctcactcctatccttccctccccgcgcaactcaagcccccaacccccaggccccctcaactccacctcgtcccccgcgtcgccgcataccccgccgcatccgcggccaccccacgccgcaaagcctcctccgcttccgccacggaacgtctccgcgttctcgcacgccgtggcgaactggacgatgctctccgcctcggcgactcactcgcgggcctcaacccgccctcgccagccgcggtggggtcctgcgccgcgctcatcaagaagctctgcgcgtcgggccgcacagcggacgcgcgccgcgtgctggctgcgagcgggcctgatggcatgggctacaacg

SEQ ID NO: 99843 - DNA, 498 bp, Zea mays
  Clone ID: MRT4577_22571C.1
cctccctcccttcgccgccccgccgtttgctaccgctctccgccttctctgctgagagcgggaagagatggctggctggggtgatgggccggctctcggcatcgatctcggctcgacgttctcttgcgtcggcgtctggcagcacgcccgtgccgggatcactcgccaacgaccaggggatccgcaccacaccctcgttcgttgccttcgccgtctccgagcgcctcatcggaggtgcggtcagcacccaggtcgccctgaaccccctcaacgccggctctgctgccctgcggctcattggcaggcggtgtagtgctgcctctgtccagagtgatttctcgctgtcgcccttcgtggtctttccggggcccggcggggagcccatgatagtggttctccgcggcgcggaggtcagacagctcgcagccggcctcgctctgctgtgtgcgtgtcgtgggcgcgcggggggtcgctggagcttacctggccggctctgtc

SEQ ID NO: 99844 - DNA, 443 bp, Zea mays
  unsure (1)..(443): unsure at all n locations
  Clone ID: MRT4577_22572C.1
gaactttgggctgatttatgtgcttgtttatgtgcttgggagttttgagaatttaccatcaccctcctttttgctgctatcttctcgtgtctctctgctatcttatcttagttttcctctcagactctctcttttttcttctatatgtatctatctctgctatcgaggtcagtcatcagtcgacatcggaagctcggaatatgtatcgctatccgtctgccctaaggattcgtttcgcgttaaccaagcagcatgttgctgcatggctagtctcgagtcagtctcctgcgtctgtgacggtgctggagcgggaaacggttacgggggcggagtctggtacgggaacgggtggtatgcattattataatgttcntagtactattattgtgttgacgacgacgagtagttacttttatagttatagttgtggtgttgttagtcat

SEQ ID NO: 99845 - DNA, 380 bp, Zea mays
  Clone ID: MRT4577_22573C.1
aggcaatatactcgttttctttgcctgtataaacaccaccttgtttttttatatcatgtatggaactatgggtgatctagaaggcctgcctcactatgattctatcatgatcaagtgtggatctgataatctgattagggtatacatatgtgaagagaggaatttgaattggttcaaaaatattgtgtagtttaatttcctcattgagtatgctttcagctatgtttatgctccaggtattctacttgttattggaatgcatgtagtcctgaactatttgttgataacagcgatctgctgaataagtgaacatttatcagtatctgattgcaatttacacccattcatagtatgggaaaccccaaaaccctgcggacggg

SEQ ID NO: 99846 - DNA, 262 bp, Zea mays
  Clone ID: MRT4577_22574C.1
cggtgtgccccatgtcggaaatggctgagttgtccgagctcgccaccgacgagcagtgacctgcagatggatgtgatgcctggcgagggtgcccttccgcagatggaggtaggcagcgggagccgggagctatccctgcggccctcccgcagcggggcccaacagctcgaggaggaaggcccgatggaggaggaggacgcccagccaatggcggcgccagaggggaaacggcgccttgctaacgggcccaacgctggggagg

SEQ ID NO: 99847 - DNA, 318 bp, Zea mays
  Clone ID: MRT4577_22575C.1
aagcaagccatgtggaggagggcttcaacgatgggccggttcatggttggcgcctcgctgcgacgcggggccggcgacagccggcgcgcaaaactgcgtatgcagcatcataacacggtccatgttgcagagcatgctgagacaccggggatacagagggtgccagggcgccttctacacctacgaagccttcatcgaagccgccagcaagttgctcggctttagcaccaccatcgacgagcatacgcacatgccgtagctcgccgccttcttcggccagacgtaccacgagaccacctgtggatgggcgactgctcc

SEQ ID NO: 99848 - DNA, 469 bp, Zea mays
  Clone ID: MRT4577_22576C.1
gggggaaaacacccgggaacctttcgggttttcagggggggttgggaaaaaaggcccccgggtttaattttcccacctggaaaaaaaggtcaaaggggaaggggcctttaattaaggggggcccccctccgggatttttaaccccccgggggggggcccgagaaaaccccccatctggtgggtttgttggaaaaaggccccatggtttaagcttccattttcccaaacccatgggggccaaattggggggtttaaaaagccactttggggccattgtttccccccctggggccctaaaagggtcaaaaactttcccaacaaaaccgaaagcgtttaggggtttcccccaagccaaaaagggaattcccattcttaaaaaggggacaaggctccctgccctccccattataaatccccttctcatcagggttttgaaaggggcctgggcaaatttccaagatttttgggc

SEQ ID NO: 99849 - DNA, 1543 bp, Zea mays
  Clone ID: MRT4577_22577C.1
aaaaaaaaaaaaaaaaaaaaaaaaaaaaaaaaaaaaaaaaaaaaaagccacgcgtccgcggacgcgactagtacactgcctgccaaacagctgagcagagtagagtagagcagagggcgaagtgcagcgcagtgtgccccgtctcggaacagcgcggaccaccagagcgtgcgcgtccgtgccccacccctccctctctatccatggcggtcccccgcgggtgcctcgggctccccctggtcgccgtgctcctcgcgtccctctgccgcggccaggcggcggtgagggagctcaaggtcgggtactacgccgagacgtgcccggaggccgaggacatcgtccgtgagaccatggcgcgcgcgcgcgcacgcgaggcccgcagcgtcgcctccgtcatgcgcctccagttccacgactgcttcgtcaacgggtgcgacggctcggtgctgatggacgccacgccgacgatgcccggcgagaaggatgcgctctccaacatcaactccctgcgctcgttcgaggtcgtcgacgagatcaaggacgcgctggaggagcgctgccccggagtggtctcctgcgccgacatcgtcatcatggccgcccgcgacgccgtcgtcctgaccggtgggcctaactgggaggtgcggctcgggcgcgaggacagcatgacggcgagccaggaggacgcggacaacatcatgccgagcccgcgcgcaaacgcgagcgctctcatccggctcttcgcggggctcaacctcagcgtcaccgacctggtcgcgctctcgggctcgcactccatcggcgaggcccgctgcttctccatcgtcttccgcctctacaaccagtctggatccggccgccccgacccgcacatggacaccgcctaccgccgctcgctcgacgcactctgccccaagggcggcgacgaggaggtcacgggaggcctggacgccaccccacgcgtcttcgacaaccagtacttcgaggacctcgtcgcgctccgcggcttcctcaactccgaccagacgctcttctctgacaacaccaggacccgtcgcgtcgtcgagcggctcagcaaggaccaggacgccttcttcagggccttcatcgaggggatgataaagatgggggagctccaaaaccccaggaaaggggagatacggcgcaactgtcgcgttgctaacaactcgccgtggcaaccaaggacggggatggcgtccggacagtcgacatctgagctccggtgatgaggttggtgtttcagaagaaatcgagccctgatatggtactaatatgttgacatgcattgttgtttttttggtcgtgtgtaagttttgcacctacctatggctgtggtgcccgagctgcgctcattgctgacgtggggaataattgagacattgtgccttagctccaataacgttcaatatatttatcctttatatcaaaaaaaaaaaaaaaaaaaaaaaaaaaaaaaaaaaaaaaaaaaaaaaaaaaaaaaaaaggaaaaaaaaaaaaaaaaaaggggccctgaacctcaact

SEQ ID NO: 99850 - DNA, 204 bp, Zea mays
  Clone ID: MRT4577_22578C.1
ctggagctgcaatcgtatatggcttgaagctgaccggtttgcctaccgtaagaagacatcttctgctcgctgagaggatctctgccggcatcctcgtccatgtagatcacactgctgccttagtacagattgctcatcagcattcatgaatttgcgacggtattcatgtcagcacatcctgaacctctggcgctagcaccactc

SEQ ID NO: 99851 - DNA, 256 bp, Zea mays
  Clone ID: MRT4577_22579C.1
ttttgcaggcttattattatattaagactcctaacctggtccaccttgcatctgtttccaaaacaccccaaggcctacaaattctccccacagggggaggcagggcttctgatgacacaaatggaaaaaagggggggcacaagggggactcaaacgttaacgacttccgtgttgacgcgttttttattgggaaagacaaaggaaacaaaccggccttgcctttttaaaatagcgaggccccggtttggttttcttc

SEQ ID NO: 99852 - DNA, 991 bp, Zea mays
  Clone ID: MRT4577_2257C.1
agaatcgaaaacgccacagaaagcgcatgagaacaagaactaggttcattatttgtttctttatcctttgccatgtgctctaggttgtccttagcaacactgtagtaaacttatacttgaagtaatgaaaagaaataaatccgtgctttcattgatgtagtggtaggtacatggatgaaagatacacaagactgtcaagatctccaaggtctcgttcccactcttattcaccaccgccttctccagttaggcgtgacttcagtcaacaaagaatatagagtatctaaaagaccaaaagacaaccataatgtttggagattaaaagccaaagtgaaagtaccatggcttccagggttgagcatgtgaaaggcattattgttaaagataaagtggtgctgtcagtcaagagtttaatgataatcttggctaagatacctgacggaaagagtatgttgaagttgagccagcgccttaatgcattgcacaattgcatgtttggatcaaagtgggtagcttttattgatatggggcaggggcagggagcgcccggatagttattcccctcagtactcgcactctccacgccctcgggacagcaggcaccacaggtcagatggtcgctctccaactccaagcctagatgaccacaaacctaaggcgacaccagtcaatggtggacatggtccagcagttgcatccagatagtatgatgccattatggatgccttgaattgtgttcggaggctggagactgcagactatcttttcaccaatcttctctaagagatgagtagggttgtagtaaacagatacttggtagttgtattacaggtgatggtttcggttatgaggtgcgctgttgcttttgtgacgctgctttaatgctttcccaaccgagggtagtagggtaccgtcgtggaattttgcgtgtttgttttttggctacaatattactaatactagtaacttgctcgcttcgagcgcgagtctt

SEQ ID NO: 99853 - DNA, 565 bp, Zea mays
  unsure (1)..(565): unsure at all n locations
  Clone ID: MRT4577_22580C.1
gccnnggccgggctcgggatctcacggacattccatccccgcacattcaacgtgcgcaggcgctgcacacagacacagcaaaagccaaggacgcaatggagtctactacgcaaggagagcgcaacttctgttcagaaggaccgacgatgtctgggcccgtggcggtttcggcacagcgcacgtggtgaggcgtgcagcagaaccccaccaaggagaacgtcgaggaggtccacacgaactcaaaggccgtggtgaaccaccaccaccaccatggtcaccacggccgaccacggcttcgaggtgcgcgagaccagggtcgaataggacatcaacacctgcaccggcgagttccacgagcgcagggagagcttcctcgccagggctaactgagccgcccggcggtcggcatccacgcccgatcgtgcttgcctgcgtgccttatgtatgtctgtggttgactggntgtgcagggncatcgtacttggctatcgtacgtgcacgcactcagctcctgtacgaattacgacaataagctcgtgacctgaataaaacttcttcgtaatac

SEQ ID NO: 99854 - DNA, 396 bp, Zea mays
  unsure (1)..(396): unsure at all n locations
  Clone ID: MRT4577_22581C.1
tttttttttttttttttttttttttttttttttttttttttttttttttttttttttttttttttttttttggaaaaaaaggatattgaaaaatattttggggacacaggtacaaaaacagcagcatgcacacacactgaaaaaaaaacaaaggcatgcatggaaataggaaacctccaaaaaaacagaaaccgcacatgcacttattaataaaagggtttaaaccaaacatccacggggcaaaattttgcatgggtgaaaaaacccccgttaaaaaaaagggagggcctgcaggaacccatttggggggacctttgnnnntncnnnncccccacactgaaaaaaaaaaaaaacaagcccnnncaaatgcggttgctaatgttgtnnacaatatgg

SEQ ID NO: 99855 - DNA, 597 bp, Zea mays
  Clone ID: MRT4577_22582C.1
gccggccgggctcgacatatagacgcccatcacacagcgatgtcacactactatcttctaatgtatcgcgggcgctgggctcagacactccatgcggcggctccgatggcttacgacccggaggtgaactactggtcggaggaggtgaggttcggtggtcccggtcggattccttcgcctcgctgccctacgtccatcagcacgttttccatgataagtctctaggatgtcttgcgcggtgctcacgcgcgcggcgccacaccacctccaccgccatggtctcctcggcggccacggcttcgtggtgcgcgagaccagggtcgaagaggacatcaacacctgcaccggcgagttccacgagcgcagggagagcttcctcgccagggctaactgagccgcccggcggccggcatccacgcccgttcgtgcttgcctgcgtgccttatgtatgtctgtggttgactggttgtgcagggtcatcgtacttggctatcgtacgtgcacgcactcagctcctgtacgaattacgacaataagctcgtgacctgaataaaacttcttcgtaatacactaaaaataaccaaaatggcctcctat

SEQ ID NO: 99856 - DNA, 319 bp, Zea mays
  Clone ID: MRT4577_22583C.1
gcttttaatattctggtttgcgcaaaccacagacatggagccatatatgttttccatcgcccacaacagcaaaccacacaacgtaaaaaacctttccatatttgaaacagacaagtacaccacctcctactttctatacccatatagcaaatcatgcccattaaaattaatgttacaccaaccaattgttatactacataccaaaagcacacaccttgcacagaaaccatcaaaaatacctatagtccataacagcttttatgtataatatacagacctataacctgcaaatatagctacagatcatcacctgcacaaa

SEQ ID NO: 99857 - DNA, 293 bp, Zea mays
  Clone ID: MRT4577_22584C.1
aagaatatgaagaaaaggagcaagttgctaataaaggggagcccttggccctccctttggatgctggtgaatactgtgtgcctagaggaaatcgtaggcggttccgcgttaggcagcccatcctgcagtatagatgggatatgatgcataggcttggagaaccacaggcaaggatgagagaagagaatatggaaaggattggggaggaggtgagacagctgatggaaaagctgagggaaaagcagttgagtcatagtctgcgggcagtcagcactgacccccctcaccatgac

SEQ ID NO: 99858 - DNA, 630 bp, Zea mays
  Clone ID: MRT4577_22585C.1
caggccggccgggaagaccctatctagcgccgccgccgctgcagactcctccttttcataccttcacaaaccgccgacgacgccccatcgaacatggctccgaataacgtaaggccccacccccgtcttcaaatgccgcatagtcctgagccgccaaacaccaagaataagaagagggagcatggaaaagatactggaaaaggtgaacatcgccctgctgaccgaccaggctacctacgacaagatgctctctgaggtgcccaagtacgagcacatcaccccctccatcctatccgagcgactcacgatcaatgcatccctggatccgaggcttatcaagacctgatgtggcccggcctcgtccgagcgtgctcgggtcactcaccccctcagatctacaccagaaggaactatacctaaggatgatactcccttgattgccctctctgtaccagatcgacttcattagaacagttgccatctctgtcatcattttgctagagctatgttaaatgagtttctcacgagactgaaaacgctcatatactttgcatgaaaatggcttgcctattataccttatctgctctcaataccttttttctatgccactatgacttgatactgtctga

SEQ ID NO: 99859 - DNA, 276 bp, Zea mays
  Clone ID: MRT4577_22586C.1
ctagatcgcgactttcgccctttttttttttttttgaatataaaacaagtattctgtatttctcatagccatgcctcaagaaaatcgatgttacgatcacatgatcattctgtaaataaatagaacaagtctagcctttctccccaacatcaaggactaatggactaaagcctcgattttattcccactacggcgggggggacatctttttgactactactcaagtacctcccactaaatctgctcaaggaaacgaggcatgaccactcaactctc

SEQ ID NO: 99860 - DNA, 354 bp, Zea mays
  Clone ID: MRT4577_22587C.1
aggaagctggaggaggaggacgctctcctgggaagcatggccccagccgttgcgccggccgttggtggttccggggcgctcactggcgccaagcctggggcgtgggccgattgacgctctggtctatctgagatgcttactcgggatctgagggcgtggtgatcgtcctgcacatggcgggagatagaaggacgaatactgcgatctggatcgcaaagagagaggtgagggggatatttatgatcactctggttatgatagggtgcctctgttttgcctgtataagagaggatgatgattttttatatataataataccgtgtatttgtcaaacttacaactagaccactactg

SEQ ID NO: 99861 - DNA, 328 bp, Zea mays
  Clone ID: MRT4577_22588C.1
cggacgccccaataattgaccgccgcctcctggcggcccaccagttcctattatgaggagtcttataacagctcgtcgtcatgatcatcatagctgcctgctgggagaaattgttctctgaccacaacacaccacatactacccgccggcatcataaggagagccggctgtgccgcctgaggaggcgtcctaccaacaatagctgcgcgctgactactggctgttcagcaggcaaaacagctgtgccgcctgctgtaatgaagaatccaacaccccgcgagaagaggcttgcttattattcgccaccatggtggttcttcttttcacc

SEQ ID NO: 99862 - DNA, 219 bp, Zea mays
  Clone ID: MRT4577_22589C.1
acgtaagctcggaattcggctcgaggtgatcacgctcgggaactttataaaacggggtggatggcatcatgtagcgggaatttgtatggattctctcggggatttcgttacatacaaatgttatgatctcatggttacctgcggagaacccgtgctaagagcattaaggtactagcggggatcaatttacacacctaagaaagtagtcgccatgtgtta

SEQ ID NO: 99863 - DNA, 343 bp, Zea mays
  Clone ID: MRT4577_2258C.1
ttaattttttttttttttatttttactatttttgggttttttttaactaaacagggtttccaacacaaatactacacacaacagcgtcaaaagacaaaccctcatccaggcaaaacaaccaaattctctgctgacattcatacagctctcaaaaacaatcacgtaataactactacgctcaagcctccttaccgcgcattctttaaagggtacctgagccaaaaccaaccattttgagcacatgcccaaagtatcaccctacgagcactaaagactatccgcttaactccacgaagagcttgaaccacacggactagaacacggtcaggtacgcgagcaggcc

SEQ ID NO: 99864 - DNA, 768 bp, Zea mays
  Clone ID: MRT4577_22590C.1
gttgggtgattgggtttattctgaagcttcaaccatgtgtacagtcttctattactcctcgtcgccccaacccacctgtcagtggacccaaatgggtgtaattgagttagtgtgtgcgtgtgttcggccaccagactaggtgaaggtaatagataagccttgtcttggcgagagggaaaggcatctgtaagagaatattgcaactgaactctgaaactactgtctgttgcttcctccaccctactcctgtgttcttgcttcttctcaaatcccattctctaccgcactctgttgacaacgggtgatagccaccagtgaagcggagcggacgaccggcactgtccggctgtccgcaccgccacaccactttagcatgggcacccaccgcccaccgccaccggcgaggcggcacagcgagcagagcacaccatgacacgtatgtatctccccggagcatcgtgaaggtgccatgtccgcacacccttcgttggccttggccatgtcgcttgcagcccgccgacatccaccctttgcctgcgccactcaccgttcatataccgggccacggccgcagctggagggccgacgacgctgcgtccaggtgcgggcgctataggctcgagcgcctcctcaacgactgcatcgttgtaccgcgtctgcaacgtgctctccaccacgaccacgccatggcgctcggccacctcgcccgccgcaccgtgacatccacgtggtctgccgcccgcgccaactcgcacattccgcaccgcc

SEQ ID NO: 99865 - DNA, 448 bp, Zea mays
  Clone ID: MRT4577_22591C.1
cggccagtgaattctgttgctgtcggcaaacttgtagcaagatagaagaaggagtggacaagataaccacaagtgttgaagcgtcatcagctcctatgcatacaagtgttccttccattgcagaggctatgaagatgttgaaagaatgtggagtggaagaaaaaattgcacttatgcatacatccacattgctcatcatgaagtctgaagtgagagagctcctcaattcatttgaaacgcttgaagggagacttgattggttgaagagggaacatgagatgaagcagttgccatgaacatttatgttttcctttttttaattatctatgttcggaaccattttgtttgcaactattgtgttttgtaaccggaacccttatgttctgtatgtttttttttacaaccataatgggtacataatgattcacataagaaaccgacagcaacg

SEQ ID NO: 99866 - DNA, 324 bp, Zea mays
  Clone ID: MRT4577_22592C.1
attcggctcgaggccaataccgcgatgtagctaatggagaggacaaggacgaaagcggctgctctgagaggtgaaacctaccgtctcacggcagcgtgcttgcattggcaaagcacaagggcggaggggacaaataatggcagatgccaggaacccacactaataaactgcacgcaatacaagacttcgctgaaggccgcaggcaggtcataaagcacggcgtcaggcaccaaaaccagctacgtgcgataggcggcaagcctggtggtccgctcgccgaggccggcattaacaaccacccagacttatggcctgctgcagcac

SEQ ID NO: 99867 - DNA, 377 bp, Zea mays
  unsure (1)..(377): unsure at all n locations
  Clone ID: MRT4577_22593C.1
ggcaagggacgacggggagcgagagcggcgcaggcggcggcgagngcgcggccaaggacgacacggacccgcccccggcgccggagaacgacgcggcggagcaggggaccagggcgcaggaccgggccgcgagcgccgagaacagcgccacgcagcggcnccaggacagggcgggggccaccgagagcgggaacaagcaccagacggacgcgccggcgacggaagccgacgcggcgcgcggcggagagagggcgcgggggagggacagagccgacggggggangaacgagagccgggagaacagaaccaacggaacgcccgggggccacaacaaccaacacagcacgaagaggcaagcgcggaggcgcaaggaggcc

SEQ ID NO: 99868 - DNA, 142 bp, Zea mays
  Clone ID: MRT4577_22594C.1
caaaatccccaaccatatcccggggcccccaccacacagtagctcgccctccctgcttgccaattgcggtctgcccggccgcggagcggatcttcttctgccccccgttcgcacgccaagaaggcggagtgccgcaacctta

SEQ ID NO: 99869 - DNA, 451 bp, Zea mays
  Clone ID: MRT4577_22595C.1
agcgcacacacgcgtccgtctccaagaagcaaaagttgctagtagagcagagcaaaccaagcaaggttggatggcgccggcggtgaaggtgtacgggtgggcggtgtcgccgttcgtggcgcgcccgctgctgtgcctggaggaggccggcgtcgagtacgagctcgtccccatgagccgcgaggccggtgaccaccgccagccggacttcctcgcccggaaccccttcggccaggtccccgtcctcgaggacggcgacctcaccctctttgagtcgcgggcgatcgcgaggcacgtgctccggaagcacaagccggagctgctgggctgcggctcgccggaggcgcaggcgatggtggacgtgtggctggaggtggaggctcaccagtacaaccccgcggccggcgccatcgtggtgcagtgcatcatcttgccgctcctgggcggcgcg

SEQ ID NO: 99870 - DNA, 557 bp, Zea mays
  Clone ID: MRT4577_22596C.1
aaaaccccaaaaaaacccccttttagatctaattttaaatccggcccgaaacggacaggatcgacggggggggcttccccgtcggaaacccgggaggacgttcaaacaacccccagaaccagaaaacccaggcgaggagcgagccaccttggttaagggggggggcagttgacaggattttatttactggaccccgtttttatttttatacccctggggggggccctcctcctttaaactttggggcgccatcgccgggccgggccatttaatttgcagttgcaaaaggagcacccccagttggggccccacttgcaggggttgcaaccccaccccccccccttgggggccgcctaaaaccccccggccctggccttgggggtcggcccggaaagaaccgtggtcttgaccctgttgggggggggggtctccacgtgaggggacataccgaagccgttgcatcccttgcccaaggagcagttggacccgcacccccacttgccgccgcagaaagacaacttgatcacaggcgaaggggggagggggggtttttgccc

SEQ ID NO: 99871 - DNA, 356 bp, Zea mays
  unsure (1)..(356): unsure at all n locations
  Clone ID: MRT4577_22597C.1
cccacgccgtcacggcnnggcggcggcgtgagccaaacgcaggacgaaatgcttatggtgtgaaggggaaggaagccaccagccatgggtgcgactgtcaacttctactcgcaacctatgtgtaagaccgttcaaagaaaaccaagtgcgtcccttatgaagaaggagcccgtcttgatgcctgannactgaagactggttggtgaagtattgggcctgagtgtgccaagcgtgagcctttggaagggtccaagtatgcccactgagcaggatctcgtaattgcttgcaaggcactttgcttcactccttgacgaagaagaaacccccgtcgtatcttttgggggtgaggcacttc

SEQ ID NO: 99872 - DNA, 339 bp, Zea mays
  unsure (1)..(339): unsure at all n locations
  Clone ID: MRT4577_22598C.1
acggagctnactacttcttcctaaaacctttgcttttatcacacatcaacaaactcaaggcccagatactataaaaacaggtgcaaggagaaacaccaccanctaattnacaatcacactttctaacgcaagaaccccacaatcagacacagcaatagcatataccacctcattataaaaggttcacgcaccaaataaatcttatcccagatgtccaacatatcaacgcacagctcactgataacttactaatacatctcaaaccttttctttttcactttacttttctctactaatttatcacttagatattagccctggatttgcaaaacacaactc

SEQ ID NO: 99873 - DNA, 352 bp, Zea mays
  Clone ID: MRT4577_22599C.1
agaacgatgaccttcttgattttaacatttatactcacacaccttgtagaggcaacaaggtaaacaaaggagtaaggggattgcttacctaagaagctagcaacaccgctgaggttgcatatcatgggcgaccctcctggtgaaccacagtagagattcctgtacacgctcagatagggctacacagttagcgtttaagcagaagaacttaccgggggctgccaaaaaggagaatgcagtcctattaaaacgcagcaagcttgtagaggacagaaagagattgccccccacaaaatttgttgcccccgaaaagcaattccccttctccctttagggtcaccagggaggggct

SEQ ID NO: 99874 - DNA, 250 bp, Zea mays
  Clone ID: MRT4577_2259C.1
actcagctttttcaatactgcatcacctactctctcactgtcaaattctaaatcttctcgcggtcccccatcttcaagaatgccaactacgcctacagctactatctattcctagctcatcatcagcgtataacgtactcactcatatttatttatatatttacatacctatatagatctccatagtccataccaaccatctgtgtcacttcatctcctccttcaattctatctcctcctcccatgcata

SEQ ID NO: 99875 - DNA, 585 bp, Zea mays
  Clone ID: MRT4577_225C.1
tcgagcggccgcccgggcaggtacttgtaaaaaaaaaaaaaaaaaaaaaaaaaaaaaaaaaaaaaaaaaaaaaaaaaaaaaaaaaaaaaaaaaaaaaaaaaaaaaaccaaaaaaaaaaaaaaaaaaaaaaaaaaaaaaggcccttgggcgcggaccccccttttggggggattttttggggttttctttcactttggggggcggtttggccttttttttggggggcccatttgcccttttggggggtggttttaaatttctttggcggtgtttttacacctttggggttggaaaacccttgggtttccccattttattcgttttggagaatttccctttttggccggttgggtttttagcaaaggggcccgccccgttcgcctttccaaaattttgcccaccttgattgggaattggcccccccttgtaggggcgctttaagcgggggggttgtggggtttccccccagggtgcccgtttcttttgccggggcctttgggcccgtttttttggtttttttcctttcttttttcgcccgttgccgggttttcccggtaagttttttttgggggttccttttggggt

SEQ ID NO: 99876 - DNA, 767 bp, Zea mays
  Clone ID: MRT4577_22600C.1
gcacgaggaaggaggaggccatcccacccacgctgacgaggagccaccgaaggagaaggccccaccacccaaggagaaagccgcccaaggaaaccttttcatttcagttcgccatatgttgatgatcaccgtgacactgtcgaagaagcctctggatacatcatctccagggtggttgaggttaatgttaaggtggaaagtgcaggcacacataacatgcacaataatgatttctatgctaaagagaagttgctcaaatcaatgcgtgattgtgatccttcgtctttgcgccattggattttgtggcaacggaagttccaggccccattgcagcactacactgcgctaatggaccttcaggactattctgagaatggaactgtaaccgtggtatatcgagtgatacttaaaggaactgatggagaggcatatagagatgccacgggcacaacacagttccatgaggggcgcagggaagatgctgttgcagccgcagaggaagctgcattcagcaaagcttgcgcatggttcggttttggcctgtatctgtaccaccaggatgaatctcattacgacgaccacttccattgaggctcaatctgcaaaagagttgatcataagttgtaacatgcgttggatatgcccctagaaaacttcgtatatagaatcaagttttggtctttgcgtagtatcatactcataacacaaagaagtgaacctatgtagatgctatttgcaccctttttattaatattataattcttatt

SEQ ID NO: 99877 - DNA, 479 bp, Zea mays
  Clone ID: MRT4577_22601C.1
gatgcccttaccctttggttgtgtccacagggattacacctttgttttggcatttcctccagtataaacgcttggctggccagatagcaacgtccgctgcggccaaaacctttcaaaagctacaccccaagcacgatccacaggaaaagcccgctttgctcaaagcagacgttgacatgacccttgctctcgtcataaaaaagagagcctccgagggccctttccgcatggagcacaccacacgtaattttttacatgcatgtacgaaaccgatagtaaatattatgttccatgagttttgaagcaacatggaaaaaaagaggtcttggacctggcacctgcgcccgagggaaaatgagcaatacggaacatccccctatagaaccatgcccgccgatttccaaccaacttggtataaagcgggccattggcgccttccgcccggggacccaaacccggccctgttatacattgaacca

SEQ ID NO: 99878 - DNA, 1125 bp, Zea mays
  unsure (1)..(1125): unsure at all n locations
  Clone ID: MRT4577_22602C.1
ggtacctccggccgggactgatgacacgttcctgcaggaactggcacgccatggcgggcttctgcactcctgctgccactgcagctgcccatgccgccctaacccctctgacgagctcaaggaagcacatcgccatgtgcctgtcccccaggccaagcggcggcggcggcatcggcggcggccagagggcgcggcttgcgagtacaggcgcagctcctcaggttcgcgcgctggcgccgacgaccgcggcagaagaagcagcgggtccctcccccgcccctctcaacgtggagtacctggccgctgagttcgccggccacggcgtcagcttcgagcccgtgggcgtcagctgcgccgtcaagatgtcgctgcgcaacggcagcgtggcgcacgtgctgctccccagcgggctcgtcacgtcttacaagcccgccatgtggcacggcacggtcacggaggttctccacacgaacgtcgccgaggtcccaggcgggcgggccgtcatccgcggcggcgtgttcgtggacctccgttgcgatggctgcgacggcgtatggtcgccgagcgcgagcggggcgtggtcgctccgcgacgtccggggaagcccagccacctccatagaggtcgagctcgcgtcagcggcgccggggaacgcggccgcggcgaggtgcgtggtgacgctgcacccggaagcgctggccacggagctcacggtgacgaacaatgcgtcggcggcctcgtcgccgccgatggctctgacgtgctccgtgcccagtcacctgcgcgtgagcaccccggacgccacctacgctctggggctccagggctccgactaccgcagcgtggagcccgcgctgtcggagttcagcattatccctccctgctgcggcctcgcgccgaatnaacanggacncagcccgaaaccatggcaaacaaagcttggaatgatccttcggcggcaacaagacctnncgccnggacancccnacggnanaggacacactcancnatncgacccnttncnntgtnanaaccnccangattccatttnacngggcagaagaatcgttgttgnaagaaggtcaagattacttttaccgttccntcatgtcgganttctcggtt

SEQ ID NO: 99879 - DNA, 447 bp, Zea mays
  Clone ID: MRT4577_22603C.1
gaaacgaagtcacgggtaatagattaggaacaataaaataactaatcagttttttacatgtttccaactaaatgaatgaatgaatgaattgcccccaacaactggactgggaatttacgatgcgcagcaaactcacgagggacgacaggaacccgaaaaattcctttactagctaaactccggggacgggcaaaactttacacaaaaagctggaggaggacgggcggcccctgcccgggggggggggcagcctcctcgcgggggccccccatgtggccccctaacccctggcccatttggaagccgagcccccaaacgtggcacaggggggtcgtcgcgggcgggggggccttctttgccggggccggggcgggcatcccaagcccaaggccgtgccggccggccctaaaggggcttggccggggcccccccaacgcctggaacaaa

SEQ ID NO: 99880 - DNA, 283 bp, Zea mays
  Clone ID: MRT4577_22604C.1
ccggccgggtaaatgattcattacccagagactcagcaggcagatttgattaagcgaactatccgattcgcgtgcgtgcagtgagtgagtgtgtgttggtgaagatggtcacagcttaccctcccgtggcgagttaggtgctgatgagcagcgtcgacgttagtcgaggacgaggggtctgtcgagaggtgctgctctgcccagcggtcgccggtggacgtcatggacatccagaccgagaatgtacgcataacggggcgcagcccatcaacacgaactcctt

SEQ ID NO: 99881 - DNA, 340 bp, Zea mays
  Clone ID: MRT4577_22605C.1
cgcaattcggctcgagtaggagtcggcttgctatgctactgggagatggacagattgatatccagtcacctcccaagactacaactcctaagaagatgctagtgaagaagctcacaccaaggaagctgaagaaaatgtgacaagattgtaataacctgctgatttctatgttatctaagattttagtaagctagtgttagaagtgaaccttgttatgctatcagatgaactatttggatggatatcgtagttattttgaaccttgttatgctatcagataaattgtgttctttctgaaactgtgttcattcagttaagaatgggaaactgtgttctgaaa

SEQ ID NO: 99882 - DNA, 355 bp, Zea mays
  Clone ID: MRT4577_22606C.1
gggcagaatataattccattgcttgggatcttacattcattcaccaggagtacacatcttacagagagggtgcgtaaacagtgcctagacatacagcagctactatagttacatacttatattaattgggggtgaagtgaaattaccgaaccttctctgtttctttcaaaggttcttcaattcaaagacgtcaggtagctttccagatagacgacgatgcctttcagagtcatggggaacaagctagggccaaaaacaacaggagagaataatgggggtggggggacagtacactgacttgtagtagaaccgtttactgatactgtattcgacagttgcgccaacatgctcaaaa

SEQ ID NO: 99883 - DNA, 564 bp, Zea mays
  Clone ID: MRT4577_22607C.1
atggaaatcatccatcaacaagtgcaaaggaagaaggagaagatggtgcggctggccgatcttcagaggaagatcgacgaagctactaaagaagctaccccatggcccccatcatacaagccacctccgcttcccatgtatgatgggcactcagatccaaagcagtttttgatgagttacgaagcaactatatcttcgtacgggggcaataccacagtcatggcgaagtccttcatcatggcagtccggaacgtagcccagacatggtattcttctcttcggccaggaactatcacgtcgtggcagaagctcaagaacatgctggttaccagtttccaaggctttcaaacgaagccagtcacagctcaggctctgttccagtgcatgcaagaccatgaagaataccttcaggcatatgtccgaaggttcttgcgactgagggcacaagcgcctacagtgcctaatgaaattgtcattgaggccatgatcaaggatcttaggctaggacctactgctcaatatttcgccagaaagcccccacagactttggagaagttgctttag

SEQ ID NO: 99884 - DNA, 465 bp, Zea mays
  Clone ID: MRT4577_22608C.1
ataagaatatatcaactacgtttcaatcaaagggcgaccaccatgttaacaataatgaaaacatgcagaaaaataaaatccctaaactagaagagataagccacgaagccagagagtgcccccaaagcaatccttatttccgaagaagatattcaggtcaagggatgatgaaaaaaaacacaacgttaaacagagtatctcaacaaaacacacaaacaagaacaccctgcaaaacactactacactgttttaagcctcatcttcctgaggttcttcctcatcttcatactaatagccctcgacatgagcagttgcatcctggcattgctggtacttaaacacaaggtcattcatgttgctctcagcttcagtgaactccatttcattcctaccttctccagtataccaatgcaagacggcctttctgcggaacatccccatgaattgctatgtaactctccggaa

SEQ ID NO: 99885 - DNA, 231 bp, Zea mays
  unsure (1)..(231): unsure at all n locations
  Clone ID: MRT4577_22609C.1
cccacgcgtccgnaaaaaaaaaaaaaaaaaaaaaaaaaaaaaaaaaaaaaaaaaaaaaaaaaaaaaaaaaaaaaaaaaaaaaaaaaaaaaaaaaaaaaaaaaaaaggggcgggccggttttaaagttaccaagttttcttatcgcgtccttggcaacgaatttaacttttttttggtgtccccttaatttggtttgggtggcccggggttttcccccttcttgaattggga

SEQ ID NO: 99886 - DNA, 771 bp, Zea mays
  Clone ID: MRT4577_2260C.1
ttgggtacctcgaggccggccgggtttttgttctcctttcgtcgcgacgaatacacccgatacaaattatgagtgagagacgcgaattaaccggcgagagtatggctcgcaaccaatacaatactggctcgcaaagcccacgtggagaggaaggctgcccagcaaactaccttgccaccaacgtctgcccgcatacctgcctctccaccattggaggatgcgaagaaacctcaacgtgtaccatcgtgacaactgtatgccctccgccgagatcctgatggtatcaaaaaagaactgaactgctgatcggggatctggccttccaaaggttcgggaggcatgttgcacgagacttcagaactgattcgcgcttgcagaggcctgtaggggcttgccctccaagaggctgatgaggaataccttggtggacggtctcatgacagcaacctgagcgtcgtccgtgctaatggtgggagcatcctgggataggatatgcatctgggaaagaggatccccggcgcagagggactaagcgtgacctcaggcatcgggactaaaacatgacatactgggctactatcgtatagtcgtgacgccattgtaatgagatgtgagaaggatgatgtattgaggatatcaagtatctcgtctgctactgatggtgctaacactgatgatgttatcgctagatacgcttacttaggtatactatgcgctgacaggctggactagcatcgttatgtgttctgctgcactgagctcgcatgatgt

SEQ ID NO: 99887 - DNA, 282 bp, Zea mays
  Clone ID: MRT4577_22610C.1
aaacaaaaggggttcagagatatttttccatacggccatgctcattgggggggacacagatgaccacctaaagctgcttacttactttttaagactgaaccaacatggggcaacctggggggttaactttcttacggaccaaaaattttcataacaaatgcctggctgggctggttcacagaataacctacccaccaccacgaaattgccgcgctttaaaataaacacctcaaaagctaattgcccccagaagcccgttttacttataaagcactcccggct

SEQ ID NO: 99888 - DNA, 262 bp, Zea mays
  Clone ID: MRT4577_22611C.1
cctctatgagtttgcgtgtagcgactgaatcagcgttatgacccaagttctgctttctacgtgtacataacatgctggtactgccacttcacacgctacgtataacatgaagctgtgtgagccccattcaagtggactgtagactgttggtatattcagtgatgccgttctgaacgtgtatatggcatcaggaactgttagcttacagtgcatatcaatggtaaatatattactcttgctgaatagctgaatggcatttgta

SEQ ID NO: 99889 - DNA, 266 bp, Zea mays
  Clone ID: MRT4577_22612C.1
cccgggcgcccgggccccgagcgactccagcatgctcaatcccggaggcaagttgctctcagactcctccgctccggtcgctgaatggtactatcgtgcactcgacagaaagctccgccttatacccaagcggactaagccctgttcgccgggcgcgcggtgcccctggccatagctgatagatcggcaccaacggcgctgctcctatcacgagcctatgtgtggaagctctaaggatctctctggaggccgggcggactgagcgg

SEQ ID NO: 99890 - DNA, 172 bp, Zea mays
  Clone ID: MRT4577_22613C.1
ggcgcatcatggagttcggttgtggtgcaggtggttgctgttctgctgcgccccccacgacctttttgctgagtggcagtgtccgctgggctgggcgacctaaaaccgcacctcggggccgcgacctcggcatgcagggttccgcgcgcacggagcagccagcagctgggtg

SEQ ID NO: 99891 - DNA, 246 bp, Zea mays
  Clone ID: MRT4577_22614C.1
gaggcgccccggaaactttaatatttaataatcatgttttggtcgggatgttaatcataaacgactggtggcgttacaataaaaaaaaaaaatgcagagctcgaaaactggaacttgggacttatgcgctactttagctggtgttgtagccgggcgtgctcccttaaaagatgctttgttacccggcataatagtactaaggggagttgcaattaaagtagtgcagcggatcaggctgttttttaa

SEQ ID NO: 99892 - DNA, 456 bp, Zea mays
  Clone ID: MRT4577_22615C.1
cccacgcgtccgaagtttaagtaaaaatttaaaaaaatttaaatttttagtatttaaaaagaaaagaaaaaactttttagaaaaagattaaaacttatattcctggcgtgtcatgattttaagcaattaaaaattatcccaaagtcgtcgaaaaaaaaagatctataatattattcgcgctttatgtttcattatggacgaaaaaaaaaaaatggaagtaaagaactaacccttgtttttatctctagttattttagaaataaatttactttttttaaacaaaggtaaaattgataataagagactttaagggtttacctttaagttaaaaaatattcttaaaaaaaaaaaatgaggactccatttaacctaaaatttaaaaattttaattttaatttaaagattcaataattctttttttatataaaataattttataacctctttccttaaaaa

SEQ ID NO: 99893 - DNA, 585 bp, Zea mays
  Clone ID: MRT4577_22616C.1
ggctacttcggccccttcgccagcgacgataaccccccagttatccgagggaaaattttcaatgtgctgattggaatggcgagtacagcatgctttgtaattgtcagtaagaatgactatcccaatctacgaggcagaaagttggatctgcacccaaagtccctgaagtcagttgatagattcaatgaccttgtggtgtctgtttatgtaactgctggtcataccagattcatgttgcttcatgactcacgcagtgaagatggaataaaaagcttttttcaagaaggtccatgagctttacaccaagatattcctgaacccgctttacctgcccggctctcgcatcacatcctctcattttgataccaagatcagggctctcgcgaggaagtacctgtaatacacgggcatgcatgaagggtttgcatctcgtagagtaaagactaaagaagcagcagcaccgaaatgcagagagattgctcgaaatgagatgtgatgaatggaatagagacgccgcgcataaaatgcccctttgcataaatgcctgtccctgttatgcataataaacaaagcgtgttccgtcag

SEQ ID NO: 99894 - DNA, 715 bp, Zea mays
  Clone ID: MRT4577_22617C.1
aagattcaaactctcccgtgcaaaattttacggagacttgcccttccctctgccgtcccgtctctttgattcctgaaccccacccaggctggccaggcactccgcactcataatcgactgggctggccgtcgctggctcgctgctacttcggccccttcgccagcgacgataaccccccagttatccgagggaaaattttctatgtgctgattggaatggcgagtacagcatgctttgtaattgtcagtaagaatgatatcccaatctacgaggcagaagttggatctgcacccaaaaaagaggatttgtcttatcaccatcagtttatcctgcatgctgcgttagatgttgttcaggacctagcatggaccacaaatgcaatattcatgttgcttcatgactcacgcagtgaagatggaataaaaagcttttttcaagaggtccatgagctttacaccaagatattcctgaacccgctttacctgcccggctctcgcatcacatcctctcattttgataccaagatcagggctctcgcgaggaagtacctgtaatacacgggcatgcatgaagggtttgcatctcgtagagtaaagactaaagaagcagcagcaccgaaatgcagagagattgctcgaaatgagatgtgatgaatggaatagagacgccgcgcataaaatgcccctttgcataaatgcctgtccctgttatgca

SEQ ID NO: 99895 - DNA, 1169 bp, Zea mays
  Clone ID: MRT4577_22618C.1
aactctcccgcgcaaaatgatacggagttttgcccttccctctgccgggccggcactttgattcctgaaccccagcgacgctggcggaggcactccgcactcataatcgactgggctggccgtcgctggctcgctgctacttcggccccttcgccagcgacgataaccccccagttatccgagggaaaattttctatgtgctgattggaatggcgagtacagcatgctttgtaattgtcagtaagaatgatatcccaatctacgaggcagaagttggatctgcacccaaaaaagaggatttgtcttatcaccatcagtttatcctgcatgctgcgttagatgttgttcaggacctagcatggaccacaaataatgcaatgtccctgaagtcagttgatagattcaatgaccttgtggtgtctgtttatgtaactgctggtcataccagattcatgttgcttcatgactcacgcagtgaagatggaataaaaagcttttttcaagaggtccatgagatttacatcaagatattcctgaacccgctttacctgcccggctctcgcatcacatcctctcattttgataccaagatcagggctctcgcgaggaagtacctgtaatacacgggcatgcatgaagggtttgcatctcgtagagtaaagactaaagaagcagcagcaccgaaatgcagagagattgctcgaaatgagatgtgatgaatggaatagagacgccgcgcataaaatgcccctttgcataaatgcctgtccctgttatgcataataaacaaagcgtgttccgtcaaagaacagcatgctgacacacacgacacgacgagccaccacccatagcctccaagctagggcgtcggctttgctgtggtgcttgcgtggagactgaccattggcacgccggtctctcgatgtatacctgcgtgtcacggcatccacgtcatgtattgtttggcgaagactataggttaggtcctctatattgcatgacatcgtctttacgtgtcatgtagttacgtatctatctatacatgccgtctaaaagaccacatgttttttttcttcttattcgtcgcatgtcctttagaaaacaaacctaacaattaacaaagcatatatatatatggcgagcaaaaaaaaaaaaaaaaaaggccccta

SEQ ID NO: 99896 - DNA, 388 bp, Zea mays
  Clone ID: MRT4577_22619C.1
atgattattaatagatattacgtacgggtccttgtactgacttgttcttgctctctagtcttcgtctgcctcccttgtcggtttttgcaagcacccccagaagatcgggcgcagcatccgattcagcccattcttgtcatcacaaaagtgaggccgggcatgaagctttacgctatgccatcccacccggaaaccaccaacccccgcatagtactaccaaggggtgaatctttgctcgtaggagaaggcaacaaacatgaccaacttgatccccgccatcacctccctcaaaaaaaatcagtccgtctagacagggtagaggccaggaggcccaaaaaccttgccaagatcttcggcacggccggctgcctcagctgtgccatggcca

SEQ ID NO: 99897 - DNA, 503 bp, Zea mays
  Clone ID: MRT4577_2261C.1
gaggacaaaatgcgtgtttcctaccctttttatgtgatgttctggcacattttggctggaaacgtgtgaaagccggaaatctttttgtttggccgggcaccggctgcaggtcctaatcggggagtgtgggtctcacgtgacaaactgcacgtttttaaacgggggacggagggagtgcactttacgaacgccacgggcacaataatagcagtctgtcttgagatgtgcatttcgttgccccctcctccttggggtggacttgggcacgttacaggttttcatgtatacaaccgcggcggcggctggaaaaagaggcaaatcgccgagcactcatctacggtgatgtctcgccgcttgcgcctccacccgcgaacggagcacttcaccagtcgtttggccctcttccaccctgtccagcatccccggcatgatatgtaccggctcctcgttggagagcacgtcccataccccctgggtagccaggatgataaattggccactgc

SEQ ID NO: 99898 - DNA, 421 bp, Zea mays
  unsure (1)..(421): unsure at all n locations
  Clone ID: MRT4577_22620C.1
atggcccgcgcgcgccagggcgagggcgacaccgacgtcttgctgcacgacgtcgaccggagggtggagaaggctttcgccgaggagttcctctgcgagagattccgggtcggcggcaccggccggctctggcatttcaagtatcccgccagtttcacggcgtggggaggacggcacggcgaccgccggtgaccggaacccgttttgttaaggcgccggtgagagtcttggacggtctatttggcaccatttgggacggtctatagttagtactccgtaaacaggatttacgtcgtcgtcggccctgcagttcgaatggattcgagttttttttgttttggtttgtttaaaaagcagatgcgaacacatgtatttcctttcgttcggtgtttcaaagtgatagttcatcatgaatcanggt

SEQ ID NO: 99899 - DNA, 1146 bp, Zea mays
  Clone ID: MRT4577_22621C.1
ggctggccgtcgctggctcgctgctacttcggccccttcgccagcgacgataacccacgctggtatccgagggaaaattttctatgtgctggttggaatggcgagtacagcatgctttgtaattgtcagtaagaatgatatcccaatctacgaggcagaagttggatctgcacccaaaaggatttgtcttatcaccatcagtttatcctgcatgctgcgttagatgttgttcaggacgtagcatggaccacaaatgcaatgtccctgaagtcagttgatagattcaatgaccttgtggtgtctgattatgactctgctggtcatatctggccgtcgctggctcgttgccacttcggccccttcgccagcgacgataaccccccagttatccgagggaaaattttctatgtgctgattggaatggcgagtacagcatgctttgtaattgtcagtaagaatgatatcccaatctacgaggcagaagttggatctgcacccaaaaaagaggattcgtcttatcaccatcagtttatcctgcatgctgcgttagatgttgttcaggacctagcatggaccacaaatgcaatgtccctgaagtcagttgatagattcaatgaccttgtggtgtctgtttatgtaactgctgttcttaccagattcatgttgcttcatgactcacgcagtgaagatggaataaaaagcttttttcaagaggtccatgagatttacatcaagatattcctgaacccgctttacctgcccggctctcgcatcacatcctctcattttgataccaagatcagggctctcgcgaggaagtacctgtaatacacgggcatgcatgaagggtttgcatctcgtagagtaaagactaaagaagcagcagcaccgaaatgggatggatgccctatgcagagagattgctcgaaatgagatgtgatgaatggaatagagacgccgcgcataaaatgcccctttgctccagggttatccttgcataaataatgcctgtccctgttatgcataataaacaaagcgtgttccgtcaaagaacagcatgctgacacacacgacacgacgagccaccacccatagcctccaagctagggcgtcgggcttgctgtggtgcttgcgtggagactgaca

SEQ ID NO: 99900 - DNA, 797 bp, Zea mays
  Clone ID: MRT4577_22622C.1
ccggccgggggatgcgatcataccagcactaaagcaccggatcccatcagaactccgaagttaagcgtgcttgggcgagagtagtactaggatgggtgacctcctgggaagtcctcgtgttgcattccccccttcgctctgctgtcccgtctctttgattcctgaaccccacccaggcattccgcagtggctggccgtcgctggctcgccgctacttcggccctttcgccggtgacgataacccaccagttatccgagggaaaattttctatgtgctgattggaatggcgagtacagcatgctttgtaattgtcagtaagaatgatatcccaatctacgaggcagaagttggatctgcacccaaaaaagaggatttgtcttatcaccatcagtttatcctgcatgctgcgttagatgttgttcaggacctagcatggaccacaaataatgcaatattcatgttgcttcatgactcacgcagtgaagatggaataaaaagctttttccaagaggtccatgagatttacatcaagatattcctgaacccgctttacctgcccggctctcgcatcacatcctctcattttgataccaagatcagggctctcgcgaggaagtacctgtaatacacgggcgtgcatgaagggtttgcatctcgtagagtaaagactaaagaagcagcagcaccgaaatgggatggatgccctatgcagagagattgctcgaaatgagatgtgatgaatggaatagagacgccgcgcattaaatgcccctttgctccagggttatccttgcat

SEQ ID NO: 99901 - DNA, 850 bp, Zea mays
  Clone ID: MRT4577_22623C.1
ccacgcgtccgcggacgcgtgggctcgggggtaaagacttccccttcgctctgctgtcccgtctctttgattcctgaaccccacccaggcattccgcagtggctggccgtcgctggctcgccgctacttcggccctttcgccggtgacgataacccaccagttatccgagggaaaattttctatgtgctgattggaatggcgagtacagcatgctttgtaataattgtcagtaagaatgatatcccaatctacgaggcagaagttggatctgcacccaaaaaagaggatttgtcttatcaccatcagtttatcctgcatgctgcgttagatgttgttcaggacctagcatggaccacaaatgcaatgtccctgaagtcagttgatagattcaatgaccttgtggtgtctgtttatgtaactgctggtcataccagattcatgttgcttcatgactcacgcagtgaagatggaataaaaagcttttttcaagaggtccatgagctttacatcaagatattcctgaacccgctttacctgcccggctctcgcatcacatcctctcattttgataccaaggtcagggccctcgcaaggaagtacctgtaatacacgggcatgcatgaagggtttcctaagctttgcatctcgtaagcacaaggctgagctagtttcgcttcgatctttttaggctttctttttgtttgatatattccgcgcataaaatgcccctttgctccagattatccttgcataaatgcctgtccctgttatgcatgaaaaaaaaaaaaaaaaaagcggccgaacagcatgctgacacacacgaaaaaaaaaaaaaaaaaatttgcggcc

SEQ ID NO: 99902 - DNA, 107 bp, Zea mays
  unsure (1)..(107): unsure at all n locations
  Clone ID: MRT4577_22624C.1
ccctggggcgaccacgcagaccgacaactccgaaacacctcgcagcaggagagaggaagctcggagagccnatacccgacatccaaaaacatgcttcctatgcggga

SEQ ID NO: 99903 - DNA, 372 bp, Zea mays
  Clone ID: MRT4577_22625C.1
cctggatgaaacaagccaagcatatggtctgggagtatcgacttaatacttctgacccgacttggctaggcgtatggtgtgctcaatgcatgatgaactaacacacacggtttgctcatattgacttgcttccacgcgagaaacttgacggaactgaactttttcatggccttggagaccatatggacgcacctaagggaactgagaaaactggacttctctatgcaccggtggacgccgtccatctccagcaaccagccaaaggagacgggtatgttgttctacagatcgaggcctaagtagctgacaagcatgtcgctacgtgtgtcttgctacattgggacggctcctcagtgctctccgactgaatcc

SEQ ID NO: 99904 - DNA, 309 bp, Zea mays
  Clone ID: MRT4577_22626C.1
tcgcgttctaccagcacggcaacaattgtggccattgaaccaacttgctatgacataccctacataatgctggccacaaccgattattgtgggtcactgcttacacattactgattacatattcacatatacttgagcaccctgtctgatgattataactatgccattataagatagtacacttctagatagattgacttccttaatgtgcgctacatataacatacacaggatgtgctacacgtacatgcaatgctgtcaaaattgtacgatctaagctagactatgatacttgccaaaattgataat

SEQ ID NO: 99905 - DNA, 747 bp, Zea mays
  unsure (1)..(747): unsure at all n locations
  Clone ID: MRT4577_22627C.1
tcaggccggccgggccgggttttcctcatactccccgaccaccgacagcacgtttacactcgctcgtttcccatcgcgcacccgacatggtcgctacgaccgccgccgtcgacactgcccccccgtctcctcctccctcgatggagggcgcgactgcacctgcactgcatcaaaaggttctcctgctgctgcccctcataccgacgggcccgcgatccgcgtccgcgccgtataagcgttagctcgagggagagcggttccacacctccgaatacgacaagatccgagacgtcatcaccgatctgcgaggtcgcttcgtccaggatgacgcaggtactgatttccgccacgagcatgctacacgcgtcattatgacagaaagaaatgcggtgatggatctatcccataaactgacgctgcaagcttggtgctacttctgaacctgtgaaaccattggagaatgcttcagtcgtacttgggaacgatgagcttgagaaagcatcaaataagtcttcgtctggacctgtgacgggggaacctgtaaaggcaccgtggaactcttcaactggacctgatgaaggacgagtactatgaaaccatcgcataagtcttctgctgaacctgtgaagaacgaacccagctagtctgctctagctggacacaactatctagctcccancgtaagccagactactagatctccaaataatgcaggtcttgatgcaccactagtcaagcatgataact

SEQ ID NO: 99906 - DNA, 261 bp, Zea mays
  Clone ID: MRT4577_22628C.1
aaaacattaaacgttataaggactcgagccatactgctgcagaagagttgtgggtacaacacacagaggacacagcaggtccattaaaccaacgaagccacaaccacgattcatgacacacaaaccacagatgtttattggacgactacattcatatagaggtacaccagagggcaccagactacgcagatacctaggtacagcaacagtttaaatgacccatggcttactgaccaccgcggaggcggagcaccaggtgga

SEQ ID NO: 99907 - DNA, 310 bp, Zea mays
  Clone ID: MRT4577_22629C.1
ttgttgtaactttccacgtgtttgtttttatgttttgggtgtggttattcttatcttttttttttttgttaccaaaacactccgatgaaacacactgaacccgcttacgcgcccactttggggggtgcaggtcaacatacggcgattctaaaaaacccggggctgagcaggaaaaaagttgctccctaaaggggggggaaagaatgtgcttttgcccgctcaaggggagaattgcggaacttaatgcccccccccggggtttgttttccgcccgtctttttttagatgggggggggcggccttctcattg

SEQ ID NO: 99908 - DNA, 306 bp, Zea mays
  Clone ID: MRT4577_2262C.1
ttattatcctagcggaccatcccgaatgaggcatccgcaacgggacgagagcagcagtcgggcaccagcccattcgaaccctgctggtcccctctccgggttctcttgaagctctgagctgctggagaagagaggggaagctgccgccgaacgacatggaggcggaaaaaaaggggccggcagtgtcaaacaacggcgcgtcggctataaacgtcgttagatccgtcagactcataatgggcaacaagcagctgatgtggttctccggctacggcttcggctttagcaccacgctgaccggggttc

SEQ ID NO: 99909 - DNA, 253 bp, Zea mays
  Clone ID: MRT4577_22630C.1
cagaaacctgagtccattgccatttacagcgtctcgtctcgctgtatcgttcggtcttcgacgcctttcccctcttcgtcgatctcaccaccgcgctgaccccgatggcctccgccgtctcatcggctgccgccgctggcatatcgctgttccatgggttccgcacgttcctcaaaaagccgttggagatcactggcccctgcgcctcgaccgagtatcgcaacgcgctgcctggcgcgctcgattaccgcgt

SEQ ID NO: 99910 - DNA, 847 bp, Zea mays
  Clone ID: MRT4577_22631C.1
ggaccctcgggcttgccggggtcgcccgtccgtctcctctccccgctccgctggtcgccttctcccctccccgcgaactcgggctcaaagcaaaccaaaccccttctagggtttgcgctccgggcatgatccccttgtagccaccgcctcccatggccctagccgtgtcctgctggccatgaccacctcggcttccccactcttccccaacccgcgcaagcgccacctcgacgcctccccccttccccgccacttccacggcccgcagagccaaacccgcctaagccagcgccaccgccgccggttcttcttgccgctaccaccgaaggcgcggtccttcgcttccgacatgggaaatcacatgtccagtgccttcggttggcccagtgatgacgggcgggggctcctctgttgctggatcggcaaggcgcggggtctcacggtggccatggatgtggaggcggggacgggactgcatttggtggaccggcggagggttacggattcgaggaagactacgttgaaggaggaggcggtgaagcctccccaatggaagaaaaggaggcccttctacaaggaggcgttggaggcagcagcgacacattacgatccgaggctggaggcaatcgggatcgagataaggctccaaaaggagaagcttgcctatataccaaagtcggataaggctgccaaggaggtagtttgatctgtgtatactctgctttgctattgtcatgctaggtgacatggaaggaaaatgagtgatcgagtttccatcttgcacttaattagtgggggttattttggaattggtgctctggaacagaaaattcagtgaattgcttcg

SEQ ID NO: 99911 - DNA, 333 bp, Zea mays
  Clone ID: MRT4577_22632C.1
acgtcagcacacaaggtggaaacatgcgcctgcacagctccctctgaagcgcggcgagcactgaacgagttcgacagcatctcccactccacagggaccgagctggcaagactgcacgacgcgcaccaagagcagaaggccagcaactctcgtgtcatgacccagaagccgacgtcgagaatagtgccatagaatggagcatatcgcatgagacagagcgcttcatggtgaaaaaacaggacggagatggtgaagctgcaggtgaccaagaaagggaagaaaagggcactacgacatcgaatgcgagatcgtctaggcgacagcagacttgca

SEQ ID NO: 99912 - DNA, 355 bp, Zea mays
  Clone ID: MRT4577_22633C.1
gctggtggtggtgctttgttggttgtgcgctgttcaaacaccaccaaattctacgtgggggtgttgaacaaaagatgttaatgcaagcagccacacagtattgtatgcccgtcctgatttggaagtgaaattaaagaatgagccggtccgttccgcccgccggctccatgggcgatacgaccgacactcgcaaaacctctggaacacaacaagggttacggaccaggccaagacctatggcgcattcacccaggatccaaccggctgaaactcttgacgactggctccattctgggttcacctgaaaacttgtgcaaccgacgggctagcgcggtgtggctctgctttgtcctgg

SEQ ID NO: 99913 - DNA, 589 bp, Zea mays
  unsure (1)..(589): unsure at all n locations
  Clone ID: MRT4577_22634C.1
ggacggcatgctgggcatcccaggtggcagcggggcggcgagtgccacgcgctgagcgcgctccggtacgcggccggcctgggcgagaacctgcaggtgcagggtctcccgtttggggcgcgcgctgagcacgacgcgatggagatgaagcctgcggcgacggacaggctgctctcgctggactggtacagcgagacaagccgcgcgccagagagcgccatcagctcgttgggcgcgctgggcctgtggagcggcatgctcggcggtgcgcaccagcaccatggctcgtcggcggccatctaagaccctagcaaaacgtgcctccatgcttgcgttgcattgcaccagtttgctaatggcgttaacaagtatgagtgactacgtagaaatgcttgtttttttttacctgtttttatcttctgtttcgtttcgtcgtttgttttttggacgatccatgtttgccgctcgtcatttcagatgatgtctctgttgttgtaccgcttcaaagttcaaacacttgctgtggttcaaattaaaaaaaaaaaaaaaaaaannnnnnnnnnnnnnnnnnnnnnnnnnngggccctcg

SEQ ID NO: 99914 - DNA, 1766 bp, Zea mays
  Clone ID: MRT4577_22635C.1
acggtgtcggaagctcccttcatttctttcacctccgattcgattccttgtcccctcttgatccgagccgccaccaaaccctaactatctaaaacccccgtctcgctgtccgatggccgccgcctcgccgccgccctccccaccccacgcaaagcgccccaagatgtcctcctcctccgacccggaagccgatgctgagcccacctcggcctccgccgccgttgagggcgccgatcctgcgcagcgtcgtcccaggtacaagcgccgcaaggtcgccatccttctcgggtactgcggcgcggggtatcagggcatgcagaagaatccgggcgcgcgcaccatcgagggggacctcgaggaggcgctctaccaggcgggcgccgtgcccgaggccgaccggtccgcgccgcgccgttacgattgggcacgtgctgcgcgcaccgacaagggcgtcagcgccgcggcgcaggtggtgtccgggcgcttctacgtcgacccgccgggcttcatcgatcgcttgaacgcgcagctcgcgccgcagatccgcgcttacggctacgtgcgcgttaccaactcattcaacgcgaaaaagttctgcgaccgccggaggtacctgtatctgctccccgtatttgctcttgaccccagcgcacacccggaccgcgaggccgtcatggcgagcatggggagtgggagcgagcttaccaagtgcctggagtgctccgagagaggcaggaagattcctggtgtcatgggccgggaggggaaactgcccagccccgggcagaatggtgttgatgctcccgtggagggaagtagccatgacgaatctggaacacttggggatgcaaatgtgaccatagttcagatggtaataaccattatccagtttttcgttacatgggaaactgctgagcacaatgctggtgctgaagttgagagtattgctgctggtgcagagcccaaggttggggctgaagttgagaatactgaagaagtacagatgccaagcgacaatctaaatgcagatctttgtgaaaaccctgactggcaagactatcaccctcgaggtggagtcgtctgacaccattgacaacgttaaggccaagatccaggacaaggagggcatccccccagaccagcagcggctcatctttgctggcaaacagcttgaggacgggcgcacgcttgctgactacaacatccagaaggagagcaccctccaccttgtgctccgtctcaggggaggcatgcagatctttgtgaaaaccctgaccggcaagactatcaccctcgaggtggagtcctctgacaccattgacaacgtcaaggccaagatccaggacaaggagggcatccctccagaccagcagcggctcatctttgctgggaagcagcttgaggacgggcgcacgcttgccgactacaacatccagaaggagagcaccctccacttggtgctgcgcctcaggggaggcatgcagatcttcgtgaagaccctgaccggcaagactatcaccctcgaggtggagtcttcagacaccatcgacaacgtcaaggccaagatccaggacaaggagggcattcccccagaccagcagcggctcatctttgctgggaagcagcttgaggacgggcgcacgcttgccgactacaacatccagaaggagagcaccacaccacttggtgctgcgcctcaggggaggcatgcagatcttcgtgaagaccctgaccggcaagactatcaccctcgagagtcttctaga

SEQ ID NO: 99915 - DNA, 376 bp, Zea mays
  Clone ID: MRT4577_22636C.1
aaaaaaaaaggggggggcaattcataaacaaacaaaaaaacccgcccccgaaaaggaaggcctccaccccgggaaaatttaaacccccccccacctaagccaacccccaaaaaagggataattcaaagggggggggggggggggcaccccccaggaggggggggcagcaccccggaaaaagcagctcaaccgggtttgggtggaaaacaaaccggacattccggcaaaaacttgggaaaaaagggcttaaccttaccccaggcaaaaagactttccacccgggggggggccccgggaaccccaaaaggcccgccccaggggaaccggggaaaaaccctaaaaaaagcggggcgcgaaaaggggggccccccccccc

SEQ ID NO: 99916 - DNA, 426 bp, Zea mays
  Clone ID: MRT4577_22637C.1
aaccggacgggacacacacacatggcaacaaaaagggccacaaacaaacaaaagggggcaaacccaacgggcgccaggaaaaccccagggacgcaccaaccgaaacgggacggggcgggcaggaaacgcacgcggaccggaaaaaaaagggggaaggaaccccaccggaacggaaacaaggggccgggcaaaaggtcgaccacaggagcagaaaccaaccaccccaccgaaaaccgaggccccccacaaaaagcggccccccagaacgaaacccccccaaaagtcaaacaggcccaaccggcgggacccaaccaggacacacgggaccggccccgccagcccaacccccaccccccaagaggagggaccctccgaaccgcccgaagaacgagacagggggggccccaaggggaaacctaacccccc

SEQ ID NO: 99917 - DNA, 456 bp, Zea mays
  Clone ID: MRT4577_22638C.1
gataaacttcctagatggaaagccaatctcttgagtcgggctggtcgccttgtcctggttaaggcagtgttgtcttctgtccctatctatcttatgttggcgctggaactccctaaatggggttttaaggcaatcgataagagaagaggctttctttggaaggggcaaggtgatgcaaatggaggtaactgccttgtttcttgggaatctgtccagcggcctttgcagtatggtggtctgggtattctcaaccttgagatgctaggatgggccttacgtgtccacctgtccggtggctttggcttcagaagaatgatccaaagtacactgtaatgcaaaggcactccatgtccaagtacactgtaatgcaaatacactctttgatgtggttgttgtctccgtggtaggcagtggcgaatttgtgaagttttggacaaatcgttggcttcttggtaa

SEQ ID NO: 99918 - DNA, 263 bp, Zea mays
  Clone ID: MRT4577_22639C.1
cgggccccccctcgagtttttttttttttttttttttttttttaagacataaagggcataggtttctcttattatggactatagcctcaagcggctgacatacgctgcttagagtgctgaatcaagacgaaaaggcgggcacaggaattacacaacctgattggccagcttaccacctatcatcgagctgaaacacaggggagtgggaagggtatgttgttgagtgcttacccaaaaacccggcaaataccctacccgtgtgg

SEQ ID NO: 99919 - DNA, 254 bp, Zea mays
  Clone ID: MRT4577_2263C.1
ctggatttgttccattgccaatgaaattttttattcaaaagaaaatagatcttgccaacaaaaagctagtaatcttaaggggtgacgcttctataaggtacgtgctggcctccactttcatccggtccgtaaactcgatctttcttttagcccattgcctatgtcttgcgcctctttgttctgcgttgccactgtgtacacttttactgctccctttttttcttcttttattcacatacctttttttgctactg

SEQ ID NO: 99920 - DNA, 299 bp, Zea mays
  Clone ID: MRT4577_22640C.1
ttttggtttgttttacatttttttttcttttttttcgtgattatttttttggggggcgaccatagggccccccaataggggggagcaaaaaagccgccgggaaatattttcaggaattagcaacccagcctggagcacgagaagggtaacctcgccatggggccaggaaaggaaaacccccgggaggggacccgggagaaaatacccgggggcgcaaccccaggatccgttcccaggggcacccaaaaaaaaaatactggacgggggacccaaatccaaataccggggcaacccctgcc

SEQ ID NO: 99921 - DNA, 938 bp, Zea mays
  Clone ID: MRT4577_22641C.1
acgcctttggctttttctgaagacaccatcacccagccctatcggctggacgtgcctcaccctctgaagccctccccacgtcgaagtcatcccctacccttctgccatggacgccaccggccatggtgctactgcttggcctggacgccggtctcaccacggtccgaatctgcatcatccttagcgtcgaccatctctatgttgcccctgtgagccccggtcgtctctactcctcttcccatggccacctcacctccactgcctctgcttcttcctcaagccgacgctctcaaccatggccaccgatccccgtgcctctcgcaaggtttgttttcttcggccatggtacccagcagttcactgcctccctcttcagtgcttttccctacagcccctacgtcgtcgtgcgtgtaaggcgtttgacaaaatgcccaagtggagtgccatgtcatggacagccatattggcgccctcgggtgtttgatgctttgcgcagcccgtccgcgacgccatcgacgctcggtgaggtctcgttctcgctttatcgtttcatcgatcgatgtcaatttgctaatgtgaattgtgtgtatgtgtctatgctgttgaggagaaaaatccggggaatctaggtgaagaagagacagaacccgtccgtcgcttaccaggtgctgggtgaaaggctcaaaccgactatcgttgtcgcttaatgccgatcgagtcagcttaagtcgtggtgagctacctcattattcctgctatttagtcaatgtatggactagatggatataatagttacgataattttcttatctctagctcagatgtgttgtttgttcctctattttattgtggtaattgtgcttatattaggtggtatttaagtgatgtgaatggaagtttagtgttttaaacaaaaaaaaaaaaaaaaaaggccccta

SEQ ID NO: 99922 - DNA, 384 bp, Zea mays
  unsure (1)..(384): unsure at all n locations
  Clone ID: MRT4577_22642C.1
gagttgcatgcacgctgtacgctagagctcgngcaatntcgngctaccgagcaggtaggtatcatagtatgctatataccgagcatgacacatatgtttgtagtaacttatcatcgtngtagagcacgtttacgctgagatcgacatgataatcagtacactttcgaatggctacgcatactacgggttcgtagtgtcagtagatatagcccaagtatgcccggtcgcattacattttatcagtcagcggtgatgggaatcagaccgggcgctgaatttcgcacagccctcgaagaggcaaagagaatgaatgtagatgtcatccgtacgacagagtaagcgatattacgtggcacagggcgatgagccggcttacactgggtg

SEQ ID NO: 99923 - DNA, 839 bp, Zea mays
  Clone ID: MRT4577_22643C.1
ataaaatctcgcctgccatctcgcagtccagccccgtcgttcacctcaatctccacgcgtcaccgccgccttccggcgagtctattcccctccgccacgccgtcgaagctttccagacccgcagcggttcggataaggcggccgcccgccacccgccctcctttcggccccactcgtctcggccccgggaccgcttcggggtggatctagggttgcgtggggaggggttctggaagcctccgccgcgatggacgaggcggacgatgacgcccgcaccttcaaggtcggattcaccgccgccggagagaagcagttccgggaactcgtgagggagaagctgcgcgggttcaggaggggcctggacgacaccctcctggattatgttactatcatgctccagaatggaaaacgtaaggatcaagccagtatggaactccgtgtatttctaggggatgatagtgcagtattcgtttcctggttgtgggaacatctttctttaaatatgcacttatatgtgcaagcacaagaacaaactcaggaggttaaggatgatgaggcccccaaagaagtatctggaaaagataaatcatcagatatgtccccaagaagcaaatgtcaaactcattctgagcacccaattgaatcaagtgcagccactactaggaaacgtgataagcgggaatggaagggaattggtcgggagggtaatgaaaaatttccacttcgaaatgtactaactgatattcttcatggggaagagaaaaaatctcaaaagtccaatgaaatacgatacccttcatcaaaacaacagaatggcagaaagcgtgacagggatgatg

SEQ ID NO: 99924 - DNA, 331 bp, Zea mays
  Clone ID: MRT4577_22644C.1
aaaacccccaagccccacccaccggggcagcagcgaccagggaccaccgccgaccggacaacccggggcgcgaagcgcaggccgaggagccagaggccgaggacgcaacccggcgacagacgacgaccgcagagcaggagcagaaggccagggacgagaccaggacacggagcgccacaacaagcagagcaagaacgcgaagcagagcgagaagcagaaggagcacaccgaggacaaggagggacgggcggggaccaagcacagacaccagaaccgggaggaagacgcgcgccgcaacgagcgcggaggaaagcaaagccggggcccaaag

SEQ ID NO: 99925 - DNA, 265 bp, Zea mays
  Clone ID: MRT4577_22645C.1
ctcaattccaaggctaactcgccgaagaggatggcacaaagacagaagaccgagccttggggtggatctgaacgggaacgggacaagaacccaaaatgtcacatcctacctacaaaaacgcaacgtgcccatcaactatacccatcttggcgttagtatccaacgtcggcgctgtcgtcctctagggagatctactactcctcacgctgaccgatagtcctcgggcgtctacagatctagatctgaatctggaagaccagattat

SEQ ID NO: 99926 - DNA, 378 bp, Zea mays
  Clone ID: MRT4577_22646C.1
tcctacccctccggttcgggtccgactccgggagagtgctacggagttcggttaggtgcatgagccaatcgacatggcaacttcagatgttctgtaccgatacttcctagaaagcctagcctgcgccacagacgaccactctctatcacaacaccttaaccacctacagagtattgcctgaggcccaaaccataccttatcaggagacacaaaggtccgagcggtatcggttatgctccttggccactgatgacgcttgacgaaaagacatccagggcattatctgaaaggaacgggactgtcggaacattaaaccgatataggcctatttctgagggtcacgaacaagcttgattatgtttcttcccctgatccgct

SEQ ID NO: 99927 - DNA, 238 bp, Zea mays
  Clone ID: MRT4577_22647C.1
gtggggggcacaagtaaaaccgatgaccttattgatagtatctgataaatgcacactaggtaataatactatacgtgacaacaaaagcgccatgaaatgaacggaacacacattccagagcatgaaagtgcaagcagctcgagaatgttctaaccaatgccctatgcatgaacggcagttttgaagcgtcgttataaaatctggggttctttttttttcttttcagcacgctactttg

SEQ ID NO: 99928 - DNA, 264 bp, Zea mays
  Clone ID: MRT4577_22648C.1
tgtctttatagcggccctgggggcggggacttagctttgctattttatatggcttttttttttctaaaccgaaactttattacagaccatgtcgtacgttattggacatcccacacatggtaaagagccgtggcgttacctaacttattacgtctttaaataaatagagtggatacaggagatttcccaaatatcatgacccaatcgttcggcctaatgacagcggagacacccaagtggtggtgcgctcgctgtgcagctggg

SEQ ID NO: 99929 - DNA, 2992 bp, Zea mays
  unsure (1)..(2992): unsure at all n locations
  Clone ID: MRT4577_22649C.1
catggatactttacacagtgagaatcttcggtcagaaacacctgagttagttggggcagcataagaagaggaacatggtaatcacgctgtgagtgatgatggctccatcctaccagtcataaatggtgttgttaatggtagtgaagctgtgaccaaataacctgaaaaaactttgacatcgaaagaaccagaggatactggaataaagaaccttaatatacccattcaattttcagaaagtactccttatccgtctcatgaatcctttgctagctggccttctcaacttgctatgactacgcacgcgctcgcctcctcccgcggcgtcgccatagggttagggttccggcgacttccctcctttccgcgtcgcggcgaacgccttgggagacccgccccatgtcgtccgacccatcgccacacttcccctcgccggtggccccgccgggcgcggcggaggcagatccccatcacctgccccaacccgccgagccacacgaggtgatgcaccggacgagggccgtcgacttcctcgggcgacgcacgcccatcgtctaccagaacgacaacgggccctgcccgctcctcgccatctgtaacgtcctgctgctgaagaatgtgatcagtctgaaccctgacgctggcgaggtgtcgcagcagaagctgctctcgctcgtggccgagcgcctcatcgaccccaacattgccggacaggataaggacgaggagtatgtttgcaaccgggagcagaacatcgcggatgccattgatcttctcccgcgccttgcaacaggcattgacgtgaatgtgatgtttaggaagattgatgactttgagttcacccgagaacgtgctatatttgatcttcttgatatcccgctataccatggatggatagtggaacctcaggatactgaaactgttaccgctattggatcaaagacctacaatgcacttgcttctgaacttactgaatgcacttcagataaaccaacagaaaaaaacaaatatcagtactgggaacccgttgattttgctaccgctacaactgcagctttaaggatttcagctccaagtgttacgcgttgaagatcgattgatgaacatactctctcaaactcatcaacagtaaccacttaaaacccaggacaagattcaatctaggagaaccggactagggtccgcactctagataaacctaaacgtgccgacgtccagaattctatcgacgcttgacagatgcatcctgtagcaaatatacagccagcataaaagcagaaaccacagagagaagaagctcagttagtcgtggcgccgaaaaaagaggaatacggcaatcacgctacgagcgatcatgtctcaactcgatcagtcacacatgttgctattaatggcagctaaattgtacccgatgaatccaaagaaaatttgataacaaagggacgaaacgacaattgaaaaaagaatcttcatatacccagtcaatttacagaaactactccttatccatatcataaaaccttaaataaaagtgaccaccagcctgctgttcctacccttgttgaagatgataaagaaacctgcaaagaacagttcgatgtacaaattcatggccaatctaatgatactgaggtcgcttgtgactcaacggttacaacttgtgaagctgttccagatcatgctacaacagaactggatgtgaaaagtgattctttagataattctcagtctctaccttcaagcattcaggaatgtgaaccaatataccaaggtgaagagcacatacttggcaccacaaatatggtgtatgaaaatcaagagccagtgtatgagggggaggtggttcttgctgagcaggctgacaagattggggaaagcagttcttctggggatgacaaggccacagaacatcaatgggaactgattgataattttctgcggaccactgctaaccagctgactgtctatggtctcttctgtttacaagagggacttaacgaaagtgagctttgtgtcttcttccgcaataaccactttaacactatgttcaagtacaacggaagtctatatctcctagcaactgatcaaggttttataagccaaactgatttggtatggcaaaggttggatgaggtgaatggagatggcgtttttcttactagcaacttcacaccatttaatgctgaaactccaagaaatgattcatggaatgaacagcaagctatgacgagtactgctgattatcttgctcaatttgacaactccacttctggaaactctgatcttgagctagctatagcactccaacagcaagagtttgagcggcaaccacaaaggtttcaagctccaccgcagcagcagcagcaacaacagcaacaaccaccacctcatacgcagtaccagactcaatctggccgaccaggacttgttgttggtccaaggaggtccaacgccccacctccgtccagaagtgaatcgaagaaagagagatgcatcgtgatgtaaaaataccttcaacagaaatgtagaagaaaaagagagagaaggaactcattatactgtaaagaaatgttttcttctgcggaggcagtgtctgcgtttagtcaccttgagccatctcccatttgagtttttttttggttttactttctctgatgtatgtaaataacctaaacgaataaagtgtagaaacagatgctgtcaaagtgatggccccatgcaatgtgatttcattcatcgccccgtgctcgccccgtnnnnnnnnnnnnnnnnnnnnnnnnnnnnnnnnnnnnnnnnnncccgtcagctggttagcagtggaccacagaaaattatcgatcaactcccaatgatgttctgtggccttgtcatccacggaaggactgctttcctccatcttgtcaagctgcttagcaagaaccacctccccctcatacactggttctccattttcataccccatatttcgtggtgccaagtatgtgctattcac

SEQ ID NO: 99930 - DNA, 1646 bp, Zea mays
  Clone ID: MRT4577_2264C.1
cgcccccactcctatccgcagagtactactccctccggtgtaccaaaaactgacgttttggacagcttctcacataccaaggaactaataaataccacactttttcattcctagtcaaatccctttaatagccggagtggtcatcttcactccttcccaggcaggaggcctaggttcgattcttgactcacgcaatactaaattttttaccattttgcatgcaaatgcatggcgtggagaaggccaacggacggctggtgaatttacttcttgctgcgtcaatcgagagttctcctcgctccacgtgaaacgtcaatttatcgtgcactttggactcaaagctagaacgtcgattattgatgcaccggagggagtacatcaccagagtccatagggaggttgcgaccgggggccggccgaccgagccaaagtacgctaccactcttgctgcaccgaccgcgagggtgcaacgacttacatatatataaatatccgcgccgcagctagctatctagcagcctagcagagcagcccggccgaagccgtgtagcctagcctcctcatatatagcagcagcaggacgagttcgtcgatcgatcgatggtgtctctgcagccctcatcagcggcgccgctcctgccggaggccgccaccgcgaacaagctcccgccgtggctctccctcgtcggcagcgtcgtcgcctcttccaccggtaccgcggccaccagcaagaagcggaagcgggacggcagcagcggcgacgacgacgaccgtggcgaggtcgtggacgggatcgagctcaatttcgacgccgcgccgctgccccctgagtggcaacgctgcctcgacatcaagtcggggcagatccactactacaacacgaggacgaagaagcggacgtgcaaggaccccaggggccacgggcagccggactaccgcgccgaagaaggccaggaggaggaggaggaggactccgcgaattgcgcgccgccggggctggacctggagctgaacctcacgttcgagccgcgccgcgtgctcgccgcccacgggaagacgacgaagagggccaagcagcagcccgcggaggaggaggaggaggccgaggacgacgacgacagcgacagcagcagcagggagatggtggctggcgtgtgcgtgcggtgccacatgctggtgatgatgtgccgcgccagcccggcgtgccccaactgcaagttcctgcacccacccagccgcgccgcgccgccgctcaagctcggcctccagctgctctgctgcagggactagagaccaaagcgtcccaacgacccatggatatggctccccagcaggcatatgcgtgcaccagtagaacgcgcgcacgtgtgtcgcacgcatgcatgtgcaaggaagacacagcgtaatattcaatcagaggcagggtggtggtatggtagctagaggagttgatcagttgtgagtgacggcgccgatgcccgtggccgaccgatcggctgtgcgcgtacgtacgtacggttcgccaaggggtatatatatcgtgtcataatgttattactcatgtggcgatggatggatggatggtggtggtgtagatatcataaagtgcatgcatagcataaatgtagctcggaactttcggtgtc

SEQ ID NO: 99931 - DNA, 806 bp, Zea mays
  unsure (1)..(806): unsure at all n locations
  Clone ID: MRT4577_22650C.1
cgtatacatcctatgggcgattgggttcctcgaggccggccgggggccncaccttctcccacccactgcctcgtattctattcccctgcctccccatctccgccgtcctcgccttctccaatccagtcgacaccgcacgcgctcgcctcctcccgcggcgtcgccatagggttagggttccggcgacttccctcctttccgcgtcgcggcgaacgccttgggagacccgccccatgtcgtccgacccatcgccccacctcccctcgccggtggccccgccgggcgcggcggaggcggatccccatcacctgccccaacccgccgagccacacgaggtgatgcaccggacgagggccgtcgacttcctcgggcgacgcacgcccatcgtctaccagaacgacaacgggccctgcccgctcctcgccatctgtgagctttctccctccagtccctcgttcgactccgtaccctcacgagttcgccgcgtgcctagtggcttcctgcgatgttgatgtcaccggtgcgcctgtgtgcaggtaacgtcctgctgctgaagaatgtgatcagtctgaaccctgacgctggcgaggtgtcgcagcagaagctgctctcgctcgtggccgagcgcctcatcgaccccaacattgccggacaggttcggctatatctcttgcaagattggggcttcgtgttcggtcgatcaatgcgggacggtcttgtgttgngttgcagcagcagcttgccggctggaatctaattaggggtgctggccgtgtcatttcttgggngtgttgatgatttcggat

SEQ ID NO: 99932 - DNA, 416 bp, Zea mays
  Clone ID: MRT4577_22651C.1
agcagtggtaacaacgcagagtacgcgggtacttatatgtagtttttattctgacgttcatgcagtggaatgttctttctgttgaccatactactgtaacatggtttctatctcaagggaatattttcataatcaattactttgattggtgaaaaaaaataggtattagagaatgggtgaacctaatagagctgctttattgtatgaattttccgtggtaacgttagctagaaagttctttactctagtaatttattaagaaagtgatgcctgatgtgttgtagaagttgtttaggcaagtaatgaattttatactatgcagaagttttgattttttaaaaaaaaaaaaaaaaaaaaaaaaaaagaaaaaaaaaaaaaaaaaaaaaaaaaaagtactctgcgttgttaccactgct

SEQ ID NO: 99933 - DNA, 1618 bp, Zea mays
  Clone ID: MRT4577_22652C.1
cggacgcgtgggtttaattaaccagaggacaatggaataaagaaccttgatcgacccattcaagtttcagaaactactccttatccgtctcatgaatcctttgctagcagtgaccaccaacctgctattcctacccttgttgaaggtgataaagaaacctgcaaagaacagttcgatgtacaaattcatggccagtctaatgatactgaggtcgcttgtgactcatcagttacaacttgtgaagctgttccagatcatgctacaacagaactggatgtgaaaagtgattctttagataattctcagtctctaccttcaagcattcaggaatgtgaaccaatataccaaggtgaagagcacatacttggcaccacaaatatggtgtatgaaaatcaagagccagtgtatgagggggaggtggttcttgctgagcaggctgacaagattggggaaagcagttcttctggggatgacaaggccacagaacatcaatgggaactgattgataattttctgctgaccactgctaaccagctgactgtctatggtctcttctgtttacaagagggacttaacgaaagtgagctttgtgtcttcttccgcaataaccactttaacaccatgttcaagtacaacggaagtctatatctcctagcaactgatcaaggttttataagccaaactgatttggtatggcaaaggttggatgaggtgaatggagatggcgtttttcttactagcaacttcacaccatttaatgctgaaactccaagaaatgattcatggaatgaacagcaagctatgacgagtactgctgattatcttgctcaatttgacaactccacttctggaaactctgatcttgagctagctatagcactccaacagcaagagtttgagcggcaaccacaaaggtttcaagctccaccgcagcagcagcagcaacaacagcaacaaccaccacctcatacgcagtaccatactcaatctggccgaccaggacttgttgttggtccaaggatgtccaatgtcccgcctccgtcaagaagtgaatccaagaaagagaggtgcatcgtgatgtaaaaataccttcaacagaaaagtagtagaaaaaagaagagataagaggcgcgtggggttatactgtaaagaaatggtttcttctgcgtttagtcacctcgagccatcccccatttgagcttctttggttttacgtcgcctgatgtatgtaaataacttcaataaataaagtgtaggaacagatgctgtcaaagtgatggccctcatgcaatgtgattttatttgtcgctctaaaaaaaaaaaaaaaaaaaaaaaaaaaaaaaaaaaaaaaaaaaaaaaaaaaaaaaaaaaaaaaaaaaaaaaaaaaaaaaaaaaaaaaaaaaaaaaaaaaaaaaaaaaaaaaaaaaagggggggggccgttttaaaggatcaaagtttacttccccgggcttgcaaggtaaaagtttttttttggggcccccaaaataaaattaacgggccggggttttaaaacgtggggacgggaaaaacccgggggttaccaaattaaatggctttggagaaaatcccctttttcccaggtggggtaaaaacaaa

SEQ ID NO: 99934 - DNA, 140 bp, Zea mays
  Clone ID: MRT4577_22653C.1
actcgtccggttggtttcaatttattagagtttctgtgcgtgattatttcttgtgcgaactaaacatatttacgtgctccctgaacaagaaatgcgcctaatccccccgattaaaaggtaattttagcccaggaaaaaga

SEQ ID NO: 99935 - DNA, 737 bp, Zea mays
  Clone ID: MRT4577_22654C.1
ttgggtacctcgaggccggccggggcgtcgccgccccaaccctgagctaccccatcgaccagcctaggtgcgccgccgtccccaagcttagctagctgacccaggtgcgtagtcatccccaagcttagttgtgcgcaatcaaggtgtacgccatcatcgccgccccaaggttgtcaccgcccccaaggtcgtcgtcgccctgcaacatccgcaaagcagcccctattcgttggtggtttcctaggtctgtgccatgccaaggatctgaagttgttttgccgccagcacgctgaagacatggatccacgttttgaggatgaagacaccagtttcccttggaatttctcagtcagccatggtggtagccgtggtgttcacgagctcaacatccaaggtggtggccatggtgttgctcattttgttagccatgttgctcaacattgcaacatcagtggtggtggtcgtggtcgtacttatgacgatgtgcatggcttggaggatgcatctatgagagtttctgatacagtcttgggaggtgcctatagtagccgtggtggtcatggtggtcgacgtgcacgtggtcatcatccagccccccttcaacaatgccatatcgtgcacctcgcacaattggagatcgtggtgctgctgtctagtctgtggacgacgacactgagggtgatgaattcaatgaccaagatgctttggggcatgctgaatggaggaagttaaatatg

SEQ ID NO: 99936 - DNA, 1693 bp, Zea mays
  Clone ID: MRT4577_22655C.1
tgccgcgtcgtcgcctcaacatgtcgcgtcgccgccccaaaccctgagctaccccatcgaccagcctaggtgcgccgccgtccccaagcttagctagctgacccaggtgcgtagtcatccccaagcttagttgtgcgcaatcaaggtgtacgccatcatcgccgccccaaggttgtcaccgcccccaaggtcgtcgtcgccctgcaacatccgcaaagcagcccctattcgttggtggtttcctaggtctgtgccatgccaaggatctgaagttgttttgccgccagcacgctgaagacatggatccacgttttgaggatgaagacaccagtttcccttggaatttctcaggtttgacaaatacagctcgcaatctctttggtgcacatagtacaccctcatccttcaaccaatttactggtggacgttgtcgtgtctcggatcgaattgacgacctcgacctcaactcccaagtgttggacctcaacaccaacgtctccttcattgtcagccatggtggtagccgtggtgttcacgagctcaacatccaaggtggtggccatggtgttgctcattttgttagccatgttgctcaacattgcaacatcagtggtggtggtcgtggtcgtacttatgacgatgtgcatggcttggaggatgcatctatgagagtttctgatacagtcttgggaggtgcctatagtagccgtggtggtcatggtggtcgacgtgcacgtggtcatcatccagccccccttcaacaatgccatatcgtgcacctcgcacaattggagatcgtggtgctgctgtctagtctgtggacgacgacactgagggtgatgaattcaatgaccaagatgctttggggcatgctgaatggaggaagttaaaatatggaccaccagaaaaccttgataagcttgagataatgtttgagcatatagctatgaatggatcaacttcctgcacaccaggacaaaatattgatatagaaggacctgatgttgaaggagtagaagctgcaatagaagacagtcccgttagtgttggcagcatgaaaaggggtctatgcactacaagtgttcgcagtacaaagaaaagaacaaggagccctatagtcagaacaatgaaagaatgtgggagtctatgcatgaaaccaatggtgtagcctagaaggcgatgcaggaagagtacataaaagaatccatcaaacaatgcatgtctttggttaaagaatgtggtgcacctacaggaagtgcagagcacttcaatgctagtaaactatttgttaagactgaacattgagaggtttctctcaccatagaagaaagtgcacaaatgctagcttggttaaagaggtggtgccaggataagaaaatctattagttttgtgtgttcagtttgtcacggtctacagacatgaactagtgtcaagatctacatacttgaactagtgtcagttgcttgttcagtgtgtcactatcaagaataatgaacttctgtcatgtgcatctgttatgtggagtggtactcagttgttatgaaatttttgtgcaattgtgttagttgttatatgcactattatgtaaaaaaagataaagtttgtgtctcagtgtttgcttttgttccttataatctgttttctaatcttttttcttataatatgttttgcagctacataatctattttctt

SEQ ID NO: 99937 - DNA, 229 bp, Zea mays
  Clone ID: MRT4577_22656C.1
cacaatccaacatccacacacttctagtatacacaccccaatatcactggcggagctatttatattttttctcctaccatacatccactaaaccacactacacaacctactacatcacattcaaataacaaagaaaacctacgctactcactaattactactctcacagcttatctaattctcaaattttacattactaacacatagaccaccacaactcttcacattc

SEQ ID NO: 99938 - DNA, 867 bp, Zea mays
  Clone ID: MRT4577_22657C.1
agcagtggtaacaacgcagagtacgcggggatcctttatgtcaaatagacacctaacatagtttactggcttatacttttatcctttacctttatgctcggagagatcgacctctacaagaggattgtggatctcaatcaattgattgttgtgcagccatgttaatagaccgctcccaatcgcatactgttcagaggcagttttctcatcaatagatttacccttatccgccattctttcacccttattctgtttcgggcaatccgtcttcatatcaccaatcaccttaccagcaacaacgccttcaaccgcactagcaataggagtcccagccaaaacagcttcaagtccatgcgatccatcaagcgtactgtactatactatatatactatactatactatttattagtctctgggaatgtgttcataggccaggccaggatctgagattccatgtgtcctacttctctgccttggaggatatgtggtcgatgaatgaataaaaggcaggtgtctcgattggcaatagcatttcgagttgtgtttttttcagacttgaatattgatctggcgcacagagttctagtggtagtcccaaactctgaaatgagaatgcaagcaaggaagctccaatggcaatggtgactacttaggcgccgctatgtgagaagcggtatcaaagaataggagggaatcaaataagcacagccttctcttctcatatatagtttattttatctttgatgagaaagctcttctaattaattcaagactggcttgattttcccagttattactcgagcgcgctgaggcgactctgaactaagctggtagtaggtatgcttccctccagcaccttgaagatc

SEQ ID NO: 99939 - DNA, 424 bp, Zea mays
  Clone ID: MRT4577_22658C.1
aaaaaagggccttttttattttgggggggccccaaaccttaaacaaaaaacttttttttgggactttaccccaaaaaaaatctaaaagggggcccccccaagggggggggggggggaaaacactggtggggttgaaaaaacaaggtggttgaagggcaaaaattggtgcagttgtaaaagggggccagcgttaggcccaacgggctggaaaaacggaaacaactgggggtgggtaaaaaagggaacagggctcaaaccacctagctgggtaaaggggaaaagttgttgctgttgaaaaaaaacaggaaagttcaatgctcccaggtggttaaaaggaaaaaattgggggggggaggcaaaagggaggtggttaaacccacccctcccgggacccgtggggggacccgggggtccacccggaaat

SEQ ID NO: 99940 - DNA, 574 bp, Zea mays
  Clone ID: MRT4577_22659C.1
cataaaacctctacattttgtccattgtttatctatgcattaacaaactaagtatttacaagctttacagaaaacatagcacttgatcaactgtataaggcatcgttaactgataaaaggatcctgatagatccgtctaattgtagcgtgtagcgtcctaacataggatactcttcaccataattgttagctgcatgaaatgacctaagcaccatgccttgacaattaaaggttttgccttacagtgcgccaaccaacaggaacgcataccctccatgaaggggaattgggctggcctcccaaaatcacaggaaaacagactgccactgaacttggatcccatcgcttagaggggaaatccatatcccatcatggcctgttattggctggacgaacctgcctacacatccaaggactctactcctggcatccatgtgcactcactgaagtacagcttggtgatatcttgaacactggcagcacattaatgtaatgatgcagcaaatttactccatatccaacatggtccttctatttacccatatctcaaagtatatgacaaacgcctaaatta

SEQ ID NO: 99941 - DNA, 782 bp, Zea mays
  unsure (1)..(782): unsure at all n locations
  Clone ID: MRT4577_2265C.1
aaaccatcctgcccccactcctatccgcagagtactacatcaccagagaggttgcgagttgcgaccgagccaaagtacgctaccactcttgctgcaccgaccgcgagggtgcaacgtaacgacttacatatatataaataaccgcgccgcagctagctagctagcagagcagcccggccgaagccgtgtagcctagcctcctcatatatagcagcagcagggacgagatcgtcgatcgatcgatggtgtctctgcagccctcatcagcggcgccgctcctgccggaggccgccaccgcgaacaagctcccgccgtggctctccctcgtcggcagcgtcgtcgcctcttccaccagtgccgcggccaccagcaagaagcggaagcgggacggcagcggcggcggcggcggcgacgacgacgaccgtggcgaggtcgtggacgggatcgagctcaatttcgacgccgcgccgctgccccccgagtggcaacgctgcctcgacatcaagtcggggcagatccactactacaacacgaggacgcagaagcggacgtgcaaggaccccagggggcacgacgggcagccggactaccgcgccgaaagaggccaggaggaggaggaggactcccgcgattgcgcgccgcccgcgnggctggacctggagctgaaccctgacgtcgagccgcgccgcgtgctcgccgccacnggaagacgacgaagagggccaacagcagccccgcgagggagagnccgagacgacgacgacagcagcagtagcagtaag

SEQ ID NO: 99942 - DNA, 535 bp, Zea mays
  unsure (1)..(535): unsure at all n locations
  Clone ID: MRT4577_22660C.1
tntttttttnnttttttcttgggtgttttttttttttttttttgttcaggaaacggaggccaatcccgaaccggtccaattcaaaaaaaacaaaacaaaggaaaagaaacaagccctgccctggggacgggtgggaaaagaaaaaaagaaaaggaaagggacctggccaggacccgggggggggggggggaagctcaactcaaggaaaggaaaggaaacggaccggaggggttggattgggttgagacgacaccccaatcccaggccaagcccaccccaggctggggcggggccaagggcaagccaaaccaaaacccaaacccaccccatccgaagggggggggggggagggaccccaaacccgaccttaaaaaaaagaaacaaaacagatgcaaccgggcggcgagacggaaaaatcaaagtagaagtcgaatcaaatcaaatgaaatggacccggccccccgccgggacgacccgaaccaaaccaatccaggccagggaaaggcccgggcaacataaaataacaaaccaaacg

SEQ ID NO: 99943 - DNA, 383 bp, Zea mays
  Clone ID: MRT4577_22661C.1
caaaacacccggggccgggtcttgtggtaaacgggcccgggccggcccgggaaggggcgaaaccaaagaaaccgggggcgggaacaaggggaccccagccagggcccaaaccgggcggaaccaggggcaaaaacgccccccgggggaaaacgaaaccgggcccaaagccacaaaaaaaacgagccgggagcaaaaaggggaaaacccggggagcccaaagggggagccaacccaaaaaaaatggcaaggcccaaacggccgctttccaaagggaaaacccatcggcccacccgcaaaaaagaaacggccaacccccggggagaggggggttggggatggggcggccttccccatcccgggtaaacggctcgcgggggcggggc

SEQ ID NO: 99944 - DNA, 234 bp, Zea mays
  Clone ID: MRT4577_22662C.1
tttagtgaaggagcatttgataggtatgtgtgtaccggagaccatatgaccatgtattgtctatgctattaggtaacgttcatagacaactaaggtagcgattgtcccctgtcccattaaattcactgaggttctattttcaacctaagattttccaatgtattatttaatgcacaggtcacccatgacatagacgatggcaatctccttaggggagcgctaagagctgtatct

SEQ ID NO: 99945 - DNA, 282 bp, Zea mays
  unsure (1)..(282): unsure at all n locations
  Clone ID: MRT4577_22663C.1
acggcagaggtgcctgcggatgtcgccgaggactccacgttgtgtgaggcgtggaagaaggtcaaccccaacatcgagccgccaacgacgcccctcttgctcatccagccgcgaacacacactccgacatacaatcctcacataagctaaccgccaaattcgtactcccgtaaaaaccccccagccgaaacacatataggggggggtgaggaggccacccacaacataataaaaatctttatcaataacaacataaatnaatacacaaacaaacacaaaaca

SEQ ID NO: 99946 - DNA, 113 bp, Zea mays
  unsure (1)..(113): unsure at all n locations
  Clone ID: MRT4577_22664C.1
tacttaggattgaccgccgctgcggaggattcctgccntcacagaaaagaaagctttgctgtcggcaacattgggttccgaaatgagtttatcgtaaaatttacaggacctag

SEQ ID NO: 99947 - DNA, 291 bp, Zea mays
  Clone ID: MRT4577_22665C.1
gtagagaggagaggcgcaaatcattttacgatggccagcggcatcatgaagagggggatcagcgagacccacgagaccctccccttctgcctcaatgccggcataaaagccgacctcctgccgacataccagctccagtccagcatccaatcggaggccaagttctagtcggacatgaagacgtaagggacagaggccatttacagatccgccttcgaacatccgcagagatctcgataccacactcctctcaaggacccaaaaggctcctgctgcttctccataatctct

SEQ ID NO: 99948 - DNA, 1315 bp, Zea mays
  Clone ID: MRT4577_22666C.1
ctttttgttctgtacccctaattgctttttaatttgcaatgctctttaagattttctagtggggtgtgtttaaattgcgatggtttacatttatcaaaaactgtctcattacattgtagggggcaactttgccaaggttaccaactataaatttggtatcctttttttccctgttgccaataccactgttgctactggatgtttgaactctccatgagctattttattggtttcatgtataagcatccttgccaacattgttcagtaaaggaacattgtacttccaaatctgcacaaacttgtaactgtaatggtatgaattctcatgtacttttccatgcagcaccatcatcagtttctttttgcgtggcattgtgtaatctatttgttttttcattagtgacattgttgagttttgccttgtattttgaatccatgtgtgtatttagtctctttgagcatgtagtgtgaatgtgagttaatttataatattctaatttggtttctgattgccattgtattttttcagttcaactccaaggttaccaactacaattttggtttcctttttttccctgttgccaataccactgttgccacaggatgtttttacttttcagtctgggagctattttatttggtttcatggataagcatccttgccagcattgtttacaaaaagaacattctactaccaaagctgcacaaaattactggtttgagttctcgtgtactcttctatgctgcagcataatctgtttcgttttgggaattgggtactatgtttgcttttttcattagtgacatggttgtgagtttttgacttattttgaatttaagtgtgttgctatttagtccctttgagcatgtagttgtgaatgtaaattaatttgaagtattctaatttggtttctgatttctattataatcttttcaggcaactttgccaaggttaccaactataaatttggtatcctttttttccctgttgccaataccactgttgctactggatgtttgaactttccatgagctattttattggtttcatgtataagcatccttgccaacattgttcagtaaaggaacattgtacttccaaatctgcacaaacttgtaactgtaatggtttgaattctcatgtacttttccatgcagcaccatcatcagtttctttttgcgtgacattgtgtagtctatttgttttttcattagtgacattttgaattcaaacgtgttgcaatttagcccctttgagaatgtagtgtgaacgtaaattaattttagtactctaatttagtttctgattaccatt

SEQ ID NO: 99949 - DNA, 1798 bp, Zea mays
  Clone ID: MRT4577_22667C.1
caggcaagctgtaccctgcgttgtcggtggccgcctcccgcccgcgcacatgggtgtcatggggcgtagaccgtggcggcctcagctccggtctccgggattaaagaatccaggtcatggcttcctcgcgccgtgggcgtccatgtcctgctgctgccgccgcgggacctgagaggagaaggacgaggacgaggtggtggttggcggcgtcgcgccgacggcggacatgggttggaggcggggaggaggcgcggatggcgtggccaggagatgggtgctgctgctatgcgtcgggagcttctgcctcggcctgctcttcaccgacaggatgtggagcttgccagaagcagatgaggtagcagtactcccaaatttaagaagagaggaagaggctgagcgcaagactggagactgtaatgtaggcaaagttcaaggaaaacacgattacaatgacatgttacgtgtctcagatgctcaccataattcacagactttggataaggcaatagcgaacttggagacagagctctctgcggcaagaactctacaagattctttcctcaatggatctccagtgcaagaagattacaaggcttcagagtctaccggtaggcgcaagtaccttatggtaataggtatcaacactgcttttagcagtcgcaagagaagggattctatccgcaacacctggatgcctacaggggaaataaggaaaaagctggaggaagaaagagggatcatagttcgttttgtaattggtcacagtgctatttcaggtggaattgtcgatagagcaattcaggcagaggataagaaacatggagacttcatgaggctggatcatgttgaaggataccttgagctgtcagggaaaaccaggacatactttgcaacagctgttgctttatgggatgctaacttctatgtgaaggttgacgacgatgtacatgttaatatagcaacacttggaaatatcttatccaaacatatttcaaagcccagggtatacattggatgcatgaagtctggccctgtcctctctgacaaggatgtgaggtactatgaaccagagcactggaaatttggggaagtgggtaataaatattttcggcatgccaccggtcaactgtacgctatttcaaaagatttggcagcctacatatcgctaaacaagcatgttttgcacaaatatatcaacgaggacgtgtctttgggagcttggttgatagggttagatgttgagcatattgatgaccgcagactatgctgcggcactccaccagattgcgaatggaaagctcaggctggtaacacctgcgctgcctcgttcgattggaaatgcagcggtatctgcaactctgtgcagaacatctggggggttcataagaagtgttcagaagatgaaaaggcgctgctgactgtttctttctaatcaaagtgcagtgctgtgtatctgtacattgtgcaaagaatgtgtccggttcataggtggctaaatggcttacaattagacaacaccactggagcaggccgcaattttactcagcgtccgctggtggcactctgaggatttaaggggtgtagagctgaccgattcttttagcaagttggccagttgggtggtcatacatgtattgacctgataaaacaaacactatccgacgagttcagccaggctgtctgagctaagacaggatgaataacggctggttgagctcatgcaagacatttatttggttgattgtacaaattaatgcagaccggtgtagatgctatttggttgactggacaaccaaaa

SEQ ID NO: 99950 - DNA, 2946 bp, Zea mays
  Clone ID: MRT4577_22668C.1
aaaactctgctcatttcacatcgaacgctccgccaacaatcctgcactgcacgcgctccccatccgcacaacttcccgcctcccatggcggcgccggcgccggcgacgggggccacccgcctccacaccccgttcctcctgcttccttccccgccgcgaccccatcctccactccgcctccgcttcctcctgccgtccccgccgcccctccgcctccgccgccgcttcccgctgctcgctgccgccgccgtctccgccggcggcggcggtggaggggaggaagccgccggcaggaaggccgaaaaggccaggcagctgcagaagcgggtcgtcgtgggcgtcgccatcggggtgagcgcaggcggcatcgtggtcgccggcggctgggtgttcgccgccgccgtcgcagccgctgtccttgccggctctcgggagtacttcgagctcgtccgcagcactgccagcggaggcgggagcccgccgccgcgatacgtgtcccgcgcgtgctccgccatctgcgctctcatgcccatccttacgctgtactatggacgcatggatgttactgtggcattttctgcattcgttattgccatagcattgcttttacaaagaggaaatcctcgttttgctcagctaaccagttcagtttttgggttattttactgtggctatctaccttctttctgggttaagctccggtcaggattagctgcccctgccttaaatacaagtatagcataccgttggccaattcttctgggtggacaagctcactggacagttggacttgtagcaaccttgatggctattagtagcatcattgctgctgatacatctgctttcctttgtggaagggcatttggtcgtacccctttgactaacataagccctaagaaaaccttggagggtgctttagctggcctagctggctgtgtgctgaccactgtgctgctgtcaactgccttacgctggccaagatcactgttgagtgccacagcttatggaatcctgatctttctgggttcattgtttggggatcttgtcgagtctctgatcaagcgtgacgctggtgtcaaggactctggatcactcattcctggtcacggtggaattctcgaccgagttgacagctacgtgttcacaggggcactctgttactcttttgtcagagtagctctaccctcgtatgggggcatgtgggacgagatcggggaagcggaggaggaccggcgggggatgctgcaggcgctggaggaggagtgcctcaacgtgtaccgcgccaagctggagaaggtccgccagcaccgggcgcagctcaagcgggagatcgccgactccgtcgccgaggtcgccgccatctgcgccaccatcggcgagccgccctccaccgtgcacacggcctgctcctcgctccaggtaaacgcaaaccaatgcacgcgcgcacgtatacagtcttccgcggcggttatgatgtcgaccgtgacggcggatcgggaccagggcacagggagcctgaaggaggagctgggcctgatcgcgccggagctggcggagatgaggcggcggagggacgagaggcggcgccagttcgcggacgtcgcccagcgggtcaacaagatccagcaggagatggacctgcagctaggcggcggcggaggccagggccagcctcatgctcatgtcgccgtcgacggctccgacctgacgacgaccaagctcgacgagctcagagcctatctgcggcgcctgcagcaggaaaaggaaagtcgcaccaagaaggtggcggagctcatggctacgctgcactcgtcgtccttggttctcggcatggatcccagagagacgaacagcgtcgtccatggcggcgtgcagacgcaggccagcggtatcagcgacagcgccatctcggggctggctgggggcatcgagaggctgagagagatcaaacggagtcgaatggagaagctgcaagacctgctgggcagcatgctggagctgtggaacctgatggacacgccggcggaggagcagcggcggttccagggagtggcctgcaacatcgccgcgtccgaggacgagatcacggagcccggcgcgctgtccatggccttcatacgcaacgtggaggcggaggtgatgaggctggagaacctcaaggagtgccggatgagagaactcgtcgtgaagaagcacgaggagctcaaggagatccgccgccgcgcgcgtctgcccgaggacgacactaccgtcatggtgttcgacgccatggacagcgatgctgagcgtgctatgatcctggagcggctggaattgcagatctccaaggccaaggacctggagttcagccggaaggacgtgctggagaagatggacaggtggcaggcggcgctggaggaggagtcctggctcgaggagtacagcagaaacgagaacagatacaacaccggcaaagggacgcacctcgtgctcaagcgcgcggagaaagcccgctcccttgtcggcaaaatgccggcaatggcggaagctctggtggcgaaggttgttgcttgggagaaggagagaggcgccaggttcgagtacgacggtgaggtgctgctggacctgctggaggactacggcaacgcgaggaaggagaaggagcaggaacggaagcggcagcgggaccagcggcggctggtgcagggcgcggcggcggcggaccgggacgtgtcgtcgccggtggcccgcccgccgcccaaggccatcaagaacgtcacgaggtctctgtccatagggcgcaacgccgccgccgccgccgccgccggtggcggtggcagccccaggaaggcggcgccggcgtcgtccaggcccggcacgcccagcttcctcaagtcgcccttgtcggcgcgccggggcgggggcgacgagggggcgcagatactgtcgccggactccttcgagtga

SEQ ID NO: 99951 - DNA, 430 bp, Zea mays
  Clone ID: MRT4577_22669C.1
ccggccgcccttttttttttttttttttttttttttttttttttttttttttttttttttttttttttttttttttttttttttttttttttttttaaaacgccgggaaaagccccccaaccctgggcttggtgtaacaggctaacagaaacagggtaaaaaaaccagggggggggggggggtaaaccaaaaacccctgggggggcaaaaaaagccttccgggggccggaaaaacctttttaaggggggccaccgaaaaaaagcgccccccccaccccgaaaagggcggaaacttggccccgaaaaaaaacttaaccccggccggcttgtccacccccctgaaccaaacaaaaaagctccggggggggatgccaaaaagcccgacggggcacccaccaaaaaggggtttcctttgggggccctccctgaa

SEQ ID NO: 99952 - DNA, 645 bp, Zea mays
  Clone ID: MRT4577_2266C.1
cgcccccactcctatccgcagagtactacatcaccagagggaggttgcgagttgcgaccgggggccggccgaccgagccaaagtacgctaccactcttgctgcaccgaccgcgagggtgcaacaacgacttacatatatatataaatataaatatccgcgccgaagctagctagctagcagagcagcccgaccgaagccgagtagcctaggtcaaacatatttagcagccggagtggtcatcttcactccttcccaggcaggaggcctagccctcatcagcggcgccgctcctgccggaggccgccaccgcgaacaagctcccgccgtggctctccctcgtcggcagcgtcgtcgcctcttccaccggtaccgcggccaccagcaagaagcggaagcgggacggcagcagcggcgacgacgacgaccgtggcgaggtcgtggacgggatcgagctcaatttcgacgccgcgccgctgccccctgagtggcaacgctgcctcgacatcaagtcggggcagatccactactacaacacgaggacgacgacagcagcagcagtagcagcagggagatggtggctggcgtgtgcgtgcggtgccacatgctggtgatgatgtgccgcgccagcccggcgtgccccaact

SEQ ID NO: 99953 - DNA, 396 bp, Zea mays
  Clone ID: MRT4577_22670C.1
gtagatttaaaaaggaggcctgcatgggctgttcctagctgtgcatggggggtgacagcaacaaataatcagtatgccgtcctgccgttgttcgctgtaatattattaggatttttcaacaccgccactacagctgccaccgccgatccataggacttctacgtgcggtactggccgccggcgccgacgacgattaacagccatcaccatatcccgttgtgagaatcaagaagccgaactgtgaatgtggcgcaaatgaatctagcattgtggcaacaaccctacaatctcacgatgcgcaacaagtttttcagtgtttgctgcacacaacggcatgtgggtttcttcgaacaccgcgcaggacacccgccaattattgctttgattcgacaccat

SEQ ID NO: 99954 - DNA, 497 bp, Zea mays
  Clone ID: MRT4577_22671C.1
gccggccggtttgggggggataacgggagtagacgactcgtcatcgtcgtcctcgctgtcccctggcggcgttccccactcccgctctaactgcaacccctcggaatcctccccggccatctcttcgatgaatccaccaccgcaaaacgggcacttgatctcctcccccatggcctcctcgatgaccttctcgcatccatggcaccagtaccttgtaataactgcagcttctgtcatcctccaaacccttcctgcttgcacacacacagagggagagagagacaaaaaggtgtcaacaaggcgctacgattaagaaaaaaaagggaaatatgcatcgcttctctatgtgaataaccataggatacaactcagagcaggtgcagcatctacaacaactctatcaacaagagacgaaacaaacatgaagactatatatacagtggcccatctcactgtgactaaacttcactcaataatggcaggcatggatatcttat

SEQ ID NO: 99955 - DNA, 226 bp, Zea mays
  Clone ID: MRT4577_22673C.1
gccggccggttcggacaatcattcgcatcccgagctgtctacatctgcctgcgtcctcggacattctccgttgatgccagccagaccacgagatccggcatgcccctacctcggctcgacgctcctcgcttgaatcccaagcgccggacgccgtcagcgcgccactacctcacccgtcactctgatggatgccgctgcgcgctcaactcgctatcatcgcacatcg

SEQ ID NO: 99956 - DNA, 257 bp, Zea mays
  Clone ID: MRT4577_22674C.1
gttctaaccacgctgcgacgccggcgccatcggggacgccttccaagggcaagtcggcggcagcgcaggccgcggctttgggccacggttcctcctcccaccaccactctgccggtggtggcggtggtggcatgctcccttgaatcttttcacactgtgaaccagatggagacactgatgaactatgacgagagcatatctagatgtgtgtacattgcctgtgacccgtgtcgatctagtctaggcgcgctagctct

SEQ ID NO: 99957 - DNA, 416 bp, Zea mays
  unsure (1)..(416): unsure at all n locations
  Clone ID: MRT4577_22675C.1
ggggcccttaacattggctatttttgaatattaatttgggcccagcccactttaatccaacatgggaattattaaaacgcccccccccccatggggaaaggacacacctggaccttatccaagagttttaaccggagggggggaacattaccggatttttgaaagcggaaaaaaaggggggcacttggggttggggaaggccctgaaagggacaaactttttgccggtaaacctgggggggcctttgggatcaaaaagggcggaagaaacgttttttcccccccccccccccttttggaaaggggcgaggggtttgaaaaagttcctaaagaacggccgggccttggggttttggctcaggggnaaaaaagcgaggttgcagaaatttggaagggttttggccgaattctggcccc

SEQ ID NO: 99958 - DNA, 1251 bp, Zea mays
  Clone ID: MRT4577_22676C.1
atgatgaaggctcgaagacagaagagaaaggccaccagtccaacactccaggaggaggagttggaccaagagattagggacatgaaaatcatccatcaacaagtgcaaaggaagaaggagaagatggctcggctggccgatcttcaaaggaagatcgacgaagctactgaagaagtgcatcatcttgctcaagatgaacaagaccgaaggccccaacacagggagcatcgtcaggaaggcttattcaacgaggatggatggtatgatgattttaatcatgatacctttacttttgatgatgattctcccttggcagcagaattgcaggctatcccatggccagaatcttacaagccaccccagctacccatgtacgatgggcactcatacccaaaacaatttctgatgagctatgaggcaacaatatcctcatacgggggcaatgcaactttcatggctaagtccttcgtcatggcagtccggaataagctcaaggacatgctggtgactagtttccaaggttttcagacgaagccagtcatagctcaagccttgttccagtgcacgcaagaccatgaggaatacctccaggcgtatgtccgaaggttcttgcgactgagggcacaagcgcccacagtgccgaatgaaattgtcattgaggccatgattaagggtcttcggccaggacccacggctcagtacttcgccaggaagcccccacaaactctggagaagctgcttcagaagatggatgaatacatccgggctgacaacgacttccgccaaagaagggaggaagcttacagattctcggaaatgaccaggggcttcggaggaagaattcacccgaggcatgtcaggtcaatccacaattctagtcagaatgacgacaaaggaagccagcttcagaggccacagtacacctcacaatcttcggggcaacaacaaagctttttcaggccgccagctccaaggggcagaggtcccaggggcttcggaggaagatatggggatcagcccaagaagatttattgcttattctgtggtgaggacaagggccatactacaagaatgtgccaaatcaccattctgaagcaaaaggagatcgcagaagccgaagctcgacagaatcagccgaagcaggtcttgcacactgcttcgtgccactctccctacatactagaatatatggggaatcatcatgtagcttctgttgctttggctagccattcacaggcttcctggccatag

SEQ ID NO: 99959 - DNA, 308 bp, Zea mays
  Clone ID: MRT4577_22677C.1
atctcctggaggtcgcctagctggctcctccgccgtcgcctgtgatccccaccatggagggcgacagtgccaacctcagctcgcctatagagtcggtcctgatcgcgcagaatcagatgaggatggccggcgatgtcgccggaacgcggaacgacgacctcgacattgacgagctctgctacaaggacggcgctaagaagacgctataagagcagatcgatctcctctgcaagaggataggtcagctcaagcaagccataactagcatactgggatagagcagccatggactacatcaaatcgacacc

SEQ ID NO: 99960 - DNA, 739 bp, Zea mays
  unsure (1)..(739): unsure at all n locations
  Clone ID: MRT4577_22678C.1
gaggttggccgggctgcgcgccgcgcattccttccctgctggcgccgcgccctgagcttcttctccccgcgcccctctccctagcgtggagcctcctccctgctgcggctcagtctccaggttgcctccttggtgcgcatcgtgctcctctagtgagccccttccccagccgctctctccccagccgcttcatctccctgcgtgtgcagctcgccggacctccctgcccagctcgcgcctcaagctcctacctttgtcgcgcgcgagctcggcgtccatctccttgctcgcccctgctcacgctcggagctctctctgactacttcccatggcgccggccatagctcggaactccctgaccgtcgcgccctgctctctgttctgcgcaccggtcgcttcttccccacggcgcgtcctcgtcttcccctctgctctctctctgatgcccatctcccatggccggcttggggatcctgctcgcgagcgtgctccttccctacaagccccatggccatcggccctgcccctgctttcccaagccgtgtccctccttttctctctggtctctgtgccgcgcgtcctgnccaagctcccagctcagcgcctagcttctctacttcctaacgcgcgcgcccagccgagctcctgctttccccgccgtggagcttcttcctccctgtgccctaccgaaccccctgcgtccgcgcccagttcttctagctccagctcgggtcttccc

SEQ ID NO: 99961 - DNA, 503 bp, Zea mays
  Clone ID: MRT4577_22679C.1
ctcgagtttttttttttttttttttttttttttttttttttttttttttttttttttttttttttttttttttttttttttttttttttttttttgaaaactggggctgggccctccttaaaccaatattttggggcccccaaatatttgtttccccctggaaacggctttttttaaaaaggggggcttgaaaaaaaaagccggggggggaaaacaaaaccccttggttatacccttgggagcaaaaatgaccttggggggggaaaagttgggccttaaagggacccccccaacccctttggggaaaacccaaaaagggggggcccccttggtgtcttcatcgggggcaaaaaaacccccgctaatcccctaggggtttattccggggggggaaccatataaaaaaagggcccataacctggtaccttctcgtgcccccaaagggtcccctccaaaatccatgggcccaatcagcacccccttttagggatgcaaagggcccc

SEQ ID NO: 99962 - DNA, 1847 bp, Zea mays
  Clone ID: MRT4577_2267C.1
aaaaaaaaaaaaaaaaaaaaaaaaaaaaaaaaaaaaaaaaaaaaaaagcaaggcacgagcgtgagaagccaaatcgcgaaccccacccgggccaggggcaaacctcgtgctcccctccacttgccgaggaggctcgcgacccgcgacgccttccgcagccccgacccaaaccctagccccctccaccgtactgccaccgtcatggccgaatcatctgccgctgccgtcaccgcagccgaggtcggggcgccagcttcgttgccaccactggtcgccgaggaggccgatgccgccgcgatggaggaggccgcggcggtcgcgaagaggtggcccgggtggcccggggacagcgtgttccggctggtggtgccagtgctcaaggtcggaagcataatcgggcggaagggcgagctcattaagcgcctcgtcgaggagaccaaggccagggtccgcatcctcgagggacctgtcggcgccaccgagcgtatcgttttggtttctggaaaagaagatccaggcttggagctacctccagccatggatgctctcatgagagtttttaagcgtgtcactgggataacagatggagctgctgagggcactcaggccgctgctactcctgatgtatgtgctgcccgattgttggttcctggagctcaggcaattaatctaattgggaagcaaggtgcaactatcaaagcaatccaggagagcacgagtgcaacaatacgggtaatatcagtagatgaacatgaacgaccattctatgtaactgacgatgaaaggatagttgagatacaaggcgatacagagaaagttctaaaagcactgcaagcagtttcaaatcatcttcggaagtttttggttgatcatagtgtacttccattatttgaaaagactaatactacagtgagccaagatcgcaatggtgatggttggagcgatatgtcacgtccttcaattggttctgcacaagtgaatcaactaccttcagtgttagatgactatattcttcaagtgaagagggatcctctgtaccttgaacgagaatctttggtagatcataacattcatcgctcacgcgtatcactttatgggcgtgatcgaagacattataggctataaaggtgcaaataatgcgtacatacgagctaatagtcacgctgttgttacaattcaggagagtttgggtagtcccgatgatattactgttgaaataaaggcgactattgcgtacatacgagctaatagtggggctgttgttacaattcaggagagtttgggtagtccagatgatattactgttgaaataaaggggacatcttcacaggtacaagctgcacagcagctcatccaggactcgttggctgcacaccgagaacctgtcagaagcagttatgtgggagcaggattagattcactgtataggtccagctactcacaatatggcagctccacctatccttcgtcatcactgccatcttattctagcatcgatgatgttagtaggtacccatcttcaggtcttggtggctatgggtcgagttacaggtactagtactagttcgtccttaggcttgaatgcttgatggcaccttgtatccattcctgggtgattattgtacaagtcagcaagttttctgctctgcgtgcttacgggcaggggatcattttacaagtcagcaagttctctgctttgtatgcttccgggcagggatctggtagattatactgcatcccaattcccagtacccagacttcggggtccaatttgctttgacaatggaatcggaaatcgtgcttgttaattcgatgattgcatctgtttccaggctattcgtgctatt

SEQ ID NO: 99963 - DNA, 160 bp, Zea mays
  Clone ID: MRT4577_22680C.1
tgctgagggtcgtcaaggtattcacggggcaggaaaaacgcctggtgtcacagttttatcaaatccccctgggttcaatgcttcagatgcatgtgaaaccatagacctcagaaattacaccgtacatagcttgtgctgtcctaagatgggtaacttttga

SEQ ID NO: 99964 - DNA, 227 bp, Zea mays
  Clone ID: MRT4577_22681C.1
gcaaaattcactcagcttcaggcttcagctagcaagtactggcgagcaatgtgcgacgcagtgacgggatacaatacaacacgacagctgaaatgaaaataaagtttatagtttggtcaaattgccaaacactttaactaacgaattccttatttgaccgaacctcaaaatacccgcgggtggttctgcgggaaatcctttgtttgactgccaccttctttgaaggc

SEQ ID NO: 99965 - DNA, 1115 bp, Zea mays
  Clone ID: MRT4577_22682C.1
aatctagcaggcagctgtcaaaggagaagaaacagcgtgagattgacgaagggatcaccattgacaagctccacaggctcaatcagaaaaacgtctcggcatggaacatgaagaggctgatgaagattgttcgttttgggacgctcaccacaatggacgagcagattcagcaggcaacaggagagggcgatgagtctgcgacacagattcgcagtgaatatgaggcgcagctggccgccaagaagatcttccataatgtggcgaaacctggatccaaatatatatacttggcagacatgatgcgcttcatgaggcaggaggaagccatcaaagctatgcatctttttgaaggagcacaggagcactgcagggtcagcaagaggtctctgaagaactgggtggttaatgcatttagagagcgcaaagctcttgccctaacacttaacgatacaaaaactgcagttaacaagctcaaccagatgtgcaatgtcgttgttggcctcatagtgtctgctctctggcttcttattttgggcatagcgacgacacatttctttgtcttcatcagttcacagcttcttgtggcagtttttgtgttcgggaataccggacgcgtgggcttcgaggcaattgtcttcttgttcgtgatgcatccctttgatgtcggtgaccgctgcgaaattgaaggtgttcagttggttgttgaggaaatgaatctcatgacaacggtgtttctccgatctgataacatgaagatatattatccgaacagtgtactcgcaacaaaaccaattatgaatttctacagaagtcctgatatgggagaagcaattgacttctccattcatgttgcaactcctgccgagaaactggccctgatgaaggaacggatactgcgctacattgacaacaagaaggaacattggtacccgggcgcgatggttgtactccgggacgtcgatgataccaacaaactgaaagtatcaatatggctgcgacacacactcaacttccaggacatgggcacgcgtttcgtgaggcgagagctagtgctccaggagatgatcaaagtcctgaaggacctcgaggttgagtatcggatgcttccacttgat

SEQ ID NO: 99966 - DNA, 248 bp, Zea mays
  Clone ID: MRT4577_22683C.1
tgacgttgcatggtctacgtgggctttgggttgataaggcttatgaagggaagaggcttcactttaatgctatgtcttttccaaatcttcgacagcttgcaatatcagatgcaccgcagctcaacagcgttgtaatcgaacgaagcgcactgcaaagccttgttcagctgacacttgtagattgtccagaactgaaggccctgcctgatggcattgagcatcttagaacacttgagaaattatatctg

SEQ ID NO: 99967 - DNA, 431 bp, Zea mays
  Clone ID: MRT4577_22684C.1
tttccctccttttttttttttttttttttttttttttttgggtttttttttgttttttttggttttttttcttcccccccccagaaaagtttcacccggggttttttttttaaggcccgccccccaaaaaaaagggggggggttcttaataaaaccccatgaactttcaggggggggttttttaacccttttgatcattcccccgggggccatgggaaatcagggccccccgttttcgggacagattggaaaccgcttttttccaaaaatttgggtggctcagccttttttggggggataagggggggccccccctttgcaagggcagttttaaggtgaccaagggttgctccggaacggatttttttggttgcatccctcccgggtgttccgcccccccagcctatggggggaattttgccccggggaag

SEQ ID NO: 99968 - DNA, 651 bp, Zea mays
  Clone ID: MRT4577_22685C.1
cattgggtacctcgaggccggccggggtagaacgccgccgacagtactcactcctcaccatttcccaaatcctacccatacccccgacggcgacgacggcatgccgcccaagctcgacccgtcgcaggtgagatgaggttttccgccgagagcctcaacggcaacgacttcgagatgtcggccctgccccacgagatcggtccgttcgggatctcccccattaagaaccactcaggacatcgactaggtagacgggcaaggactggaatggtcatgtacgccaccgaaaagtctcaccggacgaaaccgccatggcaaggactccggctgctgctacgacgtcgcgtgcgatatcgaggtgctcagggagcccgacagggaccggaacaacgaccagaacatgctgcacagctcctgcatctctctccacgactgctgccagatcgccaccagcatgcatgaacaggtacatcaccaacgaggtgtccggcagcgacaaggagatcctcacctcctgcggcacagtctcatgctgctccaactgctacgacccgctgcgtacctgaagaaggtagatgtgatgacggcgaggtctatataccgtgcgatttgaagactagacatcaaaggctacttccattggtgctgatg

SEQ ID NO: 99969 - DNA, 947 bp, Zea mays
  Clone ID: MRT4577_22686C.1
gctttcctgggcgattgcaaggatcgaggccggccgggaacgcggggtggcctttcgaccaccattgactacaaagacatacatagcttccttgcgtccgtcgatggggctcacatcgaccaggtggatggcggcgcagccgccgccgccgccggagatggagagacctgctgcttccggggcgctcatctacgccatggtggcgcggggcacggtggcggtggcggagcacacgtcctacacgggcaacttccgggacatcgccgcgcagtgcctgcacaagctgccggcggggaacaaccggttcacctacacctgcgacgcccacaccttcaacttcctcgtcagcgacggatacgcatactgcgtcgttgccaccgagtcggctgggcggcagatccctatggccttcctggagatgataaaggaggaattcaacaggagatattcaggtggcgaagcaggaacggctacagccaacagtctcacccgagatttcgggcccaggcttagagaccagatgcagtactgcacggatcacccagaggaggtgagcaagctgtccagagtgaaggcccaggtggatcaggtgaaaagcatcatgatggaaaacatcgacaaggcctttgatcgcggacagcagatcgacgggcttgtcacaaggacggagcagctccacgacgaggccgttgatttcaggcggcaaggcgtgcagctgcggcgcaggatgtggtaccagaacatgaaggtgaagctcatcgtcctcggcgtcgtcgtcgcgctcatccttatcatagtcctctcaatttgccatggcggatgcagcaagtgattattctttttttttttaaaaaaatgtgctggtgctggtcttttgctcgctctacctataaacatatctaatctagagattatacatttttactagataaaaaaaaaaaaaaaaa

SEQ ID NO: 99970 - DNA, 277 bp, Zea mays
  Clone ID: MRT4577_22687C.1
ttttaaatttgagccctaaagggcgccccttttttttttttttaaggatacgaactcactactacatacagactctagtgaatcacatgcagcataggcatcccataggctctcgaaacaagataagaatacacacttcttccatatagaaataactcaagcgcaagaccagacagtacatcgttcacggcgctagtgcatgaggaagacactgatcgcaattgccactactaggcattgagctttatctctcgcttgatggccgccaccagctggc

SEQ ID NO: 99971 - DNA, 206 bp, Zea mays
  Clone ID: MRT4577_22688C.1
caacgcgtcaggacgcctgcatccatcagacgtccgacgaatcgactactccccttgccccgagcacacgagaaccacggcggccgccggactttacggcggtttcaaagggaagcttggagtctctgattcccccgcgctgcagctcaaccgcatccgtatcacactctcatcatcgaacgtcaagaccttggggatagtttgtg

SEQ ID NO: 99972 - DNA, 393 bp, Zea mays
  Clone ID: MRT4577_22689C.1
atgggcaagagcaagaaaggcggaagctcatcgcaccattccggcgataagcggaagcgtgagccgactcctccctcggaggacttcggcgattccgagtactcggaggaggagttctccttcgagtccgaggggtcgccagtccacgcctctcccacggcatcgtccgatgactcggacgattcccaggggatcgccgccgaggtgtggacatacatccgggccgtcgagcgctccggactcaagggctcggatgagttggaggtctccttggacgaggagaactcctctgactcgtccgagggtaacgacgacgacgggggcgacggcgatggcgacggcggcaagggcgacgacaagggcagcggcagcagcggcaaggccagtggctag

SEQ ID NO: 99973 - DNA, 1303 bp, Zea mays
  Clone ID: MRT4577_2268C.1
aaggagttgcgatgggcgcctcgaggccggccgacccagccaaagtacgctaccactcttgctgcaccgaccgcgagggtgcaacaacgacttacatatatataaatatccgcgccgcagctagctagctagctagcagagcagcccggccgaagccgtgtagcctagcctcctcacatatagcagcagcaggacgagatcgtcgatcgatcgatggtgtctctgcagccctcatcagcggcgccgctcctgccggaggccgccaccgcgaacaagctcccgccgtggctctccctcgtcggcagcgtcgtcgcctcctccaccggtaccgcggccaccagcaagaagcggaagcgggacggcagcggcggcggcggcgacgaggacgaccgtggcgaggtcgtggacgggatcgagctcaatttcgacgccgcgccgctgccccccgagtggcaacgctgcctcgacatcaagtcggggcagatccactactacaacacgaggacgcagaagcggacgtgcaaggaccccagggggcacgacgggcagccggactaccgcgccgaagaaggccaggaggaggaggaggactccgcgaattattgcgcgccgccagggctggacctggagctgaacctcacgttcgagccgcgccgcgtgctcgccgcccacgggaagacgacgaagagggccaagcagcagcccgcggacaacgcagaggaggcggaggacgacgacgacagcgacagcagcagtagcagtagggagatggtggctggcgtgtgcgtgcggtgccacatgctggtgatgatgtgccgcgccagcccggcgtgccccaactgcaagttcctgcacccacccagccgcgccacgccgcctccgccgccgctcaagctcggcctccagctgctctgctgcagggactagctagagaccaaagcgtcccaacgacccatggatgggctggctccccagcaggcatgcgtgcaccagtagaacgcgcgcacgtgtgtcgcacgcatgtgcaaggaagacacagcgtaatattcaatcagaggcaggatggtgtggtagctagctagaggagttgatcagtagtggcggcgcctatgcccgtggccgaccgatcgcctgtgcgtgcgtacgtacgtacggttccccaaggggtatatcgtgtcataatgttattactcatgtggcgatggatggatggtgacggtgtagatatcataaagtgcatgcatagcccaaaaaaaaaaaaaaaaaaaaaaaaaaaaaagtactctgcgttgttaccactgct

SEQ ID NO: 99974 - DNA, 118 bp, Zea mays
  Clone ID: MRT4577_22690C.1
gctcaggccatcaagggtatgcatatacgaaaagccacgagatatctgagcgatgtcactttacagagacagtgtgtaccattccgacgttacaatggtggagttggcaggtgtgcgc

SEQ ID NO: 99975 - DNA, 636 bp, Zea mays
  Clone ID: MRT4577_22691C.1
atgtcttcttcctcccttatgcgtcgtgtctttccatcttccaagcccccggatggggggtacccgccgtctttccgcctcatcgttggaggaacgcaactccgtgggagttggtacctttcagccatcgttcggcttcaaggattttcatcacacagcccggttgctcccctccgctggtggtcacccaagacggtgaccgccagttcctgggtggggagaagcaagccgggctgcgatcttggtcccaccctcagcttcaaggatgttcatcatcctcgctggggtgggggccgggctgagccggcgctctacctcccacgcgggttcgtgggtcaccctttcccgcggcgttcgagggagagggcgctcactggccctgcgggcggcccggacttcgacaacgcggggccggtcgacggcgggcgtcgtcacctccagcgtgtcgggctcgtcggcttggctcccggcggcccctcctgccggggggcggctgccgcgccgtgtgcacgggaggaccacccaagatgccgcgcgctgctagggcggcgttcgtgttctggggtggtcctgcctttgcaccgggatggcgccctcacgtggaggtcggtgccccactcgcccaggaggatttga

SEQ ID NO: 99976 - DNA, 129 bp, Zea mays
  Clone ID: MRT4577_22692C.1
aaaagaattgttgaggccatggcttccttatgataggccttattgaagaagcatggtctacaacttttttgtaaatgttcttccggacgcgtggtcgaccggattcaggaccgtcctgcagtcgtacag

SEQ ID NO: 99977 - DNA, 275 bp, Zea mays
  Clone ID: MRT4577_22693C.1
aaccatcatcctctttgctctgctcctggaacgtatcgagagctccccgccggcgaccatggcggagcccgcaggagcaggagcaggagcagaagcgacgcctctcctcccaggcctcccggacgacatctccgtctgggagatcctcgtccgcctgccgcccaaatgcgtcctccgctgccgcgccgtctgccccgcgtggtgccgcgccacctccgtccgcggcttcctcctccccctccccgctttttcgggtttcccctctcccccctctc

SEQ ID NO: 99978 - DNA, 867 bp, Zea mays
  Clone ID: MRT4577_22694C.1
atgtcttctcgctcccttatgcgccacgtctttccaccttccaagcccccggatggggggaacccgccgtcttttcgcctcatcattggaggaacgcaactccgtgggagttggtaccttttagccatcgttcggcttcaaggattttcatcagccaacccggctgcacccccccgccggcggtcacccaagatgatgaccaccagttcctgggtggggagaagcaagccgggctgcgatcttggtcccaccctcagcttcaaggatcttcatcatcctcgctggggtgggggccgggctgagccggcgctctacctcccgcgcgggttcgtgggtcaccctctcccgcggcgttcgagggagagggcgctcactggccctgcgggcggcccggacttcgacaacgtggggttggtcgacggcgggcgtcgtcacctccagcgtgtcggagtcgtcggcttggctcccggcggcccctcctgccggagtgcggctgccgcgccgtgtgctcgggaggaccacccacgatgccgcacgctgctagggcggcgttcgtgttctggggtggtcctgcctttgcaccgggatggcgccctcacgcggagggatgtttgtgcgggcgagagttgcttctcgcggaaggtgatgagcgaggtatccgtatcctggaggcgtgggagtccctcggctcggtcggccttgccgcttacgcgtaccttcacccgtccatggggccctatcaccgactcagtcgagaaggctcgaaggatcgcttcggcagaagggcttccgaatgtaaagacttgttcgatccgcggagtcactttatccgaacgcgagttacttagcgcagaaggtgatgagtga

SEQ ID NO: 99979 - DNA, 375 bp, Zea mays
  unsure (1)..(375): unsure at all n locations
  Clone ID: MRT4577_22695C.1
ccgggcttgttgtgggggggttttaaaaatttttttttttttttttttttttttttttttttttttttttttttttttngggccggacccgcaagatttcccgttccctcaaaatccgttttggccaacctcttttccaccggggcccaccccccgtggtggggggggggggagatttaaaaaaaaggttctttttttcttttggggcccccccccccaaatctcctgagttgcttttgggccccccccccccttccttttttgcgccccctcaaacctttgtccaaaaggccgcccccggctcgtttttctccccctgaaaacctccccaagcctgttctttctttggggggctccttttgtgcccctaacttt

SEQ ID NO: 99980 - DNA, 380 bp, Zea mays
  Clone ID: MRT4577_22696C.1
ctagcgcgagtttcccttcacaagggcccgctccaatacaatgcgggccctaaccaccgaacccgggcggcacaccaacaggggcgcccccagggaaaaagcggtcccctctcaaaaacacacaccacatcacaagcgcacacaaaaagcaaaccccaagccgaacaaaaaaagcgcgggaacccaaaaaaaggggggagctcacacaaaccgggtcacacccaaaaaccgaatcgcccccggcaaaccagaaaagcccaccacacaaagaaaggggccaaccgccgaggaaaggctctccccaactcgggcacactcactctcccctcgcgaccgacccgccggggagggcggtccgctttcgcaaaggggggaaaacc

SEQ ID NO: 99981 - DNA, 634 bp, Zea mays
  unsure (1)..(634): unsure at all n locations
  Clone ID: MRT4577_22697C.1
ctctcccagatttacaacttcagatataaataactgattaaaattcatatggctcccagagtatttaccaaatcaaatcttatctaaatattgaatctgaaatttttttggttgcctcttttaaaccctaaaatcaaaacgtgttggtaaaaaaagagagaaaagcaaaagtatctcacatgcgatttctaagaatgttcatctcccttggccttatcctctccatcaagtgtcgtatgactcctttgaacaatgctcctgccatctctttcctttatcctcacggattctctcctcatgtctagaagacatggcaccctatgatatttttcagccaccgcttaacttttcttcgtaactcttctgctgtgttgattttttggtctacgttcgttcctatcctttgtacaccgcccctgctctctctagtcatcgcacgtcggtgcttggtagtgggcacaactcgttgcttttcgccgttggccatggccacttgctcaagccgtcggacacgggaccacgctcagctcccaagccttctccctccactccgacgaaatccatggagccccagcacgcgagcaccccttccatccctgttccagttctcgtccatgacctncctgcgtgcttg

SEQ ID NO: 99982 - DNA, 319 bp, Zea mays
  Clone ID: MRT4577_22698C.1
taagttggacggcttccccttccccgcctaacaattcctcccccggttaagggttcctaaggttttgttgaagggccaatgccgatggcgatgttgaataacgttgcctccgccggggggcttcctggggcaacaacaaccaattcccgggaaaatgcctccgcgccatacggcgagatcctcgactccaatgtcatcaacgaccgtgatacagtgacgtctcgcagcttcagcatcgttaccttcgcctctcacaactccatgctcgacgctatctagaacatgaacagcacggagctcgacggccgtaacatcaccg

SEQ ID NO: 99983 - DNA, 1695 bp, Zea mays
  unsure (1)..(1695): unsure at all n locations
  Clone ID: MRT4577_2269C.1
aattcggcacgaggtcgcgacgcctccgcagccccagccccacgccccgcgacccaaaccctagccccctccaccgtaccgccaccgtcatggccgaaccatccgccgccgccgtcaccgcagctgaggtcggggaggagtccgatgccgccgcgatggaggaggtcgcggcggccgcgaagaggtggcccgggtggcccggggacagcgtgttccggctggtggtgccagtgctcaaggtcggaagcataatcgggcggaagggcgagctcatcaagcgccttgtcgaggggaccaaggccagagtccgcatcctcgagggccccgtcggcgccaccgagcgtatcgttttggtttctggaaaagaagatccaggcttggagctatctccagccatggatgctctcatgagagtttttaagcgtgtcattgggataacagatggagctgcggagggcactcaggctgctgctactcctggtgtatgtgctgcccgattgttggttcctggagctcaggcaattaacctaattgggaagcaaggtgccactatcaaagcaatccaggagagcacgggtgctacaatacgggtaatatcagtagatgaacatgagagaccattttatgtaactgacgatgaaaggatagttgagatacagggcgatacagagaaagttctaaaagcactgcaagctgtttctaaccatcttcggaagtttttggttgaccatagtgtacttccattatttgaaaaaactaatactgcagtgagccaagatcacaatgttggttggagtgatatgtcacatccttcaattggttctgcacaagtgaatcaaccaccttcagtggtagatgactatattcttcaagtgaagagggatcctttgtatcttgaacgagaacctttggtagatcataacattcatcgctcaggcgtatcactttatgggcgtgatccagccttgtcaacactacgaccctctgcagtacatggtgctggctcactacttacacagataacccaaaccatgcaaatcccacttacctatgctgaagacattataggagttaaaggagcaaatattgcgtacatacgagctaatagtggggctgttgttacaattcaggagagtttgggtagtcctgatgatattactgttgaaataaaggggacatcttcacaggtgcaagctgcacagcagctcatccaggactcgttggctgcacaccgagaacctgtcaggagcagttatgtgggggcaggattagattcagtatataggtccagctactcacaatatggcagctcaatctatccctcgtcatcactgccgtcttattctagcatcgatgatgttagtagatacccgtcttcaggccttggtggctatggttcgagttaccggtactaatagcagtttgtcctcgggcttgaatgcttgatggcaccttgtatccattcctgggtgattattgtacaagtcagcaagttttctgctctgcgtgcttacgggcaggggatcattttacaagtcagcaagttctctgctttgtatgcttccgggcagggatctggtagattatactgcatcccaattcccagtacccnagacttcggggtccaatttgctttgacaaacaatggaatcggaaatcgtgcttgttaattcgatgattgcatctgtttccaag

SEQ ID NO: 99984 - DNA, 466 bp, Zea mays
  Clone ID: MRT4577_226C.1
ctacggaataaatataataacattgttatgattgaaaaaaaaaaaaaaaaaaaaaaaaaaaaaaggggggaaaataaaaaaaaagggggatacaatttaaaaaataaaaaaaaagggcccgcctcctttcggaggtcccacgcttttttcacggtccccgctaattgcccctctcttttttggcgtttcccaattttatttccctggctaccttttttcacctccccttctttgccaaccctgtcgtcccccattttaatggctcttcaatacattcctttttcgccccgttccccctttcgaaaatgcccccccctatttgcctcttgaacccttgccctctctcatatgtttaatcgcccccgccttgttagttcccttcacccctgccggtactcttgccaccccccatgggcccctttcctctggtcagttccctaccttcctccccttttcatccgtcttt

SEQ ID NO: 99985 - DNA, 1605 bp, Zea mays
  Clone ID: MRT4577_22700C.1
cccacgcgtccgcggacgcgtcgggttcgcggagatccaggcggccacccagaacttcgacgagaaggccatcatcggcgtgggcgggttcggcaacgtgtaccgcgtccgggagatcgacgacggcaccaaggtggcggtgaagcgcgggagcgcggagtcggagcagggcatcaacgagttcaacacggagatccagatgctgtcgaagctgcggcaccggcacctggtgtccctgatcggctactgcgacgagaaccaggagatgatcctggtgtacgagtacatgcacaacggcgtgttccgggaccacatctacggcagcgaggggaaggcgccgctgccgtggaagcagcggctggagatctgcatcggcgctgcccgggggctgcactacctgcacacgggcacggcgcaggggatcatccaccgcgacgtgaagaccaccaacatcctgctggacgacaacttcgtggccaaggtgtcggacttcgggctgtccaaggacgggcccgggatgaaccagctgcacgtgagcaccgccgtgaagggcagcttcgggtacctggacccggagtacttccggtgccagcagctgacggacaagtccgacgtgtactccttcggcgtggtgctgctggaggcgctgtgcgcgcggccccccatcgacccgcagctgccccgggagcaggtcagcctggcggagtggggcatgcagtggaagcgcaagggcctcatcgagaagatcatggaccccaagctcgccggcaccgtcaacccggagtcgctcgccaagttcgccgagaccgccgagaagtgcctcgccgagttcggcagcgaccgcatctccatgggcgacgtgctgtggaacctcgagtacgcgctgcagctgcaggacgccaacccgcccgagggcgcgcggcagggcggcgacggggacgaccaggacggcgccgcggcggcgggcggcggcggcgctgtcgtacccgcgggcggtgccgtgcccgacgcgtccaccgccgccgccggggagctcttccagcagctcgccgacatgcaggggaggtgaggtcgatcgccggtcgtacgtcaaaactctacacacactgcacactgtacgtggcatggcaatctgactgagctcgtctcgtgcacgtcgacacatcgatagatgcatgtgtactgcacccggtgaaaatttgaaacgatgaatattcactagaacacaaactgaacagagtggtgagtcctacgtacgtacgtgtaacaactagcaccggtcgatcgatacaatattcttcaacctgacacgtggggtctgcactaccggcgacggacgagggtgagctcgtcatattctcaaatttccaatatttaatatacgtgtgtgcgataatgtatttatttgtaatttcgcgattgtgtaatacttgggggatttgctatgtttcggtcgcctctaaaatacactatatttttagacaacgatctttatcgttaattagttcatgagcatgtaaagctaagattcattttaacgcaggaaaaaaaaacaagaacgaatggatacattgtctcttaaaaaaaaaaaaaaagggccgccgc

SEQ ID NO: 99986 - DNA, 691 bp, Zea mays
  Clone ID: MRT4577_22701C.1
ccggccggggcctgaataactagagagacaatggcgcgcaacctgtctgtcacattgttcattctgacggcctatgtcgccgcgacggcggcaccgaccgtctgtgcggtcaaatctccggcgagcacaacgaccacaaggaaacacgaagcagccaaagaagagacggatgcgcctgccaaggcaccagctgctgcagccaccgaggggcctgctgcgggagcgcccatgacatggccggatggcgggcctgagttcgtcaagatggtcatcaagaaccccttctttaaaagcgcacctccatctggtagcgaagacggcctacccattgaccccactccagaaggcagcatgaactaaattaaataccaattacgagaccgaccagatatgcatggagcatgcaagaatgttgtcgaacgaatatatgctatgaatggttacatgtactggctacatttagttcagcttaatttctctagtacgctgaaagtattcgatcgatcgagtaggattaggattgacgacatgattatttgtgcaccgtttcagacagcaaattaactatatatatgtttttcttgttgttaaaaaaaaaaaaaaaaaatttgcggccgaatattgtcgttgtgatccttgtcagtcacgatccatgattcacacgaagagtgggcctatctgtagaatcact

SEQ ID NO: 99987 - DNA, 141 bp, Zea mays
  Clone ID: MRT4577_22702C.1
gccgccaacatcttcagcaatgctgaggtcgccgccgacgagccgtggtatagtattaagcacgagtacaccctcctctagacggacaccaactggtgccttgggtggcacatcggtggctacgccggacctcagggtcct

SEQ ID NO: 99988 - DNA, 495 bp, Zea mays
  Clone ID: MRT4577_22703C.1
ccggccggggccgagctcagttgcgagggcttgtaacccaggtgggggcattaaggtggtgcggatgtttggtaccgagtcttggtctgggcctatgctgttccttggttggcctgcccgttccaagttggtagtggccgttggaggtctgggcgaaggccctgggcttccttggacctagagtggcaggaacggcgtgagtagggatggcaatggatcgggttcggatcgggtatggtaaatatccgcccgcgacaatacccgcgggcattactcatacccgcccgcgactacccgcgggtaggattttgtacccgtgcccgtacccatcgggtatcgggcgggtatcggatacccgcgggtataattacacttcacacaaaaaaacacacttgaagccacacttgaaccaaacttcaaagtattcaattcaacaaaacagtaagttttaaaaaaaaaaaacaatacaaaaaaaaaaaaaaaaaaggggcggcc

SEQ ID NO: 99989 - DNA, 553 bp, Zea mays
  Clone ID: MRT4577_22704C.1
ttgggtacctcgaggccggccgggatggtttatgtgatgtggatcaaaaatataaaaaatccaacgagaagagcggcgccgcgatatggacaaggacgaggtggaggaggatctgtgccaagccacaatgggtatctcacgcgactcgatgcacaagcgccgtgccaccggtggaaagcataaggactggaggaagaagcgaaagtatgatcttggtcgccagccgggctacaccaagttgtcgagcaataatacagtgaggagggtccgtgttcgtggaggtaacgtgaagcggatggctcttcgccttgatactggtaactactcatggtgaagtgaatgtgttacccgctaggaccctgtattctctacgtggactacaatgtgtcaaacaatgaggattgtgacgacacaagacccttgtgaaaactgacattgtgcatcctgatgctgtcccagttcaacgagggatacctcactcatctatggagttgacattattcatgaataagaagacccctgctgcaaataatgataatggtgaggtacatca

SEQ ID NO: 99990 - DNA, 503 bp, Zea mays
  Clone ID: MRT4577_22705C.1
ccccgcgtccgctttcctcttgtacggtcgtggacaagacctcggctagcctcctcatgctccctctaccctagctgtcgccataacgtctggtattacagatactaggttctgatgaactgccactggatcccattgccaagacattggccgacttcgtcgaacaggtggcatctctctagaagcgtcaagaggccatcgaatcctgacaaccagcgatcaacactaccaccataaccagtgcccaacagatccaagccaagggtgagcagatcgagcagccggacatcgcgatggagccgatgaggaagatgcttacccgccaggtgttagcagcggtgcggctgcaggctgctgcacgtggcctcctaatatgtcggcggatgcgggagatgcgtgatttgcaactgattcagtctgcacctctttgtagcccgtttgtgttttcttgtgagaaaccttctatgtagtttaaattgaaccagtttcagagctgctttggt

SEQ ID NO: 99991 - DNA, 629 bp, Zea mays
  Clone ID: MRT4577_22706C.1
ccggccgggacctgtctcttctcaccacgcgcttctctctctcaccagcaggccgcgccgccgctgcaccaccactctccggatcatcggctatccccctcctcctcctcctcgcccgctcaccggccatccctgctgcggtgtcgcgcgttcatgcaggaggccgccgacggcaacgacgacccgactgaggccgacgtgcggaagcgcaggaagggcccgttgtacaagctcaaggcggcgatccagggcctcgcgggatctcgctccgccgccgcggaggtgtacgggggagagtaccagttccagcgcgccgtcgagaatttgtgcgagccaaggttccccaatccactcacgcgcgcgcatcgctgtggtttcctgtgttgcttccaccctcgcgcgctcttcttcttcatggagccatggcaggaagcggcaacaggagatttggccgggatatggtgtctagcagcacacatttctcccaatggcagatggtctgggttggagaccacgttcctggcggcagagtcgatctgcaatgtggaggtccaatctggccaccgatgtcagctcgctccggagctacttccgattccctagcagtgacgacgttcagatgcagcttc

SEQ ID NO: 99992 - DNA, 434 bp, Zea mays
  Clone ID: MRT4577_22707C.1
gctggctcacgcgtccggtgagcctagggcgtggggacatgttgactaggtcttcggttagcacggagggaccacggtcctacttacaaggtaactgctgtctgatgcagagtataacaagcatagccatcggggggtacatcaatattgaagtctgaatgggagaatactgctggacaagagtggtgtgctgactcgacccgctttactacgggaagaactgttcgatgcagtagatgactatgatatagcactgacctaaattatcagccctctacatatttagtggaaggagacttgcactcattggaagtactggtcatgtattggctctaggcagactataagtgctgctccacatgataatcgaagtgtatcctcgcaggatgcgcacgactacgcaaagaagaacattatgtttttcagtgagacgt

SEQ ID NO: 99993 - DNA, 419 bp, Zea mays
  unsure (1)..(419): unsure at all n locations
  Clone ID: MRT4577_22708C.1
ctggggagtcgctaccgtggcgcgtcggcgcgcgngnaacacaataaagagcgcaactgagtctttatcagccgctcgcgctcttgcgttgctcttgatggcgcgctcttctctgagaaggaagacagcgtgcttctctgcagccggagtaaataaggcgctccccacctcctctgggagtatcaacacttcaataacgatggggggggcctgtgggaacggcaacctgtactacacgagggacaacacaaacaccatggagctgatcacggcagtcttcaacgacggcgcctcgtgggcgcagtgctaccgcagcgcctgcgactacgaggaggagcctggtttctgcatccttgggacggcgatgaccatcacacacaccaaccagtaggcgctcaactacgcactggccaacgacg

SEQ ID NO: 99994 - DNA, 109 bp, Zea mays
  Clone ID: MRT4577_22709C.1
accgctcaactaccttttggactgcacgcccttctgtaaccagctcacggcttcccccatccgtgactacacctgcccggtcattaggataatcgcagaacccatgcct

SEQ ID NO: 99995 - DNA, 389 bp, Zea mays
  Clone ID: MRT4577_2270C.1
aattcccaaggtaggccttgcataaaataaaggtgggggccattattgattttttaatacccagttcagggcctttgaaagggatcacccttgggaaagggcacaaaattgtttttttccaaaaaaaaaaagaccccggttttttgaaaattgcccgccctgtatggtttttctttttgacaaaggggttggttacaaacttttttggggcctaaacaaaaaaagtaaatgaacaggggggttatcccaacttgctttaagaccttgagtaagcatttttcatcaggggggatctggggttttttgtttaaaccgcgacacgttcccggtcaaacaaggggaggcccccagcccccccttttaaattggggggcccaagcttcataacc

SEQ ID NO: 99996 - DNA, 316 bp, Zea mays
  Clone ID: MRT4577_22710C.1
cgggtccccccctggagagggtcgccttttttttttattttttttttggttgaacaccaaaataatcgtccctgaaagaagctaagagctcattttactaaacaacaaattttgagttgcatcatttatctcttctttaagcgtacgtacgtacagctagcccgagacgtgcataaaacgggggcaggctttttggggaggatcatgtggcttgtggggaagcccaactccttccggaacgtgccgcggccaaagtcgaggttgtacgagttggggagcccttggacgaggtaaaactcgggggtccacccgaatt

SEQ ID NO: 99997 - DNA, 647 bp, Zea mays
  Clone ID: MRT4577_22711C.1
tcggcgaggcttccttataatctgggattagccagatttctacaactggaatatagttgacgtgaggtactgtgacggaggatcatttgccggggacggggagggcgaagatcggaacggaaccaagcttttctacagaggattgcgcatctgggaagcagtcgtcgacgagctcatggcaaaagggatggacactgcagaacaggccttgctggtaggttgctctgctggtggtctcgctgcactgctgcactgcgacagttttcgtgcgcgctaccctccggagatcccagtaaaatacctttcggatgccgggttctttcttgatgtgtatggccctaggcatcctttggctggatgctatgtgtttcttaattaaaaagacctttaggaagtagtatttacctgaattaagtaccaggtctctttttgccacagaaaagatttttcaggcgaaaggttcatacggtccatcttcagtggagttgttcaccttcaggcttgaataaattaatgtgcgaaaagttttgcccaaggactgccttgcaaagagggaaccggcagagtgcttggtttccaccagagcttatcaagagcatcagcacccccacattcattcggaaactcggctacgattcgtatcaggt

SEQ ID NO: 99998 - DNA, 510 bp, Zea mays
  Clone ID: MRT4577_22712C.1
gtactatgtactatttctcctcttcttaatataattaaaggcgcagttcccctgcgctttcgagaaaaaaaaaaaaaaaaaaaaaaaaaaaaaaaaaaaaaaaaaaaaaaaaaaaaaaaaaaaaaaaaaaaaaaagaggaaaaaaaaaaaaaaaaaaaaaaaacagagcggaataatgacaggggggggaggggcgggatccatatacaagcgaacaatgatgaggggaagaccaactccaaaacgacgggacgggggaaaccggattgtattcgagcaaaggcgtacatatcggatcgccctcaggctattcggcaagcgcatcaaagccggctgctccctactcaaagaaaggcctggatgctaagaattattgacctgtgactctgcccctctactgagtggtaagtctcgggggctttggcaacattctcttggggcttactaccttaatgaaaacagatttgtcgcatttaaaaaaggttattgtttagctctttccccaccttc

SEQ ID NO: 99999 - DNA, 788 bp, Zea mays
  unsure (1)..(788): unsure at all n locations
  Clone ID: MRT4577_22713C.1
aaatagcgaagctgaaaggaagtgaagaactatgggaagtagcgaagttgcacaactgcgaatcttcgtacccatcagatctctttgacgtcaaatttcctttgtgctcggtggatctaagggaatggtgtgcagccaacacacgcaggccagatttactcgagatgatacctgactcctttttcaatcttgtggagaagtgtttggccgtcaaccccaggtgcaggctctcatcagaggacgcgctcatgcacgagttctttgctccatgccgcgataacttcaggaagctcaggatgctgaggaggtcagctggttctgatgcagcatgttcatcgtctcaccaggacacaacacttggagcaagacagtcataggtcgttccatcgtacatacttattgacaccagaaagctgattgtgatcatctagtttattacagacatgacaatagccaaatcgtgttcctgtcttgatgtaagtaaacccttgtactaaatacgtactaaaccgtggggcggaaccaagatatattatttttgtcatgcaacgggagggacgaagagtccccacctgatatattattattacgtaggacagtatcaaagaggtnaaaaaaaaaaaaaaaaaaaaaaaaaaaaaaaaaaaaaaaaaaaaaaaaaaaaaaaaaaaaaaaaaaaagggnngnagatataaaaaaaaccaaaattaaaaaaggggggcgcccttctaaataacccattttatagtccccgctaattcaaattcattgttttttttttgggaacc

SEQ ID NO: 100000 - DNA, 700 bp, Zea mays
  Clone ID: MRT4577_22714C.1
ctagttctagatcgcgacggccgccctttttttttttttttgagtaacgtccggggaaaaataatataccgtaaataatactgctgttacatttgattacacggagcatcggaggtcactatttttctaagcgagctaaatgctctacaactacaagggcagcgagctataacactcgatggaggaccaatgccgcatcagatacccccctcaccaggcaaaggtgcccgcttcagatacctccctcaccaggccaagaccatggtgttctttctgacgacgacgaatatgaacgagcatgccatgctatatcatctgtcctagcgcttggtgcagctgtaccttacgtccattggtccttgcgttcacgagtttggacttcaagctgcgcttttgggtgccctggggccattcgacgcgccctttcatagcgcggaccacatgagggttcagcaggtccggactccattccccaacacccggtgagacttggcacgcctcaccgttcttgagatcaggggaaagagcggcatcgggcatcctgctgcttgagagcctaccgttcagtaactcggaccctgttttcctcccgccgtcgccgtttgatgatctccacagtcgggcaaaagacgacgccttcttcgggtgcctctctccagccgtcgaacagataccggtgatgccgctacttgatctgcac

SEQ ID NO: 100001 - DNA, 1359 bp, Zea mays
  Clone ID: MRT4577_22715C.1
ctcgaggccggccaggattctgctctccgcctcccgcagccctacgcgcccgcaggtctgagcccgctacgcctgtaccctagtccctacgaagtcctcttcgacccctatcccctccccagcggcgagaaagaacgggcgcgctcgtgttaggcatcgtcctctcgccccctacgaatcctctgtgcctgtggatcggcgcggcgaggggatccgtccgggggttaggatcggtttcttctcaatccatctcctgttgttgaactttgagttaaagacaatggacctggagacagagaatcgtcttgcttctttgctaattgaagaggcgcggagattgcagttagaggctgacagggaaggtgttcatgcatatcttcgaaaacctaatgttaggcatcgtccaaattcaaggtttctcacagccacagttcgtggagttcagcaagcaaaccgtgttgtggaggttaatgaaatgtggcgtgccagggaaaaggaactggagttggagtcaaaaatgaaaagcagaagtagcagaagtaaagatcatggtgattttagaggagagaagcgcaaaagtgatagaaatcatagctccagctcaaggtttgaacaagaagggaccacttatgatacttcgtactcagaccaggaggatggtctcagtgatgatgagattgaaagatttctttattcaagggcgaagcgaggacgtggggctgttggttccaggatggacgagcctggtccataccttgattctctgtcccatcatcaggacaatggacctagcccggacatacgtgtggaagaaaaatgggaacgcagagtacaaggcccagagaagcctccattttggggatgcaagtctcctgatggtcattggcacttgggcacattggatggaagggcatcaagctctgaacctcagagcaaaaagaaaagaaaagtaagttggataaaaaagataagataaatgagaaaaggaaggaaaaggacaggaagaaatacaaacatcgccatcaccgcaatcacaaaagccgaagacgggagtgaattgggtgatggtagctggtagttagtggtggtaatggatcatgatccaaatgtttttcacactaagttagggtccttaattaattttagttctaaagtgaatagaaatagagctcgatcctaatccgattcgattctttaattttatagtgtaaaatttagagtttattaccacctttactgataataggacagaaaaatgtagctagcatattatgctctgtaacttgaaacatgcattgtatggaaatctcgatattgtgtagcaatggagtatggttcttacgatacattgttgttgtg

SEQ ID NO: 100002 - DNA, 1563 bp, Zea mays
  Clone ID: MRT4577_22716C.1
gggtacctcgaggccggccgggagcatcagtgacagtgatgccacacggcaattttagccgcaacgctccagctgtaccgcgaaacaaaatttctttacttttcttcgaccgtcctaccctctccgctcccctcgccggcgccgccgcggcggcgagaaagagagaacgcgctcctcttccttctcgactcgatctgccccttccagcccgctcgcccctcatcgagcggcctccgtagccctaggtgatccgcgcctcctttcgccgcagcggaacaggacgcctgaccgtcgaccgtcgaagcgattcctctctcgcgggcgtcctcgtctcgccctcctcgcctcctcggtgccagtgggtcggcgcggggaggcatccgtccgggctacggtcgatttgttctccacttgctgttgaactttaaatagacaatggatctggagacagaaaatcgtcttgcttctttactacttgaagaggcccgaagattacaattagaggctaacagggaaggtgttcaagcatatctgcgaaaacctaatgttaggcatcgtccaaactctcggttcctcacagccacagttcgtggagttcagcaagcaaatcgtgttgtggaggtcaatgaaatgtggcgtgccagggaaaaggaactggagttggagtcaaaaatgaaaggcagaagtagcagaagtaaagatcatggtgattttagaggtgagaagcgcaaaagtgaaagaaaccatagctccagctcaaggattgaacaagaagggaccacttatgatacttcgtactcagaccaggaggatggtctcagggatgatgaaattgaaagatttctttattcaagggcgaagcgaggacgtggggctgttggttccaggatggacgagcctggtccataccttgattctctgtcccatcatcaggacaatggacctagcccggacatacgtgtggaagaaaaatgggaacgcagagtacaaggcccagagaagcctccattttggggatgcaagtctctcgatggtcattggcgcttgggcacattggatggaaggccatcaagctctgaaccacagagcaaaaaagaaaagaaaagtaagctggataaaaaggataagatagagaaaaggaaggaaaagggcaagaagaaatccaaacatcgccaccaccgccatcgcagaagcagcaggagtgagtgagtgatgttgcctgttagcagaacagaaaaaaatggacacaacggttctgccatggccatgagacaagctagctgactgttcctgtgtcttgaaacctgtattgtatggaaacgggatattgtgtaggcttatacaatacaatgttgcgatgtcacatcgtttgttgaagttttatcactttgattaacatctgcaacaggaggttttttcttctctttttcctatactatattgggcgtcgaatattggagtccgaggagcctgttcttcaagcagggcagcctgtcagttggggtttgtagctgaataaaactgtgtatggatgcgtaggccatcaatagctcttagtcaaaa

SEQ ID NO: 100003 - DNA, 360 bp, Zea mays
  Clone ID: MRT4577_22717C.1
ggccgcttttttttttttttttttctttttttttttttttttatatttaaaaaggtttccagggttcattacttataaaaagggctgtagcttgtttctttgttaaaaggtataacacaatacaacataaacacaaaaaccggacacagacctaataatcattagttattaacataacacaagaggggggactgggcacatcaaaaatgaagaaaaagccacaaaatccagaagcaaaaaaaaataaagataaaggacagacaactaccatgaaacttaataacaagaaaaaatgaccgctccaggctgaatcggacttgggagtagagtcaaaatcacatgagaaaaatgaattcatcc

SEQ ID NO: 100004 - DNA, 205 bp, Zea mays
  unsure (1)..(205): unsure at all n locations
  Clone ID: MRT4577_22718C.1
ctcgaggccggccgggagctttgcgcggtgtggcccttatcttactgctcgagttctagcaggcactatagccctttttcttctcagccatggcgtcagaggacgaagcgaatgctgctgcggcggcggaggtggaagaggaaaagaactggcggcagaagggaagcaagacaacccaagccgtgnggacaagaaatccccaaca

SEQ ID NO: 100005 - DNA, 297 bp, Zea mays
  unsure (1)..(297): unsure at all n locations
  Clone ID: MRT4577_22719C.1
gacaacggagcgcccgaaacaccaaatgctggtgctaccggcagcgncaagncaaccgagaaggccgngagccccncaacagcggcnncaagcaaccaagcnccannaaagccgccggaaaacccaagcaaggccaaggacgngccaggccaagacncgacaaacggaacngacgaagggaaaggaccncngcaanaaggaccagaaggcncgncgagagacnccaaaagaaccnnggggcagcncnggaacnncagccncncngaacaaacggcggannngacgagnnngggagca

SEQ ID NO: 100006 - DNA, 1153 bp, Zea mays
  Clone ID: MRT4577_2271C.1
ctaccactcttgctgcaccgaccgcgagggtgcaacaacgacttacatatatatataaatatccgcgccgcagctagctagctagcagagcagcccggccgaagccgtgtagcctagcctcctcacatatagcagcagcaggacgagatcgtcgatcgatcgatggtgtctctgcagccctcatcagcggcgccgctcctgccggaggccgccaccgcgaacaagctcccgccgtggctctcactcgtcggcagcgtcgtcgcctcctccacgggtaccggcggccaccagcaagaagcggaagcgggaacggcagcggctgcggcggcgacgacgacgaccgtggcgaggtcgtggacgggatcgagctcaatttcgacgccgcgccgctgcctcccgagtggcaacgctgcctcgacatcaagtcggggcagatctactactacaacacgaggacgcagaagcggacgtgcaaggaccccaggggccacgggctgcagtcggactaccgcgccgaagaaggccaggaggaggaggaggccgaggacgacgacagcagcagcagcagtagagagatggtggctggcgtgtgcgtgcggtgccacatgctggtgatgatgtgccgcgccagcccggcgtgccccaactgcaaattcctgcacccacccagccgcgccgcgccgccgccgccgccgctcaagctcggcctccagctgctctgctgcagggactagagaccaaagcgtcccaacgagacccatggatgggctcccccagcaggcatatgcgtgcaccagtacaacgcgcgcacgtgtgtcgcacgcatgtgcaaggaagacacagcgtaatattcaatcagaggcagggtggtggtatggtagctaggggagttgatcagtagtgagtggcggcgccgatgtccgtggccgaccgatcggctgtgcgcgtacgtacgtacgtacgtttcgccaaggggtatatatatcgtgtcataatgttattactcatgtggcgatagatggatggatggatggatggtggtgtagatatcataaagtgcatgcatagcataaatgtagctcggaactttcggcgtctgtcacttgtccgtgtgcatgtacacgtactgtaaacatgtactagtattccaacc

SEQ ID NO: 100007 - DNA, 260 bp, Zea mays
  Clone ID: MRT4577_22720C.1
aaagcaaggacctaaccctggttggttcattgggcgtttcattcatataacaaaatcacggacatggttttcggcacattgacacacaaactagatcatttttggggctggaacacaggtgtgttctcttagcgtgaatagagtatggtgctgccaccgcatctttaatgaattgctttggctaaaaaaccatctttaggggagccatgttgggctgaaagttttcttttgcttaggggcgaaccccatcctgggggggg

SEQ ID NO: 100008 - DNA, 364 bp, Zea mays
  Clone ID: MRT4577_22721C.1
ggggggacatgttacaggttttcgccgggcacgccatcagcgcctgggttggccgagtcgacctgctcatccaaggctagcaccaccctagatgcaccgattttgcccgccaacaacaccattgtcgcccgaggagtcttcatcccgctttgccattgggctttctgcagatccgccatcctggtcgatcccacctccttgtcattggcccatctgcctctttgtcggaagccagatcccttacacgccaatgccttccgtaacattctccgggcacaaatgacactctcatgcgactcgatgcagggagactaactcattaccctctggcccggcatctgggaatgaaacttcagtcgaaagg

SEQ ID NO: 100009 - DNA, 533 bp, Zea mays
  unsure (1)..(533): unsure at all n locations
  Clone ID: MRT4577_22722C.1
ttttgggggaattggggacccttgagggccggcgggggggggggcccactttccgggtttccctttcgggctcttccccttttggacttatgggggccacagcgcgttcgtgtgcaactatattacgcgcacgcgccctcttctgacatagtggtgtggcgtggctcgcgcgcgcgctcatatgtctacacgcgcttcttctttctctcggggtgtgtcggggcgcctctgcgacgagggaagaagagacgacgatgagcagctgttgtgatgatgcatcataattcttctactgacgtgtaggagnatggtagtacttacatcggtgtgcggcggatggatgactccgttgggcggcggtggatgatactcacccctgctgctgcgtgtgacgacgttgtcatcaaggggattacacaggagtgacggaactgctggaatatgctgcatgaatagtaggcccttttccaacagcagcaactaacctgctggatgtactaagattggagcttctccataacaacttgacagga

SEQ ID NO: 100010 - DNA, 1297 bp, Zea mays
  Clone ID: MRT4577_22723C.1
aaagtttgggtaaaagccctttggagtaaataagcctctcttggttccccccgggcccggccgggattctatgaacctccacctctctctctctctctctccttcccagttccctccgtcctctccagttccacagaaggctccgtgcctagatcgtcccgtggagaatgtgttggggatcaaggagtggttgattggatccatcccctcgcgtgcttccctcatcaagtttcaaatccccatctgcgcgaggaactcctctctcaaggggaaatcgctcgtaactgtgcaaacacttgttcctcgatcccccctcaatcaatcgagccgtggtgtttgttgtctctctctctctttaagatggttgcacggaggaatccatccattattgaagaaggtagtagatctgaagaaatccaggtggagctggagcgtcctcgccgctcccagaccggtcatggtagaggccaagctcggggagatgttggtgggagtagttctcaacaacctcaaatcgtccatgccgctcgagaagaacctgtccctcagccacctctccatccatcttcatcacgggctgctgcagctgccgcctctcgccccatgagccgtggtaagagaagcaagaagagaggtgttcgtgcgctcatcaggggtttaaatggaatctatgctatctgtcgtgagagttatgttcaaatcgccgagctaaaaaggaaaaatgtcgagtacaatgagaactttaggagatttatgttagagtcggacaactttaggcgttatgttggtcgtgtacctctgcgtcctgctccaccatacaatcctccgccgcctatgcccgacactctggatcagtgggttcagcagacatatggtgttcctttcgacgaagatatctctgatgatgaggaagaaatctctgatgatgaagatgagtccttctggtgaacatggtcattatggtggcttcttcttcttcttggttcttgttgctaaaagggagagaagttcgtgacatttgatctagtcttttgttgctggcagttgtgagagtgagaacctaaactatgtgggatgtaataactttatgattatgttgtctcaaaacacctggcctgtaatagataattaggtgaacttgttcttattatgctactactcgtttcattaaaaaaaaaaaaaaaaaaaaaaaaaaaaaaaaaaaaaaaaaaaaaaaaaaaaaaaaaaaaaaaaaaaaaaaaaaaaaaaaaaaaaaaaaaaaaaaaaaaaaaaaaaaaaaaaaaaaagcaaacgaaat

SEQ ID NO: 100011 - DNA, 1721 bp, Zea mays
  Clone ID: MRT4577_22724C.1
ccgaggctggccgggcaagattccactggacattagcagcggttgaaccgcacccggccgccggttcaactgaactggcccctttttctcagccccgtgggacggattataaaccttgctctccctgactctcattctgtgaacctccagctttctctctctccttccctcctctccagttccacagaaggctccgtgcctagatcccgtggagaatgtgttggggatcaaggagtggttgattggatccatcccctcacgtgcttccctcatcaagtttcaaatccccatctgcgcgaggaactcctctctcaaggtatctttcctcgatctacctttctagcgagtttgggttgaatccctttggagtaaataaacgaaaggttcatactgccttattctctaatggattcattatttggtttgaatttgataatttgggggaggggaaatcgctcgtaactgtgcaaacacttgttgctcgacccccctcaatcaatcgagccgtggtgtttgttgtctctctctctttaagatggttgcacggaggaatccatccattattgaagaaggtagtggatctgaagaaatccaggtggagcgtcctcgccgctcccagaccggtcatggtagaggccaagctcggggagatgttggtgggagtagttctcaacaacctgaaatcgtccatgccgctcgaggtgggagactcccttctcgccggccgaaggcagaccggcccggaattcccgggtcgacccacgcgtccgctaataataacttgtgatgcctcgatcttctttatcagaagaacctgtccctcagccacctctccatccatcttcatcacgggctgctgcagctgccgcctctcgccccatgagccgtggtaagagaagcaagaagagaggtgttcgtgcgctcatcaggggtttaaatggaatctatgctatctgtcgtgagagttatgttcaaatcgccgagctaaaaaggaaaaatgtcgagtacaatgagaactttaggagatttatgttagagtcggacaactttaggcgttatgttggtcgtgtacctctgcgtcctgctccaccatacaatcctccgccgcctatgcccgacactctggatcagtgggttcagcagacatatggtgttcctttcgacgaagatatctctgatgatgaggaagaaatctctgatgatgaagatgagtccttctggtgaacatggtcattatggtggcttcttcttcttcttggttcttgttgctaaaagggagagaagttcgtgacatttgatctagtcttttgttgctggcagttgtgagagtgagaacctaaactatgtgggatgtaataactttatgattatgttgtctcaaaacacctggcctgtaatagataattaggtgaacttgttcttattatgctactactcgtttcattaaaaaaaaaaaaaaaaaacaaaaaaaaaaaaaaaaaaaaaaaaaaaaaaaaaaaaaaaaaaaaaaaaaaaaaaaaaaaaaaaaaaaaaaaaaaaaaaaaaaaaaaaaaaaaaaaaaaaaaaaaaaaaccccggggggggcccgagaaaaaatttccccaaaaaggggccttttttgcccccccaaagggggccttttttaaaaaccccggagggggaaaaacccggggttaaacaaattaaacccctttgaaaaaaacccccttttccaaaagggg

SEQ ID NO: 100012 - DNA, 877 bp, Zea mays
  unsure (1)..(877): unsure at all n locations
  Clone ID: MRT4577_22725C.1
ccggggctctccctcgaggccgggcaaattctatgaacctccagctttctctctctccttccctcctctccagttccacagaaggctccgtgcctagatcgtcccgtggagaatgtgttggggatcaaggagtggttgattggatccatcccctcgcgtgcttccctcatcaagtttcaaatccccatctgcgcgaggaactcctctctcaagatggttgcacggaggaatccatccattattgaagaaggtagtagatctgaagaaatccaggtggagctggagcgtcctcgccgctcccagaccggtcatggtagaggccaagctcggggagatgttggtgggagtagttctcaacaacctcaaatcgtccatgccgctcgagaagaacctgtccctcagccacctctccatccatcttcatcacgggctgctgcagctgccgcctctcgccccatgagccgtggtaagagaagcaagaagagaggtgttcgtgcgctcatcaggggtttaaatggaatctatgctatctgtcgtgagagttatgttcaaatcgccgagctaaaaaggaaaaatgacgagtacaatgagaactttaggagatttatgttagagtcggacaactttaggcgttatgttggtcgtgtacctctgcgtcctgctccaccatacaatcctccgccgcctatgcccgacactctggatcagtgggttcagcagacatatggtgttcctttcgacgaagatatctctgatgatgaggaagaaatctctgatgatgaagatgagtccttctggtgacatggtcattatggtggcttcttcttcttcttggntcttggtgctnaaagggagagaangtcgtgacgtttgatct

SEQ ID NO: 100013 - DNA, 862 bp, Zea mays
  unsure (1)..(862): unsure at all n locations
  Clone ID: MRT4577_22726C.1
gctcgaaaactggnanaaagccaanaccganaagaagaagcggcatcaagcgctaccagtggcggcagcagcagcggccctgcaaccaagcgcatccgcgcgagcaacggaggcccaatgcctcccgccaaggcaggtcgtctcgctaccaatgcctgcgcgtcttctttcccaggtcccgccacattcacccagtctccctcccacgcaccacacgccaatacctcctccccttcccatgcatcacacgccgccacagcctccccttcccacacatcctatgccacgccgcctccttacccggtcggtttcaacgtcggcatcaccatgccatactccaccccacccatgagctacccccctgccccctatggcgggtacggcagcgggatggcagcttacgccaacggaatggcccctgctttccaccaggcttactaccggtaggtttagtcatgaaacaaaacaaaaaaaagtcgctgatgaatgacatgacaacaactgatagtcgcgcaatggccctgttttgtagcgactgactacaacggtaggttgggtatctcatcttctatgtcctttccatcaccaccactaggtgtgtgtgttgtgtttagctcgtctcatctcatcttagaccactgcctctctctttttactggtaaggaacctggaacctgggtgtaaattatgtatggtatcagcgagactgtcgtcgcagccttgtgtaactctgttcggaactttgatctccttttttttgttgttgttgaaaagatcagcatgtgatcgttaagtaccggatgtaccatgaactttaaccaaaagttttctcagtttagttgtgtgaaaaaaacacaaacac

SEQ ID NO: 100014 - DNA, 1207 bp, Zea mays
  Clone ID: MRT4577_22727C.1
gcttgatgctgtgaattttgcttacgaggctgggcttcaggagaagttccctccagttcctcttctgaagtcctacctggaggactctaagaagacgtcgaccgccgcttcagataattcaagcactagcagcagtgggcaatcagggagcaacgcgaacaagaaagagcagtctgcactgcgagctgtcatcaagtgtgtcgaggaccgtaatcttgaagccgagtttccactggagggtctccggaagcaactcgaagagctggagaaagccaagaccgagaagaagaaggcggcatcaagcgctaccagtggcggcagcagcagcggccctgcaaccaagcgcatccgcgcgagcaacggaggcccaatgcctcccgccaaggcaggtcgtctcgctaccaatgcctgcgcgtcttctttcccaggtcccaccacattcacccagtctccctcccacgcaccacacgccaatacctcctccccttcccatgcatcacacgccgccacagcctccccttcccacacatcctatgccacgccgcctccttacccggttggacatggcctgtactgcagccggagcccgccggtgatcaggggggagccatacgcttacccaccagccgaggaggtagtcggtttcaacgtcggcatcaccatgccatactccaccccacccatgagctacccccctgccccctatggcgggtacggcagcgggatggcagcttacgccaacggaatggcccctgctttccaccaggcttactaccggtaggttcagtcatgaaacaaaccaaaaacaaagtaaaacaacaaaaaaagtcgctgatgaatgacatgacaacaactgataatcgcgcaatggccctgttttgtagcgactgactacaacggtaggttgggtatgtcatcttctatgtcctttccatcaccaccactaggtttgtgtgttgtgtctagctcgtctcatcttagaccactgcctttcttttttcactggtaaggaacctggaacctgggtgtaaattatgtatggtatcagcgagactgtcgtcgcagccttgtgtaactctgttcggaactttgatctttttttttgttgttgttgaaaagatcagcatgtgatcgttaagtaccggatgtaccatgaactttaaccaaaagttttctcagtttagttgtgtgatttggtgtgccgcaa

SEQ ID NO: 100015 - DNA, 370 bp, Zea mays
  Clone ID: MRT4577_22728C.1
gagcgcgcattatctgttgttagattgagttgagtgcatgagggacgacggttgcattgcatgcggccgttattattgcgaggctgcatgcttgtgacgtgacgcctactcgactcacggtaccttgacctgctctacaagtatttgtctccaagaaatttgtatttctaataggctttttttaaccatctattcttgtagtataattattacgtattgaaataatagtgtgtacctttgatttcctccaaaaatcctaaaaaagcatatatttattttaattttaaaataactctgctttgcttcaaaaaaaacacaacaacaaagaactgaccaaactgaaaagagaggccaccatcgagaacggaag

SEQ ID NO: 100016 - DNA, 652 bp, Zea mays
  Clone ID: MRT4577_22729C.1
cgaggaaaaaaaaaaaaaaaaaaaacaccaaacccacacacacacgcaggcagcagtcaagcggccaacctctgtttcacaccgtacatgcgtgccacgcccacaccgcagcccccgatgtcgtcgcagcgcccgggccgtcaccagcgccgcgcgtcgcagagcgtgttcgtgctcccagagaacctggcctccctcgacgtcgacgcggcggccgacgcgggcgccaaggccggcgggccagaaggcgccggcgccggcgccgagcagcaggcgaggccgcccgcggggcgtcaccaccgccgcgccatgtccgtggccgcggccgtggcctccagggagcttgagctgatcaaggaggacctcggcagctacaactacaaggtcggcgcctgagagagagagagagagaggagccggcacgctgcgtcatgtgtatagagcttgtgggttaaccgtacccagagctggctttgatcgacgattaacagtggcttaattacatggtctctctctttgctctttttgtttgcccacacacgcatgtataatagtactagtagtactatgtaactttttcactacaaagagaactatttggacattttaatagccgtattaatagcagctccaacgataccggattcctaag

SEQ ID NO: 100017 - DNA, 525 bp, Zea mays
  Clone ID: MRT4577_2272C.1
aaaaaaaaaaaaaaaaaaaaaaaaaaaaaaaaaaaaaaaaaaaaaaaaaaaaaaaaaagaaaaaaaaaaaaaaaagattgaacttagattgtaatcctttttcctgccccgcttttggcgcttttttgtgaaattgtcctccctcttggtgcccgtttggggcgggctccctcttggtcctcattgggcccctttttgccttttttttgcgccgtctttttccttccgtggggccgggttattcccctgggggttcccgggtttacccccccttgaatcccctttatagtttcgcccagttttggcaccttttttttggtgcccgacaatgtctgccttggccggcccttcctcgcccttttttccaattggttcgccccttggggcgcccttttacccccctttatgcgcgtttttccccgcgggggggcgggtaattcccccagggccctccccccccctagggccccttcttcccgttccttttgctttcttttcgccgtttttccccccgttgcccggttt

SEQ ID NO: 100018 - DNA, 396 bp, Zea mays
  unsure (1)..(396): unsure at all n locations
  Clone ID: MRT4577_22730C.1
accggaaagaaaaaaccactgggcataaactagagagggcttaaaaaacaaaattttttcaaaaccttaagacaaattagccataacattttaacattaaccgccnnnnnaaagaaaagaaaagagaaagagaccttactaacgggaagggggctcaatccctttaaaactacccaatcaaaagccttttgttttttttttttcccacaggtaaactcttggacgggcttcttaaacggggaaaaaggtttcctttttcacagggtctaagggtattaacactttcaggctttcatttttttggtgggaggggaacttgggcctttggaaaggtggataagcccaacctttggtggggggagtttcacgcatttcccatggaaccatttttggggg

SEQ ID NO: 100019 - DNA, 560 bp, Zea mays
  unsure (1)..(560): unsure at all n locations
  Clone ID: MRT4577_22731C.1
cgagttgcagtcgcctggnccttccccagacgtgcggncgcgcgcggnccaggngcgctcgtctcctccgccctcggcctcaacaacctgcagccgagcaggccaccgtgcgaaggttcgagtggtacgtggacagcgcgggcgagttcctgcggttcgtggagctcggctgctgcgcgccgcgctgccgtgtgccctccgccgccgacgctttcgtccagaacctcgccgcggggaggaagctgcagcacgtggtggagctgggggaccggtgcacgttcttcctgctgtggctgccgtttttcatcagtgatcctccagcggaggagcgcggggtcgaggtggtcctgttcttcatccagaaagacggcctggcaccccagaacagcttcaacttcagcatcaccctgcagctctcggagagcacggacgttctcagggtcgccgtcgaatgcctggacctgtacacgccgcttttcgggtctagagtcgagactgtgaggaacatgctcacgcggctgcctgcgcaggacttgtcgtgctcgtgggcgccatttctt

SEQ ID NO: 100020 - DNA, 300 bp, Zea mays
  Clone ID: MRT4577_22732C.1
cctctagagcagggcgcgcccttttattcattttcaccttgttcatgttcaacccaggggaagatagcaacacgtttcgtcagaaaggtacgcctaattcacattattgcatatgtcttcgcccacacaattggagcagtcaacgagaataaaacaacaggtccgcgaacctaaaacgaagctccaagccatatggaaaaaaacacccccataatctagatagaaccgggaagagcaattacacagtacagattctacggaaagctactgggacagaggcctatcatgtactactgggag

SEQ ID NO: 100021 - DNA, 854 bp, Zea mays
  Clone ID: MRT4577_22733C.1
cattgggtacctcgaggccggccgggaatgtttttgctaaactcctgctactcctggactctgcatgcatcgtaacccttgatgttacgacgtagctgttcctggccgccgtgcaacacctgcgatctattcctctgctcattctgctcgacacgcacattcagtgcctacagcgaagaagccccgattatgactcccagagtccctcgcatcctcttgtacatactgcgccgcgatgtacgcctctcagataaccccgtgttctacgctgcatccctccagaccagccgaccgagttcaaaatcttcttcaagctccgatcggcggcatcgcgatgattcgctgacttcggaacacggccgcacacatttcacccaccttttacccgttttcgtattccccgccaaccagatcgaagtctcaggctttctctcgtcgccgtccgataaatgtccataccctgaggcacgcagtagggaggcgcgtgtgtggcggacaggccctcaccgcgcaaaattcatcgccgatggcgtgtggaatctcaaagataagcttgcggggttaaattgtggctcaggcctagaaatgcgtgtcggaaaaattcccgaggtggtctccgacataatggattggtacgacaaggacgaaaatgagggtgtaatcagcggggtttggattacagacgatgatgctactgaagagaagaatgacgtggccggtttgaaaaagatcacagaacagcgtggtgtagatttcaaggtttgggtcgacgagaagtactatgtgggacgaccgggatctaccatattacgaagacatctccaaactggccaatgtctacacacatatcgaag

SEQ ID NO: 100022 - DNA, 745 bp, Zea mays
  unsure (1)..(745): unsure at all n locations
  Clone ID: MRT4577_22734C.1
gccggncgggttgcgatcccaccccacccacctccttcctcttcccgcccgctaaaacccacgccaccgccgcgcgccgccggcagcgcaagggacgcacgatggccatgcaggtggtgcgcaacctcgacctggagcggtacgcggggcggtggtacgagatcgcgtgcttcccgtcccggttccagcccaagacgggcaccaacacgcgcgccacctacacgctgaacccggacggcactgtgaaggtggtgaacgagacgtgggccgacgggcgccgcggccacatcgagggcacggcctggcgcgccgaccctgccagcgacgaggccaagctcaagatcctttgcaggcagcctcacatggacgagtccgtgtacaaggaactggtggagcgtgccaaggaggaagggtacgacgtgtcgaagctccgcaagacggcgcaccctgacccgccgccggagagcgagcagagccccagggacggcgggatgtggtgggtcaagtccatctttggcaagtagccttgtggtggtgggtggcagcgcgggtgctgccgtgccgagcaggcgagcgcacgcaagagatgcctgtgaccgtcggttccgcgtgtacattcagcactagctggggattaagttggttcgttgttgctgtcgcgatctgcaaatggcgaaaagtgtgcttgtttcttgcccgtctgtattgtatcgaactttgagcgaatgtttcagtttgctgcacc

SEQ ID NO: 100023 - DNA, 258 bp, Zea mays
  Clone ID: MRT4577_22735C.1
cgcgttcgacggacgcttctgcggcccctgtaccaatccttgaataacatcatcagcgatgatcggggtgagatgtcgggggcagattcggacaggttcacattcatcatccagctggtggagagcctacactagctcgtacataggcctatgtagcaaatagccgattcatacactatcatggacattacagacacttacgtgacttacatcaggttcctgtccactgaactaatcacccctaccaataacataaca

SEQ ID NO: 100024 - DNA, 1163 bp, Zea mays
  Clone ID: MRT4577_22736C.1
cattgggtacctcgaggccggccgggacatgactctcggcaacggatatctcggctctcgcatcgatgaagaacgtagcgaaatgcgatacttggtgtgaattgcagaatcccgtgaaccatcgagtctttgaacgcaagttgcgcccgaagccattaggccgagggcccggccgccacggctaccgcaatctgtcactatagcctgcgcattcgcatccgggcatccggcatcccaccccacccacctccttcctcttcccgcccgctaaaacccacgccaccgccgcgcgccgccggcggcgcaagggacgcacgatggccatgcaggtggtgcgcaacctcgacctggagcggtacgcggggcggtggtacgagatcgcgtgcttcccgtcccggttccagcccaagacgggcaccaacacgcgcgccacctacacgctgaacccggacggcactgtgaaggtggtgaacgagacgtgggccgacgggcgccgcggccacatcgaaggcacggcctggcgcgccgaccctgccagcgacgaggccaagctcaaggttcgcttctacgtgccgcccttcctccccctcatccccgtcaccggcgactactgggtgctccacatcgacgccgactaccagtacgcgctcgtcgggcagccctccaggaactacctctggatcctttgcaggcagcctcacatggacgagtccgtgtacaaggagctggtggagcgtgccaaggaggaagggtacgacgtgtcgaagctccgcaagacggcgcaccctgacccgccgccggagagcgagcagagccccagggacggcgggatgtggtgggtcaagtccatctttggcaagtagccttgtggtggtgggtggcagcgcgggtgctgccgtgccgagcaggcgagcgcacgcaagagatgcctgtgaccgtcggttccgcgtgtacattcagcactagctggggattaagttggttcgttgttgctgtcgcgatctgcaaatggcgaaaagtgtgcttgtttcttgcccgtctgtattgtatcgaactttgagcgaatgtttcagtttgctgcatcatttgtttgtcatgtgctggcacgcaagagatgcctgtgaccggaaaaaaaaaaaaaaaaaaaaaaaaaacccgcggcc

SEQ ID NO: 100025 - DNA, 323 bp, Zea mays
  unsure (1)..(323): unsure at all n locations
  Clone ID: MRT4577_22737C.1
ccaggcgtncggaggaaggctcctgccaccacattttcttcagcgatttattttcgccgggatcgtcgcacgaggcggacgactatgcagggggggccaccatctcctgctactacgactttccaagaaacaacgagcacgcgctgctcatagcgctggcacatcagcccgtcagcatcaccatcgaggcctgcgccaagaactttcagctctacagcgaccgtgtattctatgggccctgactcacgcagctggaccactgggtaccagccgtaccctacgggacggcagccaaagcccattactacatcattgtcaacaac

SEQ ID NO: 100026 - DNA, 239 bp, Zea mays
  Clone ID: MRT4577_22738C.1
aaaaaaaaccaatccttcaccataaaatattgggctcaaaaaacccggattaaaatacaggcaggctcaaaaacttgcccgcagccggccgttaaaaaaaagtgggggcctgatcctttgttaacggcggacaggaattaacgggccacaattaggcctaacgaaccccaggcaaggactttataccagtttaaatgcccacggcgcacttttgctttgaccaggcccaaaaactcttt

SEQ ID NO: 100027 - DNA, 384 bp, Zea mays
  Clone ID: MRT4577_22739C.1
gcccttgcatacacatcttgaagattgagaaacacactccactcacttggaacatgtacttcatcacttaggtgagactagaacactcctagtgcatggtgtagtgttcatgcttcttgtggcactagttgagtgagttggaccgattctacacctattactcttgatgattgtcattacctagatggcccaatgattgtgggattgttgaaggttttggtgattcttgtcaactcagatcattcttgtgtggggttcttatgtctattctcgtgggagattcttaagagcaactctagtcaaatattagcttgttggagttctactctagtgtgattcatacgatccccttattatatatgggcttggcttgttatgccaatt

SEQ ID NO: 100028 - DNA, 346 bp, Zea mays
  Clone ID: MRT4577_2273C.1
ccaagggttcaaggaaaactgtttaagcgcgctatttaaccactccaatcgggtgtccaagagagccttgtacttgagtgccttcatgggcagggcaatctctttacttatgaacggggccaacgtgaaggggtacacggtctgggcgtttctggacctgtgtgagatgttggcgggctactacttgcgatacgggctgtaccatgtggattttcaggacccggagatgtggctgacaccaaaacattttgcgctggggtacagcaaggtctttgttaatgaaagcgacataataaagaacgttgtgtgcgatactgacgatgcgcgctcggttgctgctgaacaa

SEQ ID NO: 100029 - DNA, 837 bp, Zea mays
  Clone ID: MRT4577_22740C.1
ctcgagccggccgggatctgtcctgctcgggcccggccgggatagcctgcgcattcgcatccgggcatcccaccccacccacctccttcctcttcccgcccgctaaaacccacgccaccgccgcgcgccgccggcggcgcaagggacgcacgatggccatgcaggtggtgcgcaacctcgacctggagcggtacgcggggcggtggtacgagatcgcgtgcttcccgtcccggttccagcccaagacgggcaccaacacgcgcgccacctacacgctgaacccggacggcactgtgaaggtggtgaacgagacgtgggccgacgggcgccgcggccacatcgaaggcacggcctggcgcgccgaccctgccagcgacgaggccaagctcaaggttcgcttctacgtgccgcccttcctccccctcatccccgtcaccggcgactactgggtgctccacatcgacgccgactaccagtacgcgctcgtcgggcagccctccaggaactacctctgggtgcgtgcgaattcctctctggcctccgtccgtctatccctcgccgaatcgtgcctgtctgcctaccaatccccctgtgtttgtgtgtgcagatcctttgcaggcagcctcacatggacgagtccgtgtacaaggaactggtggagcgtgccaaggaggaagggtacgacgtgtcgaagctccgcaagacggcgcaccctgacccgccgccggagagcgagcagagccccagggacggcgggatgtggtgggtcaagtccatctttggcaagtagccttgtggtggtgggtggcagcgcgggtgctgccgtgccgagcaggc

SEQ ID NO: 100030 - DNA, 752 bp, Zea mays
  Clone ID: MRT4577_22741C.1
ccggccggggccccaacccgtcgcaatggccgccgtctccgcagccccgaggccctcgatgcctccccgactcgccctccgtgcccacctcttctcctccgcctctccgctcccaatgcgcgcgctccccttactccgcagccgcttccgctccttgaccacggcctacgctgtcaagcaggacacggccctctggacccctgcacccgtcacggggaaggggttccccctcgacaggataaatccgcccgacgtcgcgcagaccgtgctcatcttcgcggcggggacggggatcagtgcgattcgatcacttatcgagttcggtttcgctgtcaaagaaagagctgatgtgaggctttattatggtgatacaagtctgaaatctatgtcataccaggaaaggcttagtaactgggagtcaactggaattaaaataataccagtcttatcacaaccagatgacagctggaaaggtgaacgaggatatgttcaggatgctttcttcagaaacaagaacatagtaaatccatcttctacaggagccatactttgtggaccgaatgaaatgcaggaggaactcaccttatcccttgtagcagatggtgtctcacgagacaaaatcttaacgaactactgaaagcgatctccggtctctgatgtattttatgaccagttaggcctcaacgtgtaaactttattgcttaagcctggctgtgatgttccagtgatatatgaataaactactgaacttg

SEQ ID NO: 100031 - DNA, 530 bp, Zea mays
  Clone ID: MRT4577_22742C.1
atcaaaccaatcaaaaagattgtttgttttattgatggatttacaaagagaaccaataatggtactcgcacaaggacaggaacaatacggatcctaggaacttcaataattaacatcctgtctttctttgcggttgctgatctcaccactgttgtcattggtgtttggcaaactagcaggtttgacagaaaacttgccatgaaaagaaaatggagcaacgcatgcattgtactgatccacaagatacagattcaacaacattgcctgctaaaaggccggaaatttcaaacatagtaggtaataagaaaaggactaaacgaaaggaatacataaaatggggacgaagggggcccttgagcttataagcacttcctgtgaacaatcggtggaggctgactcatggaactcaacctttgatatccacatctgttggaaggcgctcagggaggcaaggattgaccctcctatccagacactgtatttactctccggtggatccaccaccttgattgtcatgctggtcgcagcaa

SEQ ID NO: 100032 - DNA, 196 bp, Zea mays
  Clone ID: MRT4577_22743C.1
ttgatcctttataaccggccgccctttttttttttttttttttttgaacctatgccagccgggttccagaccatccattcaaaattggaagggtggtagattttcctctaaataaacaacatgcatgccggtcgcagggggaaaacactgctaccgggtgattaaactttgctcgcttaaccttgctacgaaaccc

SEQ ID NO: 100033 - DNA, 1275 bp, Zea mays
  Clone ID: MRT4577_22744C.1
taaaggtctacatttcccggctcgacccacgcgtgggaccacgcgtccggccggcgcctcccacgtctccagtccgacactccgactcactccccctcccccgccccaacccgtcgcaatggccgccgtctccgcagccccgaggccctcgatgcctccccgactcgccctccgtgcccacctcttctcctccgcctctccgctcccaatgcgcgcgctccccttactccgcagccgcttccgctccttgaccacggcctacgctgtcaagcaggacacggccctctggacccctgcacccgtctccgccatcagtgctgccaccgacgacggctccgtctccctcatcgccgtcgacctatctgacgccacggacctcgtggactcgtacacgaacccgggccaatacctcctgatccgcgtacccggcgaggagctcaagccggcgtacatggtcatctcctcgccgcctaaagcggggccccggttcgaattcctcgtcaaaagcgtgccgggagctaccgcggggcggctctgcgccctccgagacggggatgttgtggagctcggcgccgtcacggggaaggggttccccctcgacaggataaatccgcccgacgtcgcgcagaccgtgctcatcttcgcggcggggacggggatcagtgcgattcgatcacttatcgagttcggtttcgctgccaaagaaagagctgatgtgaggctttattatggtgatacaagtctgaaatctatgtcataccaggaaaggcttagtaactgggagtcaactggaattaaaataataccagtcttatcacaaccagatgacagctggaaaggtgaacgaggatatgttcaggatgctttcttcagaaacaagaacatagtaaatccatcttctacaggagccatactttgtggaccgaatgaaatgcaggaggaactcaccttatcccttgtagcagatggtgtctcacgagacaaaatcttaacgaactactgaaagcgatctccggtctctgatgtattttatgaccagttaggcctcaacgtgtaaactttattgcttaggcctggctgtgatgttccagtgatatatgaataaactactgaacttgagacgaggatgtaatgttcagtgatatattatatgaataaactactgaatttgaggcgaggacaaaaaaaaaaaaaaaaaatttgcggcctctaaaaatctgtggtcaagtttcggtttggttcatataaatggccgcagtaacatgcttctttatc

SEQ ID NO: 100034 - DNA, 246 bp, Zea mays
  Clone ID: MRT4577_22745C.1
atggaggtaagaaccatgatgtacgaggattcaaaaggtatattggaggttggtatgaagagaaatatagttgggtacattatcctttgtgatacttgccatagagtgaaggccaaacacaaaatctttgctgcaactgtgcacgacaggagatgtgctaccatagatccgtcaggtgatcaaggagatgtgccgctagggagatgtgcgaacatggatattcgtcagatcatgaaagagatgtag

SEQ ID NO: 100035 - DNA, 354 bp, Zea mays
  Clone ID: MRT4577_22746C.1
cggacgcgtgggagcagctcagcagcagcacaggaagatgggaagcgccggagccaccctcgtccgcttcctgctgttggcgtcgatcgtggccgggttcgcggcgcatctcgccgcgggggagaaggactgctacgacgagagggacagcgtcatccgcatgtgcaagtggaccatcaagaaggggagcccctacctgaccccagacatgccctgccgcctcgaggcgaggaaggtggacatgccctgcatctgccgcgtgctcaccgccgccgacgagcggatcatcaggcccgagaagctggtacgctgctcccgggaagccggggtgtgcctgcccggtgggagcaaatg

SEQ ID NO: 100036 - DNA, 379 bp, Zea mays
  Clone ID: MRT4577_22747C.1
ccggccggggacacacctgctgcttaccacctcctaggctgctacccgcgacaacctacgagagaagcaacaggagcgtcctctggggcatcggcgcgccacagctgtggcgtggtggccggctgaatgcctgaatcgaagctgcagaaggtgctgctctcctacttgaacctcaaggagcggaacgacctgtacttctaccccatcacataaaacaaggacattcttgaccccaagaacacaactgatccttacccatcattatcaccatcatgcgaatgggcctattgctgatgcctcgccgtagagcacattcacgtgctccccgattaccacctcccaacctctaacgttattatgccaaaaaagtacaccccct

SEQ ID NO: 100037 - DNA, 364 bp, Zea mays
  Clone ID: MRT4577_22748C.1
gaacaatcaacttctatgattgactgacatcaagttgcaacaatgctcagacatgcaacaggtaggtcactctgggcgtgggatgaattcccaaaggtcaccctaacggaagatggcattgttctgcttggaggtactatcactaaatttgccatattttcgaaaccatcaaaagggaccttatctcaacaaacacaacatatatctcaatagagaatcacctaccacactaggcacaaactcaatacaatgccatgagtgtcttgaatcctgatggactgacgacccgtgaagatactcacattcctttatcgactcatacctgggcaagctctcttaagctttggtctgcattgtacacaac

SEQ ID NO: 100038 - DNA, 445 bp, Zea mays
  Clone ID: MRT4577_22749C.1
ggggggggaaaaaatttttttttggaaagagggtccccgggacaaaaggggcacccataaacaaatggggggggggcccaaaaaagagggggtcgagaggaacccccataaaaaactttaaaaaaccttgggggggaaaaaaaccgccggcggtagagggccccccccataaaaagacccccggggggggtttctttataaaaaagaggcggccccccccggctttttaccccccccccaaaagaaaaaattttttcccgggaacacccgggggaaaacacccggggcccgctatttcctaaagaggctcccccccaaaaaaaaaaacccctagggggttccgggtctttgggaaaaggggggaagccctacaaaaggagagggccccttttggaaaaaaagcctcacagaagggggccccccacccccgtttttttcccagggg

SEQ ID NO: 100039 - DNA, 1372 bp, Zea mays
  Clone ID: MRT4577_2274C.1
attggtacctcgagccggccggaaggctttggtgggacatccacatccttgtccgcggcgaaacacaatttcccacagcgagcgaggttcccctcccgactcggtgatggcggcgccggcggcggacgaggcatggtgccggaagacggtgccacgggtgatggaactggtgtgtcggcgccttccgcagcgggacgcatgcgcgctgcttgctgtcagtccctggtgctaccgtgccctcgttgctaactccaggctctgggaggtacttgatctacgtgagatgaagaatgctggaaaccgacttatttcagcactttcactggcaaggtatcgtcacctcaaagtattaaaccttgaatttgctcaagatattgaggatcgatattttgttcatctaaaagaaatgagtggcatctcactggaaaatttggaattcctgaacctaaatgcatgtcagaagatctctgataaaggaattgaagctgttaccagtctttgtcctaatcttcagcgccttgctatctattggattgtaggactgacagactcaagtattgggcacattacaaagaactgcaagcatctagtgcaccttaacttgagcggttgtaagaatatcacggataaaggaatgcagttgattgctaataattaccaaggactaaagagattgaacataaccaggtgtgttaagttgacagatgatgggcttaaccaagttcttctgaagtgttcttcacttgaaagcctaaacctttatgccctttcaagttttactgacagtgtttatagggagataggatcattaagtaatcttacatttctagacctatgtggtgctcagaatctaacggacgatggccttgcatgcatatcaagatgtggacgtctaacatacctcaatttgacttggtgtgtacgtgttactgacgctggcattttagctattgcgcaaggttgtcgagccctcgaactgttaagtttgtttggaatagttggggtgaccgatgcatgccttgaggctttatcaaaatcttgctcgtccagcctcacaacactcgacgtaaatggctgcataggtattaagaggaggagccgggatgacctgctgaagctcttcccatcactgagttgcttcaaagtgcacagctagcaggcacggtggttctcgatggctttgtattctacatctaggaaggggaagggagatgttgaggtgtgtcttgacttcatgttcttgtgttagtatatactttctttgtttcggattttctatgttcgttgattttgctatgtatggagacattgtgtatatctaagttcgtatcaagagaagttctacagcagctaaccgccctgagttggcaaa

SEQ ID NO: 100040 - DNA, 369 bp, Zea mays
  Clone ID: MRT4577_22750C.1
tcgaattagaaacacaccgagcgaagcgcactatcaacaaactaacaacaatggctaccaagatattagcccttcttgcgcttcttggccttttaatgagcgcaacaaatgggtttattatttcacagtgctcacttgcttctaaagccattatttcacaagtccttccaccaagtactttaatgggctttgaacattcaaccgggcaagcctacaggctacaactagcgctttgggggagcgttttacaacaaccaattggccaattggcacaacaattcttggcacatgtaaacctaacaaccatcgaacgcaacagaacaacaggtgtgcatgatgacccctaccgggtgacctgtgctactgcac

SEQ ID NO: 100041 - DNA, 717 bp, Zea mays
  unsure (1)..(717): unsure at all n locations
  Clone ID: MRT4577_22751C.1
ccggcgcgggagattctctatgggctctccagcagcttcctctaaacggtcctctaaatntagaggacgctgctggattctctatatagagagagagagtttctctaaacggtcctctatccatttgaatactttaaataaccggtttagcaaaactagaatatatacaatacattcgagagtataacaaatacgtatgtacaaaaaataaaaataaaaaatgtctctaatatagatatttgagtatagaggacgtgatttagagaacgttgttggagagaaaggagatatagaggataaaatcttttagagtatactgtaaaagaccgatatagagaatgaatatanaggacgttgctggagacagccttagactgcagatatggaggcgaaagctcatgatgattgcatttcgagtattaccaatctttgaagcaatggtcttcctgaacaagatacaggntccttcttcattgcttgttagcccgccatctgtcatcctcatggtcacttggatacacaggacctacctccaccctttttaatttgacgctaaatagggcaaaactgaactacaaaacatcgaataagaaaaatgaggggagtacttgtattctactttcacagcatgtcgtactactacaatgtacgcacatctgtgcaattgaagaaattgcatacatgttggatgtgtcggatgtaaataatgcgtatgag

SEQ ID NO: 100042 - DNA, 137 bp, Zea mays
  Clone ID: MRT4577_22752C.1
aaatacagcatatatatatatatatatatataactgtgccgacaagtgtcatacaaggaaaaatgtgtacaaagattttatcacactatacatatgggaccagctttcaacgagggagggcggaaacaacctaatga

SEQ ID NO: 100043 - DNA, 716 bp, Zea mays
  unsure (1)..(716): unsure at all n locations
  Clone ID: MRT4577_22753C.1
ggtaccctccgggttccggccgggnaaaaaaaaaaaaaaaaaaaaaaaaaaaaaaaaaaaaaaaaaaaaaaaaaaaaaaaaaaaaaaaaaaaaaaaaaaaaaaaaaaaaaaaaaaaaaaaaaaaaaaaaaaaaaaaaaccccctttttgggtcccctgggggggaccgaaaaatcccagggcccaaaaggggtccccccccaaattttggcccgggccttttttttaaaaacccggggaaaggggggaaagccaaaaaaaaaaaaaatttttttttgggaaaggggggttcccaaatttaaaaaaaagggcaaagggaaaaaggggcccctaatcccccccttttttttccccaaaaaaacccgggttttaaaccctttttttaaaaaaaaaaaaaggggtgaagggtttttccccctccctcaaaaatttatccccctcccttaaaccaaaaaccaagggggtttttaaaaaaattttccccccaccccttcaaaaaatttgggtaaaaatttttttcagggaacccttttttttggggcccggaacccattttgaacgggggccccgggggttttaaagccttgggtttcccaaagggggtttccggcccctttttgggggcatattttaaaaaaggttttgcctttttggcaattaagggggccaaaaaacccaaaaaggtttcccttcaaaattgggaaagggggggggggg

SEQ ID NO: 100044 - DNA, 832 bp, Zea mays
  Clone ID: MRT4577_22754C.1
ggcccgggcgttgcttcgaacgggggcagcaagacggctgcagcggcaccgtcgcgcctcgccatgccccctagcttccagagtagcgtcgccagcctgtctggctccgacgtgtcaaacatgtacagcggcggcttggagcagcaccttcgggcgccgcacttcttcaccccgctgccacccatcatggaggacggcgaccacggtggtccccccacccgcatctcctcctccttcaagtgggcagccagcgacggctgctgcgagctcctcaaggcgtgaaccgacgaggaggaggggatggctactcagacgaacggccttctcgccgatggctggtcgtctgtaggcaaatcattcttggctgttccgcattggggtgcaacctcatccacatcatctacctacccagtaggccagtaccccctgttccctgaacagtgcttgggttacaggggtcctcctgtgtgtgtgatgatgtggtgtgcctcccccacatgcatttgctgtaacataatagtgtacccaaaccactgcttcggactatcattgtctgtctcggtatggattttctgttgtcacagtgtctgaataattgaggcgtcagacttcaaagttgctccggttcttggagatgggtatgtttgaagcttgcttggaggtctgaaactttgtgcttggtcactcaagaatcaagatgctgagttattgcaaaaaaaaaaaaaaaaaaaaaaaaataaataaaaaaaaaaaaaaaaaaaaaaaaaaaaggaaaaaaaaaaaaaaaaaaggccccaaagaccgggggcgcccccaatagttcacccctccc

SEQ ID NO: 100045 - DNA, 341 bp, Zea mays
  Clone ID: MRT4577_22755C.1
ttggtttttgagatccaatgcaccattctggatcaattgtcggcgagatccggcactttcccagtcgctggcccccacacgtccggctctgacgcgtgggcagacatactaccctactagttctgcagggtcaacacaagctcactgaaacacaagcccctatagggtccaggtctgggagcatcagtagacagagccattgtctactggggctcattcttatggccatgaaactacatgacctactcagttgccacaggattgggtgccgccggtgacccacatgactcaattattcggtgcacagctagccatatgagcctggctattctgcagctctg

SEQ ID NO: 100046 - DNA, 373 bp, Zea mays
  Clone ID: MRT4577_22756C.1
gtccgcgaccatgcggtgcaccctgtccgaccctctccggcgctgtctctcctccaccggcgccggcgatcctagcctagtctcttcagctgagcatgcgtaccggctcctgcgccgccaccactccgacccgcagaggctctccgccgcgctgtccgagtcgggtctcgacgcctactcgccgaacgtcctggacgccgtcctccgacgctgtggcgctgcctgctccctcgcgctgcacttgttccactggtgctccccgtggctgccctcgacgttcccgttctccctagcgctcctcgccaagttcttctaccgcgcgtacttcgcgccggacacgttcctactcgcgccgatcacctctgaactgctt

SEQ ID NO: 100047 - DNA, 322 bp, Zea mays
  Clone ID: MRT4577_22757C.1
cgtcgcgttcgctccactccgcgggggtggcggacgttttctatctgggcctgtttgggctctgctggctggctccttgctgcgcgaggctgctgctcctcctttttgcagccgtccattgtgtgggggggggggtcggcgcttgttcctgggcaggccatggggcgatgtcagtgggcattggtcttgacatttccaagcgaccactctttgcggtcggccgaagtttaaacttgccgactgtgtatctgtgggtacaacaagtgttggcgctcctgccactctaacccgtggttccggcccctgattgctagtgtcggtc

SEQ ID NO: 100048 - DNA, 387 bp, Zea mays
  Clone ID: MRT4577_22758C.1
gaccaacaggcaccataaaagggggaatccattaccaccattggaccaccattgaaagccaggatattttccttccttgaggcggctggttttttttacatgggtggttaacgcaacaattttccttaaatgttaacaagctctaatagtttccttttttccccaataccttcaataaatattagcttaagtttgtgaaaacccagtttttaaaccatttaggcttaaacaggcaatcgcagaaggcaacataccttaatggcccttgtggggtaaacaatcgccagccttatttttggtgcagtaatgggtccaaacaataagggaacaacagttgaagaaactggggctacctgggatcaaccaagtagttttggcaaacctttt

SEQ ID NO: 100049 - DNA, 233 bp, Zea mays
  Clone ID: MRT4577_22759C.1
ttcactatctgatctacgccagagtgcacggagccatgggggtttcactacatcgcgttgcgaggattattacggatggagttgcagaagggccgccgaaccgtgccacaaagcaaggaccttcaggacatgctcatggcgcaacgctccaaaccggcctagaacgaaaacaggagactgtacacggacataaaaactgaacgcacaggcgacggaacctaccatgacgacac

SEQ ID NO: 100050 - DNA, 427 bp, Zea mays
  Clone ID: MRT4577_2275C.1
ggcagaggttgggtctacgactacttccgcagttttctcctaaacacatttgctctgatgtggtttgtcaccataactggcgctgaaccgcgctggtggcaaggctggaaacaagggtgctgaagctgctcttacttccattgagatggcctctctgttccggcatcacttaggctgacactttgcatattctggtttctatacacgagccgctgctccagcacaactgtcacggcgtgtgctagggcagtggggctgtcgccaaggacatgcagcttgtgaagcagtgctggagccgtccccatcgccgagcagctcgtgagggtaattcaagcacgctaatgcagtctggtcctacaatagcgatccttggtcttcacctacatcttcacctaccgaacatcaggagaagttttattcccttatc

SEQ ID NO: 100051 - DNA, 558 bp, Zea mays
  unsure (1)..(558): unsure at all n locations
  Clone ID: MRT4577_22760C.1
cccacgcgtccgcggacgcgtgggcggacgcgtgggtaacaccgcaagggcttccaagtccgacacgcttgtcagcaacaagatgcacgcacttgtggagtacgagacgtcgcagcaagccgagaaagcagtggagaagctgaatgatgaacggaactggaggaaagggctccgtgtccgcacagtgctcaggcgctcgcccaagtcagtgacgaggctgaagcgtgcagacttggaccactttgtggcctccgacgacgactcgccgcactcctcatcagactccccgacggcggactgctcttcacctgccgaggcagcggcggctcacgctcacgtctatcaccagcagcagcaagaggagcagcagaatgggggcaagcacaaaggcagctgggctcgaggacgagctggcacggcgaccaagctgcacatcacggcgccgcagagcccccagtcggctcccgcgggcatggccggcggccacttcgacccgaccagcccccgcccgtcgtcgtcgtcccagaagcagtgcccctncagcccccgcagcaggca

SEQ ID NO: 100052 - DNA, 212 bp, Zea mays
  Clone ID: MRT4577_22761C.1
cgacctcgagaacatcgagctggtgaaattggcttctgtttcaaacagtgacatgtcatactatgccaccatttggacttaacacaggctttatccttctaaggggggaatattgaatacaacatgcgtgaaaatggaatgaagatacaaagaaatgggcggcccgtctattaggaaccaaactaacgaacatgacaatgcgaggacgtact

SEQ ID NO: 100053 - DNA, 602 bp, Zea mays
  Clone ID: MRT4577_22762C.1
gaggctggccgggctctgccgtcgcctgtccactttccccgtgcttttccgccgtcgaggccgagtcccagtgcgaagagactccgactcagatggccagccgctgggtccggctcctgaggatgatacccgctgttcgcggcgacgggcagtggccggcggactctgacggtttcagctcttacggaacatcactggcaacccgcaagtcagggcaaacaaggcagggagggcagctggtgtgcttgagaaccatgaggaggggagacggtacgccatgcatgggctaacaagctttgtgcacgacacgactcctgagatcatgcctgcaggtaacaaggtcgttactggccctaagagaagcacgatgattggcatactactactactactagctactggggattttacactttgctggccactaaatacgttggggacatccatgacctctaaaggtactcagagcgctcggggatgactcgctgtatgcttgacggtggatgatttagatcgaccatgccttgacgtaaagtatcctctaggatccaggatatgcacggacttatggatgagagttgtcatttggatacttggcagat

SEQ ID NO: 100054 - DNA, 479 bp, Zea mays
  Clone ID: MRT4577_22763C.1
aaataaaaacctcttttttgtacaaacatggtttatttttatgttcaacgccaacttattattttttacttgcctatgcaatgcaacgagaaacaaaagacacacatgcaaaaaaggaggatcaatcaatgcgaagacgcccaccactatacgatccgaaagacaaggaaggggcatagaaaaaaaaaacaaccctagctgccggggaaaaaaaaagaggcggaggcccaccccctgtcgaacacaaaaacaaaaaagtggaaaaaaaggccctcgagcgggcccttgccggaaacaaagggcgggacaaaaaacccgaacatggaaaaaagggggaggcggacggtctaaaacggcttcaccttgagccccgcaaaagccaaagagggctcaaacaaaaaccagggggtggaaaaaaaccggcaggggacaccggtttaaccacctcacccaggggcccgaaagaaacccgggagccc

SEQ ID NO: 100055 - DNA, 228 bp, Zea mays
  Clone ID: MRT4577_22764C.1
ctagaaacgttctaaacattctctaggccagtggcacacttaaggagtagaagctgtgctaatcgctccataccctattaaaaatctacacaaaggcacccaccatcagggggctgaaggccaacacctgcagatttatataaatcccgcatgcgggaatggcaaaagttgaagcaaaaataatagggtgtctgaactactcacatcatgctagcataactaaaacag

SEQ ID NO: 100056 - DNA, 491 bp, Zea mays
  unsure (1)..(491): unsure at all n locations
  Clone ID: MRT4577_22765C.1
agcgcttcgctcctcggatccgccgcgatgttaccttggcttattataagtacgttgtagcagcgacgaatcgtccgtcatcttccccaactccgatccatagtaggccagtccagaacacgaggcggcggctatgggcggacatggccacccttactcgccggcggagctggagctgccggggttcgtgccgcagcggctgtcgcaggcccagatcgtcgcgcctttcgcgggcaccgccgtgttggccgtgctcggcgcctggctcgtctccgggagatgcggcggcggcagactatccaggaccgaccgctgctcntggggctgggggctcttcaccgcgctgacccacctcgtcttcgagccacccttcctcttcaccccggacttcttcagcaaggagaacccaaactacttcgacgacctctttaaagagtacagcaaaggtgactccagatacgccgctagggacaccgccatcgtcgcgcttg

SEQ ID NO: 100057 - DNA, 597 bp, Zea mays
  unsure (1)..(597): unsure at all n locations
  Clone ID: MRT4577_22766C.1
ccggccgggaactggccaattggcagtggcacgcagcgatctggtgtgctgagagctaattaatactcacagaggtcatcgaagtagtttgggttctccttgctgaagaagtccggggtgaagaggaagggtggctcgaagacgaggtgggtcaacgcggtgaagagccaccagcccatgagcaagcggtcggtcctggatagtctgccgccgccgccgcatctccctgcgaagcgcatgcgacgcaatcaatcactactggcctcggcgaccgggatctgtgcggagtggaggcggtgggcggggtttagtacgttacgtaccggagacgagccaggcgccgagcacggccaacacggcggtgcccgcgaaaggcgcgacgatctgggcctgcgacagccgctgcggcacgaaccccggcagctgcagctccgccggcgagtaagggtggccatgtccgcccatagccgccgcctcgtgttctggactggcctactatggatcggagttgnngaagatgacggacgattcgtcgctgctacaacgtacttataataaggtaacatcgcggcggatccgaggagcgaagcgctggct

SEQ ID NO: 100058 - DNA, 576 bp, Zea mays
  Clone ID: MRT4577_22767C.1
atctacgcagcgctctggtcggctggtcctcatccctccatacgcgagacttcttccttgatccttccctccgccgcgcactgtggaagtctctggccgcccatcctgcgtacgccaccgctctactcgatcttcagctccagcagcgcgatattttttcgctcggcgtcgtcctcatctccttccccgacgctgcgctctctctcttggtttcctgctcgccgctctctctctccctatttatctcacacgcgctcaacttccttgcttcaactttctggccgtgcgagcgcagtcggccgcgacagccaacgcgtgggcgtgcggaggcgcgcgccatggggctggacgtgcacgtccctggcaggtttcagctccagcgcgtcgtcctccatggccgccgtgtgctcgccagcgagctcctcccttctccctgcagcttgccgagctcgccggcgtttctcccgctccctggtggccgagcctggcccctgcgccctgctgcagcccgtcgtcaccttgctgctcgccgtccgcgcgccacttcgcccatggcagccacgcctgctcccttcg

SEQ ID NO: 100059 - DNA, 308 bp, Zea mays
  Clone ID: MRT4577_22768C.1
ccagtcccctgagagcctcggtcctgcccccgacagacacccccatggacgcaccggcggaggtgtacacctcccctccgagaggcccgccacgcgccctcacccccaggcgatgaaggtcgcatgggcctggccccgccgacacgaccgtcgacacccggctcacgccacgtcccccacctcgctctgcgtccgacccctgtccttccctcaaggaatacaggaccacgtcctccaaggaaggccttgtttcagcacctcctaagacgcgccccccaccctgcccccccctgccgcccacccccccc

SEQ ID NO: 100060 - DNA, 553 bp, Zea mays
  unsure (1)..(553): unsure at all n locations
  Clone ID: MRT4577_22769C.1
ttttgggtgtggcaacaactgatggtgtagttactaagaatgttgccgttaatgaaggtgatgaccttatgcttggcatatttgataagttcatgtcagaggaaccagaaacatcttcaacctatatgcgcactgagttagatttgtatttggaagagccaacacttccaagaactcaagagcttgacattatttcttggtggcaacacgctggaattaaatacccaacgcttagaaaaattgctcgggatatcatggcaattccggttacaacagtggcatcagaatctgtttttagtactggagggagggtaattagcccacatcgaagtagacttgctccaaaaacagttgaaggcttgatgtgtatgcaagcttggtctcgtgcagacatgttaggtgatcaatcttgttttataaatgcactaacaacttgtttggaggatgaagacgaacaaatggatgaaccaaatgatgctctataggttgatgacttgatgttaaacaaagcagcaggccagcagcactattattggcgttnggacttgacagc

SEQ ID NO: 100061 - DNA, 717 bp, Zea mays
  Clone ID: MRT4577_2276C.1
ctcgaggccggccgggactacatattgaccacaccactccgcgctagctgacgacgcgactgcgtcacataggcgcgatgtaccacgacgacgacgcaggcgccacacaatgtccatcctcagctctccgccgccgtgtcccggctgcacccgctccggggctacgccgcgtccaggtccgcggcgtcggcgctgtcgtccgtgacggtgaccaggaacaggtcgtccgcttagggcgatccgctgcgactacatctacgtaccagccaccaacctgatcatgaagacgacgacgacgctcatgctgagcctgcaggctggtcggtctggcgacggcagagaactgtaagaccacctcggcattgaacgtgtaggggagatgatccgggctgaagaccgtggaacccggctcggtgaccctcagaaatgctctggcatgcttagccgtaaccaacagtatgcgcggccgccgatcggtgctgctgcctcgagaacaaagactggcactcgaggcatgatcattgtgatacaaccgacgaaccacgggactgtgcatcatgctgaaccttcatcactactggcgcacttgaggatggatataccgaggaaactggaaagcgcatctctctctctgaccaacaatttgtcgagtgtgcattggcattctacaatctgttgtgccacggaggacttccatcccaggcctttgaatacatc

SEQ ID NO: 100062 - DNA, 440 bp, Zea mays
  Clone ID: MRT4577_22770C.1
tatgcgggagccgtgtacgggagctgaaacggctgttgtcttaccccctagtctgcgtcaactggcacccccccacaagccagcaagatggacggattcgaggaccccttcgtcccagaacctgcatgggcgaggacgcaatgttcatccgctcatcctgtttatgctggggtggcgccacttccctagccgaccctggagggacagtacgcgtacctgggagctcaggctgcaccagtccaaggcgcacgctttgaccttcaagacggttactacacggcgctcgtgctggacttggagctgcaccagcagctgctgagcacgcacctgacgggcgacgacgtgaccgtgacccacgaggagggcactctcttcaagatcgacgtgaacagcactctggtggccgtcatgctgggcccagacctgagcgcgccctgcgc

SEQ ID NO: 100063 - DNA, 264 bp, Zea mays
  Clone ID: MRT4577_22771C.1
ggagatgagggggttttacatttaaaagcctttgtcacatatgaattgccatgtacacctgagatctttttagaattaaacgcccaaaaacaaattaaccgtactcatatacgcccagcccttgaaccactgggttgcttatgcaccccaagactcatgcatgaaaagagtggtggtctctttgggtttgaaccaaacagaaaaggtttaaggggaacccgggatattgttgacaggctccggaatatttggtgggctcggggg

SEQ ID NO: 100064 - DNA, 449 bp, Zea mays
  Clone ID: MRT4577_22772C.1
cattataattgctggagctccggtatttcaccgtgcatgcttgtactcttgtaaaaatatccagaggactcttctgctttatgcaagcctaaaacaacccaaaaggcagcttgaagatcgtattctcttctccgcacacaggcctttctgtgggttaatagttttgcggaccaacaatgcttacataaacctgttgcctaaccctatgacatctagcatgaagcattcttctgaactcattcactttgatgccatgattgatccttatgactaaaagcgcgctctacaccaaatatacttgtcatttgtgaatcctactatctgggacatggtgagaatctagcacaagtattttcatgcgaaaacaggaaacccactatttaatgcttgtcacgattgcacatatgggaatcaagtataaaactatcacatggctgggtcatgtcaaa

SEQ ID NO: 100065 - DNA, 320 bp, Zea mays
  unsure (1)..(320): unsure at all n locations
  Clone ID: MRT4577_22773C.1
ccggcgggacccacacatccgctcacggaagcactttccgagagactccaatcnnctncacccgggccctcaggaaagtcttccgggggcatccccatcatatcatctccccctacctatcctcaccccaagaaacgtagggtctccgacgcccaggacccaaacttcttctccaatcctgcacccacgcggaatgcttcccctgctacgacttctacctaaaccctaagagctgtggcgttttcaaccttcttcccaccttctacagaaaaccgattaattaccccagaggaggtgaagctttaaaagcttcctaacca

SEQ ID NO: 100066 - DNA, 561 bp, Zea mays
  unsure (1)..(561): unsure at all n locations
  Clone ID: MRT4577_22774C.1
cggccgcccttattttttttttttatttnnnnnnggccaatctcctatatttaacaaaaccaggaaccaaaaatggcgggccagaggggcggaaaaggcaaaaaaaacaccccgcgccaaacgaaaaaaacaggcctaaatcgaccaggcaaacgaagcaagcaaaggtcagacaaggacccgaacaagacgagaaaattcacggaaccaccagggagccctcaagcaaacacagaaccagccagacacatcaattcttgggggcggaagccaaggacacccgggcaccagaaggaaccctcttccccacacccaggaggacccccacagccaccggaggccccagggcacggacagcaaagcgaccaagaggaggagaaccaaaaaagggccccacaaccaagggcctagggggaaccaacaacaccaaaccagcatcaccaatcttgaggaagaggggcaccgacaccgggggagaaaaccaaaaaaggggcccccccacggggggacagggggagaaacccacccaacacaaaaaccgacaccctaaaggggaaaaag

SEQ ID NO: 100067 - DNA, 238 bp, Zea mays
  unsure (1)..(238): unsure at all n locations
  Clone ID: MRT4577_22777C.1
tttgggcctttcgngcgggcgggcgggcgggtgctcncgacggaccctccggnggtgccagnctgaggggntgagccccttgtgggtgtgggacgggcagganggnggngctttttctgctgngcgnccactcttgtcggcgcnggggttgttcttcggtggtcagaaccctttggggggctgcatccttttggtcctcctcgtttgtcgctcttggtgggtgtctcctttgggcctg

SEQ ID NO: 100068 - DNA, 665 bp, Zea mays
  Clone ID: MRT4577_22778C.1
cagacgcgaattggtgagaagcctaggaaaagaaaatccggagcgccacgtacccctttctccttcctccctcccgcagctgcgaatctcctccggcgctgcctccttcctcggatcaatcgcatctattgcgaacgaccagccatggccgggaagctaattgcaaaccttattgtcatgggctctgcgattataggaagagctatgcttcaggcataccgaaaagcacttgaaaatgcaaataaaactggtgtggcccatgaagcaatcaacaatatccgtagggccagcaagacaatgaccgagcaagaagcgaggcagatattgggtgtgactgagcagtcgacatgggaggagattgcacagcggtatgacaagctattcgagagaaatgcgacatctgggagcttttacctccaatccaaggttcaccgggccaaggagtgcctagaaaacgtgtaccaaaagaacaagcaagatggaactcctacctgaaattcgcatctttagaatccactgcctagatactgtaacctactatacgccctttgtatcaaaaaacgtataatattttgatacagagggagtatattctttcccccctcttgagaatgtacataccaacaatggttgctgctgttgtatcatcaataaaaattgagcgc

SEQ ID NO: 100069 - DNA, 182 bp, Zea mays
  Clone ID: MRT4577_22779C.1
tcgtcgaagctgcgtagcgacaccacgttccacactgatcacgaaccatccaccgaccaaccagcgaggcgcaccatcgcacctcagcggcaaagcagactggcgtcgactcagccatgatggcagtgcttcgcacgccgtggcggtggcgccgcccctcggcgccgcggcactcttcagtc

SEQ ID NO: 100070 - DNA, 276 bp, Zea mays
  unsure (1)..(276): unsure at all n locations
  Clone ID: MRT4577_2277C.1
agcgggcaaacgaggggaggaaggggcncaacagaacaaaggagaccaagancacgggngccaangcnncccngaaancacaagccccncnggggcaccgggccgcgcnnccagaaggcaccgnngnggacncgagaaagcgagagccggggacgnnggaccncnacncggaaaaaaacaacagcncnggcaggggngnggccancangnacngannnncccnnnncaacagnngncgngaggcnngaaaaaaaaaaaaaaaaaaaaagggcggcc

SEQ ID NO: 100071 - DNA, 320 bp, Zea mays
  Clone ID: MRT4577_22780C.1
aaaaaaaaacataaaaaaaaaaaaaaacaaattaaacaaaaaaaagaaaaaaaaaaaaaaaggggaaacaataaaatgaaaaaagagaaccataaaaaaacaaaaactatataaacaacaaaaaagaatatctggatagcgacaaaaacgatgtcgtaacacggcgtctttatctttttcgtttacgttcgcgacactttttgggttgccacgtcgcgtttatttgtggttgggtttgttgcatactacttgactgtctcatcatgaggaagccactagacttttacaccctgtaaaatgggaaaaccccttggttctcc

SEQ ID NO: 100072 - DNA, 277 bp, Zea mays
  Clone ID: MRT4577_22781C.1
ggtggggaaactgcgatgggcacactgggtgatcgggcagatgtgaggacgagatccagagatgctgtaacctagtggatctaaggccaccatgtgatagactttagcatgaactaactgctgagaaggtgcactgtactatgttgtagtgtgactgtactagctcctatgatgattgtttgactagaagactatagagttcaaaagcagtctgccaaggctaaaaggctgtttcaggctggtgaggcttacgcggtaaggtgtgatgaagggatgg

SEQ ID NO: 100073 - DNA, 883 bp, Zea mays
  unsure (1)..(883): unsure at all n locations
  Clone ID: MRT4577_22782C.1
cctcgaggccggccgggaagtctcttgcgcactgctttgtaccccagatctgactttgagcggtctgtaacttttcaattgattcgtagattctcatacaatcagtcaatatgggcggccaaaagacagccattctgtccgtgtacgacaagaccggtcttcttgacctggccaagggactgcacgaatgcggtgtccgcctacttgcctctggcggtacagccaagatgatccgccaggccaacttcccagtcgaagatgtctctgccattaccaaggcgcctgagatgctcggtgggcgcgtcaagacgctgcaccctgctgttcatggcggcattctcgcacgcgacctcgactcggacgactctgacctctctgcaaacagcatcgacgagattgactttgtcgtttacaacctgtaccccttttctgagacggtcgctcgcatcaacgtcacaatcccagaggcagttgaggaaattgacattggaggtgtgactctgctcagggctgccgcaaagaaccacgcccgcgtcactatcatcagcgaccccaacgactaccatgacctcctcactgagcttaagaagaacggcgaagtctcggagaccagcaggcagcgttatgccctgaaggctttcgagcagacttcctcatacgataccgctatttcccgagtttttcaggaagaagtacgcggggcgacggtgtccagtaccagaccctccgatancgtgccaaccctcaccaaaacccgcaactgttctcatggcagagaagcccctacattcanggtgctctgcggntctccaggatacatncacttgctcgatgcgctcaatgcatggccgctcgtgcaggagctaacccaggcactgaacta

SEQ ID NO: 100074 - DNA, 638 bp, Zea mays
  Clone ID: MRT4577_22783C.1
cggacgcgtgggtgataacaatgctgttggctattttgtaaagcagggtttcacaaaggagatcacattggacaaagaaagatggcaagggtacattaaagattatgacggaggaatattgatggagtgtaaaattgacccaaagctgccatatgttgatgtggcaacaatgattcgacgtcaaaggcaggccattgatgagaagatcagagagctttctaactgccatattgtttattcaggaattgattttcaaaaggttagatttttccctcatgggctctactatattggggtgtgcttcagctaaacatcctccccttatttttgtactctggagcagtgttttcaagtcgtccgactaatcgcgattaatcgcaattggtcggcctaatcggtagcttgcatcggatcagtcccaccaatgcgactagaccgaccagaatattagtcgtccgattagtcgatgactaatcacgattagtcgtctaattagacatgggacgaccagtttaggcatgactctgtagatgggctttagctagggttgtaacttgtgggctgcaatttgctttgtgggcttcagggttgagatacttgagaacgctcaggcacagtaccaggcttccctgtcgcgc

SEQ ID NO: 100075 - DNA, 353 bp, Zea mays
  Clone ID: MRT4577_22784C.1
tcggcgccggaagagaagaattctgtcgacaagctcaccgactcaggcagggccgtaagcgaggagtatattgactgcatgatcattcaaacgctgaacgactcgaggcagacgtatgactgaaaaaacgacggaccataccgaaaccttaacagagaagatcaaggcccactgctatggcaaagacccgctcttcaccctgaatacgcactatctactgttttcgtcaggttgaagatactaccaatcgataccctatcagctgacgtccatatacacgatcgcttactagcccggctaatagagatcagtatatgagcctccggaccaatacctgtatcagcagcagccca

SEQ ID NO: 100076 - DNA, 299 bp, Zea mays
  Clone ID: MRT4577_22785C.1
atgccttggtcaagcaccacggccgacggcaggcggcagcagcagcggcgaacggtcgagtccagcctatccgaacccactatcgttgggagggagcctggcctggcccgggtcactccgatgatcgtcgccgccctcgccgcgctcgccgaggagaacggctccagccaggccgccatcgcgcgccgcatcgaggcggaggcccgcggcgacctgccggcctcgcacccggcgctcgtcgcagcccacctctcgcgcatgtccgccgccggggagctcgtcgccgttgcggggggaaa

SEQ ID NO: 100077 - DNA, 190 bp, Zea mays
  Clone ID: MRT4577_22786C.1
cgtcgaccttgagaacaatatcccggccagctcgctgcccggtctccataatggcaccctttgcgcccagctttatttaatcatcggccaccaccctcgcagaagcaacttttccatgattcaccaggggcatcttttttttaacaccggacacggccttccactcttcttcctttaccgctatcccctg

SEQ ID NO: 100078 - DNA, 478 bp, Zea mays
  Clone ID: MRT4577_22787C.1
tttttttttttttttttttttttttttttttttttttttttttttttttttttttttttttttttttttttttttttttttttttttttttttttttacccggggggacaagaaccaaagacttggaatacaccaaaagccacaatggggcaagggggggaaaacaaaaaaaaaccttgggggggccggggggttaaccaaaacccctccattcccccaagtaacacctaaggggtgggacgggaaggtttaaaaccatggggaaggaaggggattggaggggtttgaaacccacacaaaaaaacttttaaaaaattttttccaaacccagccaaaccatgggaattgggaaaaaccgaaaaaggccttaagaaaaaaatttcctatttgaacaagtccagtccaaaagggacagcaaaaaagcggagaccactccttgctaaaggagcaaaaaatggccacccaaagcaattccaag

SEQ ID NO: 100079 - DNA, 347 bp, Zea mays
  Clone ID: MRT4577_22788C.1
gaccggaaatgtattttactaaataggaaatgggcaaaatgattaatgcgtgttggggccacggaatggacatatttgtttgtcagataggaaagggaagggaccaaacacgcttaacttaaaaagttcggatccacttttccaaggagctataatttcctcccttggggttcagggtatttaaaaggggtaaacacatggcccacgtgtaagggaaaaatggccaccgatacaaaccttgttaaatactcgttaaaagggaaagaatccggggtatgtgtatgttctttttggatgacgccttcggggtaaagtaagggacaatgtactttttaatagtggttttg

SEQ ID NO: 100080 - DNA, 180 bp, Zea mays
  Clone ID: MRT4577_22789C.1
gttttgattgaaggtgcgctctgtagtcatggtgttagtgctggggtcatcctcgactccagcagagcccatgcatcaaccagcatgcactgcggatcgatggtgcgttgttacccccgttaggttttattctaagacaagtcctaaggaaaaaaaaaaaaaaaaaaggactctaaggcc

SEQ ID NO: 100081 - DNA, 762 bp, Zea mays
  Clone ID: MRT4577_2278C.1
cggccgctcaggcggcgggcggaaacctagtctacctgagccaccatgtctgcctcgtcgtcctcctctctccctgtgccagccgatttccctcttgatctcatcaggtgtcccttctgcggcgcggatctggaaaccaatgtagcaagaaccgggagcaaggcggggcagcggttctacaagtgtgtccgctatgatacggcctacgtcagaaggatgactccgtaccagatcgcccgtgctcagcagcaagcgggggtgctccaggtccagatgcaggcaaacccggccggcatcgtcgccccacctgcaaaccaggctcaggtccaggcgaaccagggtcagaatcaccctctagcgacgccggagaccgttttggtgaaccagatcttcaggcccatcgcagctgctgcttctggttctcaggcgctgggggcaacagctttcatccttgccgctagcaacatcatgctcactctgctgcttctgttgttcgttgtggccatctattttggcggcggtaactagttcgttcttagtacgacatacgttgacatttcgggaagggttcttagcaaaagtgtgtgtgtgatgctcgactgcggatttggttgttcctagtttgccttaggcaatatgattagggaattaatggtgttcaagggtggctccctttacctctaagtctgtttaccagaacatgtaattcatactctaatgtaacgcactatctggaactaaggaagctttgctgtgttagtt

SEQ ID NO: 100082 - DNA, 619 bp, Zea mays
  Clone ID: MRT4577_22790C.1
tccaatacaatggctaggagaagatggtggtttgcctaacaataggatttgtagtccaagtcgattgtttagccaatttgcatgacagattttggccttcacttgcgctcttcttttatcaacttcgcattattgccctcctagcgcctgttttatctttagagcaccttcaacagctcctggtattttttactgccaatatttctatattgggcttctctcaaaagtctaaaagctcaaaaaaattatactcaactccaataactgcttaaaaataccataatgcaacccatctagcttagttaagcttttccttaactgctgcactgagcaaatttgtacagcagtacgaaacgaaatatgtaccgcagcagaaaaataatggagcacagcgcttctaggcgcaggaaatgaaaaaaaaacgcgggcgtcttctaggcacaggaaattaaaaaaaccacagatggggcgtcaggggctttggttttggagcaccaaataaattgagggcacaggagctgttggactaagtattttcacctttactcctaaactattgctttgagagtattaggtgtgcagcggcgcaaagtgggaaaaaaaagtgtgcaaatatgca

SEQ ID NO: 100083 - DNA, 349 bp, Zea mays
  unsure (1)..(349): unsure at all n locations
  Clone ID: MRT4577_22791C.1
aanngaaaaacaagacaaaacctcggggatttattttaacttgggcaaaaaaaaaaaaaatgactgctcttggcatgctgagataaataagaactgtcacttgagtggcttggggggtcactttttcgtgccccccacccgcgggccacgtgaggcactatgtgcatataatacccgccacaggtaaaaaaaagatcaaccgtctaatggtgaaaacttcccctcaaaaaaataatattattttaaccacccatccacaatgccaaaaccccttttctttttttttctccggaaaataacctggcataattttttaaccttcctaccccttttttggcaaggggggttt

SEQ ID NO: 100084 - DNA, 134 bp, Zea mays
  Clone ID: MRT4577_22792C.1
agcaggggaacaaaagagtttgatttcccataatttgatgctgtgatttggtttcctcaggatgtgaactgtagaacattccagttactggccttgaatggttctgggaatataagaatccctgtctgtctttt

SEQ ID NO: 100085 - DNA, 176 bp, Zea mays
  Clone ID: MRT4577_22793C.1
agcgtcgcctacgccttcgtcgccgccttcgggtcctcctccctcggcctcggctactcgctcgtcctcagcgaaggggttcttggccccggcaatcccttcggtctcggcgcgcgctggcggcatcttcctaccgctcgtcaagtctctctgtgaggcatgcggctcgcgcgccg

SEQ ID NO: 100086 - DNA, 325 bp, Zea mays
  Clone ID: MRT4577_22794C.1
cacgcgtttttctacgcccggccgaaggcgaggggcctctttgtcgatttggtgcagctgtcgtcggagagatggacgacgtggaggagggtgttggccggccggcggcgcagttgcagtacacgacgaagcgggctgcgagctcgccgtggggactagggaaggcgacgctcttactggcgtaccagagcttcggcgtcgtgtatggcgaactctgcatttcgcccgtctacgtgtacaagaacacctattcggggaaagctgcggagcaccaggaggaccaggaagatccctggggtgcttgcccgggtcttctggagcctga

SEQ ID NO: 100087 - DNA, 301 bp, Zea mays
  Clone ID: MRT4577_22795C.1
gggaacaagaaaaaaaaatcccggccgggggccccaaaaaaacccccccaaaaaagtaaattttgggaaaaccccatgttcaaaacaccccaaatccagggggccccccgggtttttttacacccaggggaattaaaaaccccccggggttccctatcctggcatttttaaagggaaagcaaaggggcttccggcaacaaaatttgttaccccctggggtggcgaaacagggcaacaaaagaccttgcccccggggtttcgtccaggcagcaaaaaaggctggggggcagggcgtttcccc

SEQ ID NO: 100088 - DNA, 464 bp, Zea mays
  Clone ID: MRT4577_22796C.1
aaaaacggccagctttttcccccatttttcccgcataaagccccccccggttttcattagccccaggggaaaaggggaagacccccccaatcgggaattcggcatagatcccaatttaatcttcccccctcccccgggccctaaagggggccccagattccccggccccaaaaccccccccaggggcccctgggggggggggcaacccgattcaaccggccccaagaccagggggggggggggcccaaaaaggggcccttcccatccttttaaacagccctggggtgggggaccccggcataaaccccttttttttttaagggggccctttttgcgttttggggttcccatcaggcccggggaacggccttggctttggggctctacccccctgggggcttgacgggcctgaattgggagacttttttgccccctttttccccaaacccgggcgaggggggggg

SEQ ID NO: 100089 - DNA, 399 bp, Zea mays
  Clone ID: MRT4577_22797C.1
ccctcgcgtacgcgcacgccttcgtctggacgagggacaacctgagagggtttgcttgcacggatcagatgctggactacaggcttgtcttgctgacgaccctgtgaggagcgttgtttgtccgatctgcgctaagaccaacatggtcatggcattgggtgagatcttcacttacgcgattgaccactgctagacctgctacatgcgaacgtcgcttaccatgacacatctgcctaacgatgccaggcgtgcgactaactaatggaaggctgtgactaacattaagacaagcgcacctgacatttgtacgggggcggaacggtacttgccctaaggctcacaggcgatcgaagctgcggactcaaggcacatgctgtgttgctcaaaatgacgagacct

SEQ ID NO: 100090 - DNA, 685 bp, Zea mays
  Clone ID: MRT4577_22798C.1
ccggtcgcctcgctcccgtcgcttgacctgtactgtccccacggagatcacgacacgaaccgagcaagaaccgcacgagccgagcccagcagcaggatggcggcggcggcgagcgggaaggcgccgtcgctggtggtggcggcgagcatgggcgcggtggaggcgctcaaggaccaggcgggcctgtgccgctgggactacgcgctgcgctcgctctaccaccgcgccgccgccgcgccccggatccgcgcgctgtccgccgcgctctcggactccgtgtccgtgccggcggacgcgcccccgcgggcgtcgcggccaccgcccccgccggcgccgcgggacgcggacaggatgcgcaaggcctaccacctcgtgtgctggggccccaactgatcggcggccggccggcgggcgggcgggcgccgactgcatgcctgtagctgtagcgcgcgcgctgaccaaggcctggctgggtgtggttgcctgtagcttcttcttgttgttgttgttggctcctctcgtgtgtgtgtgtgtgtgttgctctcgctccgtccatcgattccatccgtgtccgtcggcagatgagatgagaatgagaatgagaaggcgatgtgaatgctcttccgtcgtctgggttccggagccgaggatccctaaaaaaaccaaatttagtttgggagctggc

SEQ ID NO: 100091 - DNA, 594 bp, Zea mays
  unsure (1)..(594): unsure at all n locations
  Clone ID: MRT4577_22799C.1
aagaagcaatcgaaggtattatactgttgaaagctgaaacaacacagtatcaaatcttaaaggtactattcaaattggagtgtgaaatgacacggtatcaaatctcaaggcatataaatacagttgaagcagtatggtatcgaattctcccaccaatagtgagcctacatttgatggcgtcatgaaatttcgtcttcatagtatgacaggatcattccctataaattatccctgtgtgttcacagatccaaacaagagatttgcgaagtagtacatctggcgagttcaagtcgattataacaacttaacatccacatatccaacaaaacaatcaacataaggacaggctgaacagcagtaaaaaccaacagacagttgaagacaaagtgtgcctgaaaagacagggaggttacacttgagtacaaaatacgtgtggatggttagatgatctgctccagtagttaatgtttaaagaacaaagaacatgttgtttctaactcctagtttggctcatttgaagccgtccaagtagaggagtgctccagtaatctacttcatattttacancggcccattgtacattattaaaccatg

SEQ ID NO: 100092 - DNA, 328 bp, Zea mays
  Clone ID: MRT4577_2279C.1
cccttcgttcaataaatatacgacgccgccaaaaaaaaaaaaaaaaaaaaaaaaaaaaaggaaaaaaagggaaaacaattataaaaaaaaaaaacttaaatacaaaagcataaaaaaaaaaaaaatatataataaaaataaaaaaaaagggggggccgttttaaaggttttaacacttgcttacactgggtaaaaccctcaattgttttctatttggtggacttaaatcaaattcccttttccccagttaaaaacaatggccaatgggaaacccctcgtgcaccctaactaaaactgtttgaccaaattcccttttgggaagccgcct

SEQ ID NO: 100093 - DNA, 260 bp, Zea mays
  Clone ID: MRT4577_227C.1
tgggaccctcgaggccggccgggccgggaataccttacccgattccgcctgccgatcacgttctgcctcagcgcatcggacgccgtgacagagcacctcgacctcatctatatccttcagctttcaatacatgcgtgcgacctctatcgacaaagcggaggatgccggcgtagctcccaagaagatgacgattggcatgtactctatggcggagatcatatagatgctgttctccacatagatgactcgacgaccgtcga

SEQ ID NO: 100094 - DNA, 237 bp, Zea mays
  Clone ID: MRT4577_22800C.1
gttgggtgtttttaaatttgttttgtggttgcgaaaataaggagcacaactaaacggttgtagttcattggaacatggcacggcgcatggcagggttaacaattcaatggggccggggcacaagttgccacgataacgtgagctcctgatattacggcgacccgatacacctgacaagacaccagagcacagagacatgacaatgacaacggctggaaaaatatgctcaccatttcc

SEQ ID NO: 100095 - DNA, 596 bp, Zea mays
  Clone ID: MRT4577_22801C.1
aaaggccctattaattctactctctaatatttccaatgtagagaatgtcaaatacaaaacaaaccatctgagatggcgaacaccataaagacaatattccttttctgcacaaaataccggtaaatctgcatatgtttttgtatttaatttgctgtatttggttcggcaaaacgaagcatctccgcctacatgatactacccgcgtcatcgaatatttgtcgctcgctagtttatttttttgaactaaactgtgacaaataaaaaacggaagtagtatattggatccaaaaccttacagtacttaaagttgtaaccatcaataatgcaggggtttacaataggggagcagcgccgctgtttgatgggatctcggtagcagcctgggcgagctgcaacccactcaggccaaatattttgtcgcagaaacattcttcaccccttcttttccactcccccaacttcccaaactagggaggggatttgcacatatcggtgctcccactggctgttccccagctcacttcactttagatatgcgcacctgaagaaaactactataaacaatgctgatgttcagcctttggtttacctcgtgc

SEQ ID NO: 100096 - DNA, 639 bp, Zea mays
  Clone ID: MRT4577_22802C.1
ccattaagtttgcatgggggttgtcctgtgattagaggaaataaatggtcgtcaaccaagtggatgcatatccacgagtacaaagcttgagccttcaagactcgagagtcgagcgtaccaaagatggatctctatgcatgtgacttggggctgtctactgggttgacacccatgtatgctttacagacccactgaagctgtattctttgctcctttgttggaggggagaattgcagataataggggccaataagcaggggccttgctcatccctgcagtatttttgggtctgatccttgctgacttggcttttgtcttttcttttctttttcttaccttgccgtaccctagctatagaggaattgtgtagtgtctgggggcatagagtttgagattttgttttgtgccacacctgtgttactagtataagctttggtactaatgaataacgaggcctaagctcacatctactacatgaatggtgtaatattgttgaagatagaaagcatctaatgttcggtggttttggttatggtttcggttattacgacacaagattattgtgacaaaaagtgtgttttgagagataatagagctcacatctagtcaccaccccccagggggacgccgcgatctgaa

SEQ ID NO: 100097 - DNA, 366 bp, Zea mays
  Clone ID: MRT4577_22803C.1
tttctcagacccttctagacgacgcctaccgatcgcgctctcatcgcgttcgggcaggtcgcttcgccacggcctcggagacggagacgctcgccttccaggcggagatcacccagctgctctcgctcatcatcaacaccttctactccaacaaggacatcttcctcagggagctcatctccaactcctccgatgccttggacaagatcaggtttgagagcctgacggacaacaccaagctggatggacagccagagctgttcactcacattgcccccgacaaggccaacaacaccccgacaatcttcgacagcgctcttgctatgaccaagtcctacctcgtgcaccccccctgccaccattgcc

SEQ ID NO: 100098 - DNA, 1418 bp, Zea mays
  Clone ID: MRT4577_22804C.1
gcctcgccgtacgctgtcgccctcacggccctgctcctcgtctccgccgccctcctcgcgctcatcgccttcggcgtcttctcgctccccgtgtcagcgccgaacgccgccgccaccaccacagccggaggggagaccgaatccgccgacacccgccccgcgcgcccccgcgcccgccgggacctgggggaggggctgggagagcgcggcgcgcagtggaccgaggtcatctcgtgggagccaagggcattcgtctaccacaacttcctgtctaaggaagagtgtgaatacctaattggattggccaagcctcacatggtaaaatcaacagttgtcgacagcactactggtaaaagcaaggacagcagggtccggacaagttcgggcatgtttcttcaaagaggaagggacaaggttattcgagtaattgaaaagaggattgcagactataccttcatacctgtagatcatggagagggactccaagtactgcattatgaagtcgggcagaagtatgagcctcactttgattattttcttgatgagtttaacaccaagaatggtggtcagaggatggctactcttctgatgtatctatcagatgttgaagaagggggcgagactattttccctgatgcaaatgtgaacgtcagttctttaccatggtacaatgagctttcagagtgtgccaagagaggcctttctgtcaaaccaaagatgggagatgcacttcttttctggagcatgaaaccagatgccaccctggacccattaagtttgcatgggggttgtcctgtgattagaggaaataaatggtcgtcaaccaagtggatgcatatccacgagtacaaagcttgagccttcaagactcgagagtcgagcgtaccaaagatggatctctatgcatgtgacttggggctgtctactgggttgacacccatgtatgctttacagacccactgaagctgtattctttgctcctttgttggaggggggagaattgcagataataggggccaataagcaggggccttgctcatccctgcagtatttttgggtctgatccttgctgacttggcttttgtcttttcttttctttttcttaccttgccgtaccccagctatagaggaatggtgtagtgtctgggggcatagagtttgagattttgttttgtgccacacctgtgttactagtataagctttggtactaatgaataacgaggcctaagctcacatctactacatgaatggtgtaatattgttgaagatagaaagcatctaatgttcggtggttttggttaaaaaaaaaaaaaaaaactcgagactagtcctcgtgctttcggttattacgacacaagattattgtgacaaaaagtgtgttttgagagataatagagctcatatctagtacattttg

SEQ ID NO: 100099 - DNA, 117 bp, Zea mays
  Clone ID: MRT4577_22805C.1
ggactcgccctttatctgcgcattaatctctgctggttttgttgttactcgcatctttaccgctacacttaccatctccctagctcccactcctttcgctatcttcccttcctttct

SEQ ID NO: 100100 - DNA, 175 bp, Zea mays
  Clone ID: MRT4577_22806C.1
gatggcactcaggctgtcggtttgaaccaaacatgtcctcagtatgctagctagggcccacactgaaccattgtgggtgctgctgtgggacaaatgatggcacaggtgtgcttgccatgccttatcttaccaagatatctgcattataggctgcacctgaaacactgaaggttaa

SEQ ID NO: 100101 - DNA, 311 bp, Zea mays
  Clone ID: MRT4577_22807C.1
cggacccgtcggtgcaacactcttttatgagctgcctgagctgtcagcaagagtgtagctcgtttagaaacaaagggctcctacaacacattccagggactgtcatatggatagctggcatatacttactgttctcgcgttaggaacactacaacgaggtgggatactctgttatttggatcaagcgatctggatggggaacttgttcgggaggctgagacacaggcgcgttgcgcacaccacggcacacgcagttggcataacaccgcccatgatggcccacttggtcttggtagcatctttacgccatg

SEQ ID NO: 100102 - DNA, 445 bp, Zea mays
  Clone ID: MRT4577_22808C.1
gctcattgaccgcgtctcgctctctggacttggactgcacgacaacactatgcgactccataccttgcacactttgtatgccgtctacgaagacctgatcagcatgctagatgatgagaagaggcagattcacaggcacataaaaccatataactatatcaaacaaccttaaagggaaatcaatatcaccagaatgaaaacagagtgcttggttaacaacctcaagaggcaagtgagatacattcatagacacctacaactatatgtgacctgacaccattaatggtagcaatgatgactacaaaagaaacaaatgaaacttaggcttataatacttaagggtgccatattccaggatcctaatactaccttcaaaaggtgaacgatgtgtcaaataatatcaacttaagagagccattgtctataaactcaccaccttctgcac

SEQ ID NO: 100103 - DNA, 327 bp, Zea mays
  unsure (1)..(327): unsure at all n locations
  Clone ID: MRT4577_22809C.1
atactatggggcggtcgccgggctgtgtgaaggctcactcgttcaggggcncaaaaaccaaggggcaaaacatgggctcctggaaaccaaacacccgcacagcgaatggtgctggctctcgctccccaggcgagagaccggctccgcttctgcatgagcggccccctgcgctggagcaactacctccgtccggtcctaaagcgcggcaactacacccgtcgcgtggacgacctcatcgagcggctgctccgccccctcacaaacaggtgggaaatgatcggcgggcgtcttctggtgcggtccgacaacgggcccaagaagtactgg

SEQ ID NO: 100104 - DNA, 377 bp, Zea mays
  Clone ID: MRT4577_2280C.1
acataaaacaacttatataatattttattcatatttgtactaatgtgcttgataacataagaaaagatcaacatcaaatcttatacatatctattttaaaatattaaatttgttctaacagttcggattaccactttcatccctatggccagcaagatgacataagcagagttgagaaggtagagacgagagacatccccctgctgccatgaaatccatcttaatcacagaccaagccactttataaaagtgtcggtatattcatcggggcccggcgccttatcaggcggcaaggatttgatgttggcccaaatctcctccttggcgatgacctcatcgagtgccaaaagatcgatcatcggccgatgaaaggacta

SEQ ID NO: 100105 - DNA, 418 bp, Zea mays
  Clone ID: MRT4577_22810C.1
taataaaaaaaaaaaaaaaaacactaaataaaaaaaaaaccaacttacctatcaatttctagagaaaataaatacatcatttacaggtcccctatacttcaatttggttgctcatacttatctacaactattttaatttgaaaaaccttttcccttaacataaatttattatgctttgagggcctttcactcttttatcatcgcaatttctaatacccaaacagtcctatatctgtagcctcttttctaacacttacctaactttaattcactattggaccctttacaaaaccagtgcttaaacccctccggccttattgatacccctcatctaacccgacaccctcctaataccctatgccccagtcctttacatttcctcacttacctccctttccattattttctttttccccat

SEQ ID NO: 100106 - DNA, 101 bp, Zea mays
  Clone ID: MRT4577_22811C.1
gattgaccaaacaacgctggcgaaccatattgtcatttacaggctagaactcatgttcaaagatacaaatgaacttaaaccgaccccatttcctttgccgg

SEQ ID NO: 100107 - DNA, 335 bp, Zea mays
  Clone ID: MRT4577_22812C.1
tccacgcgtccgtctacctttgctgatactcgcgggtcaacatgctatgggttcggcgttctgtcaaatgtgaatcggacaaatgtaccaattaactgagaaaaattacaatatttaagcgaagtacatagttagactcaggcaggtcactttcaaacgcaatcaacgggtacgaactagtttaacttgccataagctacaatttcaattcgatccactgtgaccacttgcatatctctgaatgaacctgatcgctaccaatttcgtcaccggttgcacgagcatctattctgaagacccgctgaatgtgtgcaaaactccccattatatcaaca

SEQ ID NO: 100108 - DNA, 688 bp, Zea mays
  unsure (1)..(688): unsure at all n locations
  Clone ID: MRT4577_22813C.1
tggtacgctttaggcgacaacgacgttgacatgrgctccgtgractccggtgagtagtctcctgtgcsctasgcktcdggtgccgsccacgvggaggcgccggccagcrgvagcggctcgtccwagacwaggttcggcggcggcggtctscsctccgccsgccgggtsgcgcggcdgytggasgcggtagtgcatgcgtgtcgccgcwgwacgcggggcggccgcggcggcgggaggacgacgacgaccggscckgmaggcgkaggaggttgacgcggaaccggtccwtggtggacatgsggagccggctgctgccccgaacgctggtggaggggktcaaccgccgcytcttcttcaacaccgtcggcgccgtcgagaacwtcggcttcsgggcgcccaccaccaccgccgcytkgtcggcgcgcggcggcytcgacggcggcrggagnccaggcggcggcggcggcggcrgmaagcwgcagcagctggacgacargcdgcagywgtgtttcatgctttgattgccstcrgrataccgaccgmccttttttttttggccgtcgcgtgggatgagaatgagatcgatatcgagtactgtgtgtamatatacatatgcrgcttggagaaatvatgtrtgtttcargvgcgtaaagtttgttacacactcgaaatgtatactgtgattatt

SEQ ID NO: 100109 - DNA, 411 bp, Zea mays
  unsure (1)..(411): unsure at all n locations
  Clone ID: MRT4577_22814C.1
cgggggccggaaaacccccggcggacaacccggaggccnagggggggccaaaggggaaggagccaagaaccggcggcccggccagggcctccaggacgggggggggggcccagaccaacgcaaccggaaggggcccgttggggaacccggccgacaacccggcggacccggaaaaaaacaccgcaggggccaaggcaaccaactaggggcccggaaggggggggggggggggggcaaccgccaacgggccacggcgggggaaaacaaggggacagaaggacacggggcccccacggggccaagaaggacccaggggggaaaaaaccgaacggacccaggaggcaagggggaaggaagaagggcggcgccaaaaaaaaaaaaaaaagggggggccggcccaaaaggaaccag

SEQ ID NO: 100110 - DNA, 207 bp, Zea mays
  Clone ID: MRT4577_22815C.1
cccacgcgtccgtctacacttacgtttaggtcggcccataagaacaattactaagcccagggtcagatagtagcagtagaatagcagttctaaaacaacgatagatcagactgtggctagtgatgatatctagctaggccagctagaagaacccaacagaacttggggtagatgcattgcaatccgcagtgacgatagtccagtcca

SEQ ID NO: 100111 - DNA, 583 bp, Zea mays
  Clone ID: MRT4577_22816C.1
ttttggatcaaattcattcatgtataagattaatgggactgcaaacatcaatgccatcagggctgcagctgagaaaggtgtaaagagatttgtatatgtgtcagctgcagactttggattagtgaattatttattgcaaggctattacgagggcaagagggcttctgaagctgaattgttgtcaaagtttacatatggaggtgctccaaaatataaaacctttgactaggttaccacttatcgggccgctattgactcctcccgtcagtgctgcctccgtggggaaggtcgctgtgagagcagcgacggatccggtgtttcctcctggcatcgttgatgtctacgggatcatgcgttacagcgagcaaaactaagctgcctcattcaccgggcagtatatacatgccgctgtacttttgttacagctgtttctttgtttgttttacatgtactggtatccttctttaactcacttgtttacgagacgataaacattcaataaatatgtattttagcgacaaaaaaaaaaaaaaaaaaaaaagggcgccgctcgcgatcccacgcgtccggttctagatcgcga

SEQ ID NO: 100112 - DNA, 313 bp, Zea mays
  Clone ID: MRT4577_22817C.1
tttatttttatttttttttttattttattatttttaatttggataggttttcatctatttattttatactcactcataatactctcaaaaactctaatttcttcgcatcacactagcctttttccccctcttcccacacaaacaaaacaacaatatcactccttttgtaatcctcacccctcccaaaaaaaataatactccttatgaaaaaaaaccacccccgggcggataatattttcttcctaaaccacacaaagcataaccaccccaatatttttaaataaaaccccccccctagccgcgttgtgtttat

SEQ ID NO: 100113 - DNA, 207 bp, Zea mays
  Clone ID: MRT4577_22818C.1
cgcgcaggaatgcctgtcagtggagagcacaatgacgcggacataacggggaggtggctgtcatggctaggccggatcgagaactcggctgttctccggctgctcctcgggttacaagtacttgctggagaggcacctgaccaacacgttccagttcatcccgaactgcgggggcaccggcgactgcagggtccgctagtctgcgtc

SEQ ID NO: 100114 - DNA, 238 bp, Zea mays
  Clone ID: MRT4577_22819C.1
cggacgcgtggggtttcctttagaaaccaaactctggtaaataaatcatttgtatcttgtgttgcctttccttgtgatttatttctcccttccctcttctaagtttgcttgctcgtgtttgattgaaaatcatttgtgttgctactgaagtaattctgtaaccattaagagcaacactagcaagaagaacacctctccctcaaaaaaagattgaaaggggagtaaacaagcagggaaa

SEQ ID NO: 100115 - DNA, 315 bp, Zea mays
  Clone ID: MRT4577_2281C.1
aaggaaataagagttggatacattttttggggcctgggaccaggatcatacacaagcacatgctttcacacacgtttacatacgatagattacgtagccacgcttatttgggcattaaaagagacgcatacatacgtacgcgcgcacaaaacggggggcgctcgatattactttaaaacacgcacgcgtagcacacggggggggacgacgatacgggaggataaattagccgaaaaagggggggttttttttggcggcgggcttcttggggtacttggggtacttttttttgtagtgggggtaggggaaggggaa

SEQ ID NO: 100116 - DNA, 1287 bp, Zea mays
  Clone ID: MRT4577_22820C.1
ggttaccactcccacggtcgctctcgcttgaggcggcccgcggccttctcgaagccctccgctcgctccgtgctcgtggctcccgcacgatccccacattccttggccggctccgcgctcgtgctctcgttgggatcgttgtcagttcaggtacggtggcgatgaggtcgtccgtggcccgcctgattcgctcctcctctgcctcgccctcccgtctcagtggaaatgcattcttcggcaatgccacacccagtgatcagaggcacattgagaagccttttaaagtgaaggaggcagaacctgtgaatgtgacaaaaccttcaccacacaagctgctggttctaggaggaagtggtttcgttggatcacacgtttgcaaagaggctttggacaaaggtttagttgtctctagtcttaatagatcgggaaagccatccttaaatgaaccttgggctgacaaagttatatggaaccaaggcaacctccttgaaccagcttcattgaaggatgctatggataatgtttctgcagtggtatcttgtgtcggaggttttggatcaaattcattcatgtataagattaatgggactgcaaacatcaatgccatcagggctgcagctgagaaaggtgtaaagagatttgtatatgtgtcagctgcagactttggattagtgaattatttattgcaaggctattacgagggcaagagggcttctgaagctgaattgttgtcaaagtttacatatggaggagtgatactgaggcctggttttattcatggaactcgtcgagtgggcagtgtaaagatacctcttggtcttgtcggttctcctatgcagatggtgctccaaaatataaaacctttgactaggttaccacttatcgggccgctattgactcctcccgtcagtgctgcctccgtggggaaggtcgctgtgagagcagcgacggatccggtgtttcctcctggcatcgttgatgtctacgggatcatgcgttacagcgagcaaaactaagctgcctcattcaccgggcagtatatacatgccgctgtacttttgttacagctgtttctttgtttgttttacatgtactggtatccttctttaactcacttgtttacgagacgataaacattcaataaatatgtattttagcgacatgtctgtggtactgttttttttttaaaaatattttatcgtatcttgagcactcaactgcaacgcgttttaaaaaaaatgccgtgctgatgaagctgtttttcttgtattagtcgtgtttccagtc

SEQ ID NO: 100117 - DNA, 196 bp, Zea mays
  Clone ID: MRT4577_22821C.1
aatatattattacctgttgtgtcattttattttttttttttcttgcattcttttttattgtttgaaaagccccagactcccaaacgagagggaaaaggggttctagatcttccatcttggcaaaacacttttaatttgtggggggaagagggtgaaaaccaaatatgagagggagggctaaaaaaacaataaaatc

SEQ ID NO: 100118 - DNA, 357 bp, Zea mays
  unsure (1)..(357): unsure at all n locations
  Clone ID: MRT4577_22822C.1
cctggccaggcctccggtggcatgtcgccaagggtgcatttgcgcatggaacgagcttccatgcatggcancatcaaccaggtattcctggagttagacaggcttacattgttgtccattatagtttcaaacagtataccacagttgcttagctttgcctgggaagaatctagtttaagaaactgaatgttcatcctaagctgataccaatggtgccatgtgccaaactgtgataagaaacttgtggaagcaaatgtatctttcattagccaccggccaccgccgcaccatattgccatttgactctgcaatcgggggtgtaaaggaataggtcgtcgctaggaacgtttacaacgc

SEQ ID NO: 100119 - DNA, 461 bp, Zea mays
  Clone ID: MRT4577_22823C.1
tcgaaacaaagcagcgtccgtgcgtctggcgttcggcgccgtatttgcttgtcttcgtaggtactttgctttctggtgtgagttctagtcttgagcgctagtgagttccaacatttggtatcagagccattttatgcccaagatcctacgctactacctcgagtcagagtccatggcgatggttccgcacggcgccggggggagttcggtctccatgtcatacccggtgctgtcgccggcgagctacacggcgtgggcgatcaaggtggagtcgatcctcgacgcgcaaggtctctgggaggccgtgtctccaccagataatggcgaggtgaatgcggtgaagaacaagacggcgcgggcacagctgagcccagcgcggcccgagcacaccgtctcccagctctgcccgatgacatcttgatgcaggtctccacccagaaaacggcggcggaggtgtgggc

SEQ ID NO: 100120 - DNA, 454 bp, Zea mays
  Clone ID: MRT4577_22824C.1
aggtactctatcctgctcgccacaacgacactgggtatgttgttcggattcggcgcgggcaccaccacactcaccgtgcatgacagcaagggctacaggactggccacctcggtctcacccctgacattgccaccatttctgaactggagatcaaggagcagcggaggcgacgattcttactttacactcaaagagggcccagctggcactcggacgctcgacaccaacgtccctctcaagtgccccctctgcatccgctttgctaccaaagctggccgttaccgtatcgcccatgatggcatcctcctcgatttcaaggccggcaccacctacaagaccactgttaacatttgacgagcctgcgatgagcgatgaccaataatatctccaggacacgtgtgaacgagccaatattgaattccgaccctatgttatttagggcgacaacaccat

SEQ ID NO: 100121 - DNA, 216 bp, Zea mays
  Clone ID: MRT4577_22825C.1
caaacaaaaccgaagacggactccaccgctctcctccccatcaggtatgttcgccccccgcttcctcctcctcatcgccgtcaccgcggctgcggcgagcggcatcgcctccgctaatcccacggcggactaagacctcggcgagtaccacttcccgccggggatccttccacagggggaggtcgcctacacggtcgacaaccccaccagcgcctt

SEQ ID NO: 100122 - DNA, 354 bp, Zea mays
  Clone ID: MRT4577_22826C.1
ccaacgttcccgtcctgatgagctggatcctggaccggagcacctgcgaagaatgccaataagagctagccgagctagccaggaagagctagaaagtacaagagaaaaggaatgatcaaccaacaaagacatcgcccttttgaggttcaagtaacacccgtgttcaggaacaacgagaaacagaaagacacaaggctgagacctgtactcgtagaagcaggcggtttgctcattgtcaggcttgtcccaattatgccacccagcaggctctatgcagcgatccatgaaagtttctgcaaaaacaaccctcccgaagggctcccagggccggcctaggtacatgtaggcagcttc

SEQ ID NO: 100123 - DNA, 499 bp, Zea mays
  Clone ID: MRT4577_22827C.1
ttgggaccctcgaggccggccgattatctacagctcattcaaaaccgacattacgtgcgataactaatgccatgatgtgactccagggaagacgtcccaacaatcactgctctccagagatccgcaacaacttagacctgaaaaagaaacagaatgaaccacacgctcaccactgtccccgtgggcgaaacagaaaggacacgtatccaaagggaagacgcgcatccacgacgtgtgatcgatctcgagagcctccttccactactaaagactcataagatccaagactaccttctcatggaacaggaatgcgctgccaagcactagtcttcgcatcaccgcgaccacaaaatatgggagggcccatgccatgctgacaatcaccacaggactcacataagcgccttgtcactgaatgagaacgtcaagaagaatcatgacaccccctccgcttacgaccttgacgagtactacggcgaaagactgtacttcgttaata

SEQ ID NO: 100124 - DNA, 203 bp, Zea mays
  Clone ID: MRT4577_22828C.1
ctcttttgttcgtctgatgtcatcgggcgttctcggcctgtcttactgaatcgcagcaatggtgggcaacggagccattgtggagagcgacccgctgatctggagcgcggcaggatccgatccatgctggagcctactgtacaagctgaaacggatggaggcacaaggccgccatcacgtggacgagatcgagacttgcaccc

SEQ ID NO: 100125 - DNA, 337 bp, Zea mays
  unsure (1)..(337): unsure at all n locations
  Clone ID: MRT4577_22829C.1
gagcggaggcgggcaaacacgggagggggcgacagggacgcccccacacagaaacaacggccccgaagggccaagaaaacaacaggcgcaccgaaacaaacccagcaggggcagccagcagcaccagcggagccgaccgaagcacggcgaacacacgcgccggaacgccggaggacacccaaanaaacgggaaacgggcagaggcgccaatgcccacacgcagagcgaccgcacaccagcagggctcacgcccgacgacaaggcagaagcaggggcatagcagaaccccgcgagaaaaaggaaaccgcacacaaggccacacaacaaacgaaccgga

SEQ ID NO: 100126 - DNA, 206 bp, Zea mays
  Clone ID: MRT4577_2282C.1
gccctgaaacttattttgtgcaaaagtacggggctttaactacaccgtggctttagaacctggctgactccttagtcgctgctacagcttatgactacgacaaccttcagctgagtcaaatatatttgactcgcacagcccgcaaatagggccaaactgttctgggcatacaaacctacaccgaatgctcttcaacatcacgatta

SEQ ID NO: 100127 - DNA, 716 bp, Zea mays
  Clone ID: MRT4577_22830C.1
acagacgccagcttcctcctttctcttcagccattcttgttcttggctatctatcttctcccctcttctctctccttctctctcttactcttaatttggtgcttcttaatttctcagaagagactttgcaagcttgtgacttgttctcccaattcgattgcaaacttgatcaacatcttgttcttggaaggaaggtattagcttctaagaaagcgcaattgttgtggtttatgcacaccattggcagcgagtctctgctgtttgggttgtccaaaaccatctcgtcggcgcagaagccatgtccacgcgcgggagcggtagtcttagccctgctgccggtgcgtctgcggcggcgccggaggtggaaggccactgggccccgcacggcgcggtgctgacggcctgcgtcgtgggctccaacgtgctcgtgatcctgctcgtcttcggtttcttctggcggttcttctctgggaaaggggggccgtccacgtcacacggcgccgacgacgatgacgaggaggactcactgcccgtggcgtccccatgggcgtcccgctaccgggttcgagggccacggcgcacggtcgacgccgatggaagaacgtggtgtcgtccctgccccgtgtccgtgtactccagcgccggcgccgaggaaaagaaggaaggcccggcccgagtgcgctgtgtgcatcgtggagctgcgcgatggcgactcg

SEQ ID NO: 100128 - DNA, 314 bp, Zea mays
  Clone ID: MRT4577_22831C.1
agcagtggtaacaacgcagagtacgcggggtctatcttacaattttatagagtgtttggtttgatgaatgatatagtctatcatcttcttatttctcacttttttgtttggtttatggaatggagtgagttaatccatcactacctcattccttcatagttagttgtttagtactaatatgtggaatggagtcatcccaccaaatttgagggatgaatctatgatataccacttcattttagatagagtgattcatcaaaccaaaaaaaaaaaaaaaaaaaaaaaaaaaagtactctgcgttgttaccactgct

SEQ ID NO: 100129 - DNA, 598 bp, Zea mays
  Clone ID: MRT4577_22833C.1
attcatccgccgtcaccgctgttacgttctaccaagataccttacccgtccctccggccacgcgagctcgccgaaatggtcgcccacagggtccatcactaccagcgtggagatgcgtgagctgcctacctccaccgatgaccaccccatgatgtaccgcatgcagctctgggccaccaacgaggttcacgacatgtccgactcctgcgacttcctgataaagatcgagaaggtgcagattggtaatggtcagatgcttgacatcaacgaaaactatgagcgcaaccagaccaccatcgaaaaatatgagatctggatgactcaatagagcaggattggttcaccacatcatgtacttcgagctccggatgatctacctgaccggatgagagacgatgacgtgcaagaacttgtccttgcgacacacgagcgccgtgccatctgagtacctattttcaagacctagtcgttcacggttctgcgtctgtgttggaagaaccagcactattgctcccatgactccaagatgatcatcatgatgtgggaatcgcaggtgcattccgcctagcatgaatatgcataccaatttcatggcttg

SEQ ID NO: 100130 - DNA, 162 bp, Zea mays
  Clone ID: MRT4577_22834C.1
gcaataaagacgacagttacttgtctctgccatttgactttttcaattctcatttgccactgagtatactttaacacgttattagctcttttgattgagagaacaaaaaaaagtggcttttgttaagaagaaaacagatcgcttaaagttgtagaacgttga

SEQ ID NO: 100131 - DNA, 759 bp, Zea mays
  unsure (1)..(759): unsure at all n locations
  Clone ID: MRT4577_22835C.1
gccggccgggtcgggatccccgatcctctactccaccactccgcgggatcgtaccttacccagccttcttcctcgtcgccggctcgccatgtcggcggcgttcaaggcgttcctgaatagcccagtgggccccaagacgacccacttctggggacccgtctcgaactggggcatcatcctcgcggtacgtgctcctgtcgactccatcgttcgtctcattctttgccggacgtgccttctgctcttagcctcttcattcgctgagattcgtgagaattccagctccactcgagagaatcgcagcttcaggcatatctctgatctgtctcgctcgcagtcgcagtcgcaggtcattcgcgtctcggtctgtgtgtctatctcagtcgcacttgccgagttactggtgtgttaattttgaatcgaacagttcaagttcggaaatggatgctccagccgtcccctgtatacggatcgaatcgagtcctgctggtcggaatcccactgaagccttgttcgtttgtgctggatttggtgggtcggaacggttatcctaaccggattgcttctttaatttatataaaatttgattaactgaaatgattccgggtgcaattggatagaaacgaacaagacctgaatgaacgctcgctcactacagacgggaccatagctccgatccacaaactccgccaccaaggtgcangccactgtcgacacttgacagcgccgacagagatagcatatcatatactatagctt

SEQ ID NO: 100132 - DNA, 746 bp, Zea mays
  unsure (1)..(746): unsure at all n locations
  Clone ID: MRT4577_22836C.1
cctcgccccctcccccgccgccgccgccgccgccaagcaaccagcccccagcacccatcaccggccggcgaagatgaagacgatcctggcgtcggagacgatggagatcccggaggaggtgacggtgaaggtgtcggcgaagatgatctcggtgacgggtccccggggcacgctgacccgcaacttcaagcacctcaacctcgacttccagctgcaggagggcgggcggaggctcaaggtggacgcctggttcggcacccgcaagaccatggccgccatccgcaccgccatctcccacgtccagaacctcatcaccggcgtcaccaagggcttccgctacaagatgcgcttcgtgtacgcccacttccccatcaacgcctccatcaccgccgccaaccgcggcatcgagatcaggaacttcctcggcgagaagaaggtgaggaaggtggacatgctcgacggggtcaccatcctgcggtccgagaaggtcaaggatgagatcgtcctcgacggcaacgacatcgaggtcgtctcccgctccgccgccctcatcaaccagaaatgccacgtcaagaacaaggatatcaggaagttcttggacggtatctacgtcagcgacaagggcgccatcaaggaggagtatagtgcgaaaaaccgtcccaccagaagccgtgtttctgcctgccgtgtttcatcgtctttgtgtcgtcgntgtcgtgattttgaactctctctagactgaattt

SEQ ID NO: 100133 - DNA, 205 bp, Zea mays
  Clone ID: MRT4577_22837C.1
ttgtcatccgccgctgctgctgccgcttgcagatattttgaggtggcgtgcggactcataataccaattcttatttcaaacgtttccaagtgaaattcaacataaggctgcttgtcatgacagactacagggcttatattaggcttattaatcaatacacaaacatgctcatctcactctaaatacatattttttgtgctatcta

SEQ ID NO: 100134 - DNA, 307 bp, Zea mays
  Clone ID: MRT4577_22838C.1
tcgagcggccgcctgggcagggcaagctttttttttttttttttttttttttttttgggtttttttttttttttttttttttttttttttttttttttttttttttttttttttttttttaaacaggtcccaaacaccccttttccctaaaaattatccccttcccttgcaagggggcattcagggcattgcccaccccgccccccaggggggggggggaccccccggtacccatcgccggtaaacgagggaaccaactatagggggctaggcagcgggcccattacattattactacaggaccccg

SEQ ID NO: 100135 - DNA, 615 bp, Zea mays
  unsure (1)..(615): unsure at all n locations
  Clone ID: MRT4577_22839C.1
acaacactcctctctcttgcccaccanctttttccgtagctgaaactcggtggggggggggagagggaaacacttaacttcanctgggtgacagacgactcacagcaaaatgggtatactggggattacgggggacctacactgctgtcgctgcaaagccaanatcaccaagggcctggactgtctcaaacacgacctctccatctagaggggggagctccatgacaagaacgagaacaacgcggtggccccgcccgacaaccctccacccccacaacctctcccaacaagggccgcccaacgccgagacaatcttgaaggcgatcaccatcccgtcacccgtgcccaataccccccccatcccggggggggcaacccccaaaccacccaacccctcaccccccctccacacacaccccccccccacccccaacaccccacaccaccacccccccccccacaattccgctcccccctcaccccccaacccccccccccactaaaccccccgcccacgtctcccccccatcccccccccccccccccttttcccccccccccatccccccccccaactcgccccccccccccccgaaccccccaccccctcccccc

SEQ ID NO: 100136 - DNA, 570 bp, Zea mays
  Clone ID: MRT4577_2283C.1
ttaacacttccactgccccattggacccaaacaacctaacgaggaactatccaactgaatagaaatatcacccattactaacaaactatcatactcaaagtcacacaaaaataagcacattccaatgaactggaacattcatcaaaaaaaaacaccataaatgaccaataaatagctcaaacaagaaaaatgccgatgtctgctatcattcatgaatagctggaatcaacacacaaattaataatcttgtcatccacattaacattactgaaaatgtcttctattctgtcagtaatagaacgatccatcaagacacttatgtttacatatccaaaatgaacgctattgctaataaataaaactctagagctgtaccttctgatttccagagcttctaccccctaactcaacttccaaaagaaagagatctgattacataccgattggttgagctgacttccatgtcgagtccaaagctgtcttcgttccctgttaaaaaaactttgttatattatcccatatcatttcctatcaatctttttacccgttcaagaatatccaatcacccac

SEQ ID NO: 100137 - DNA, 313 bp, Zea mays
  unsure (1)..(313): unsure at all n locations
  Clone ID: MRT4577_22840C.1
cggacgcttgatctctactcgttttgagagtttctttctcgccatcgtaggcgtcctatgacatgtgggacgtgcgtgccaccnacccctgaaggacctagatggagtatacactaacttcactgtagcatacaaaccggctgacgacgaagatgccttacaactgcacccagtacaactccatcccctacctaaacatgctacagccgggctacaactggactctcccggagttgttccttacacattactaggccatcatctacgtggatcatttatccttcacggtcttcgaggagcacttctttttatt

SEQ ID NO: 100138 - DNA, 294 bp, Zea mays
  Clone ID: MRT4577_22841C.1
aaacgaacgtaaaccattaccattaccatttgggttacatttcttgaaccaaacaacacctaagccttttttttttgggtggtggacatttcttgaaccaaacaacacctaagccttttttttttcggtggtggacactttgctatgggcgagtgcatccgcttttaaggggcttcatattatttttaatacacaacatatttggaataagatcacctaatggggtaaaacataaaaaaaacggggagggcttcccactggcaccataatccaatccttgcgatctaaaactag

SEQ ID NO: 100139 - DNA, 307 bp, Zea mays
  Clone ID: MRT4577_22842C.1
attccaaaacggggtgaggacggagatatttaacaacgcgaggtcgataatcccctccccctccccagatcatagctgaaagagactcccccccactctgaatcccatatctgatcaagtcagatgagtcgggaggccgcagccgtgaacaacaacgtgtacgtagctcaggagctcaacgacgatgtctcgacgagatatggaaggaattctacggcatcatgtgaatagagaatgagcagagtgcaatcgaaagctgactcaatgggcacgtgtaaatctacggatctttatatgcatgacatgt

SEQ ID NO: 100140 - DNA, 486 bp, Zea mays
  Clone ID: MRT4577_22843C.1
ttggaacctttgggctgatttatgtgcttgtttatgtgcttggttatttttgtgtttccttctttccgctgagcttaaacttaggccacagagttcgctgtgttgttgtctgtagttgtctgttgtttggcatactctttttgtgttctctttcgtcttcggaccctattgactcggtacgtcccatcgctttgctacatggcggtagtgggagttgtttttccttcgttcttatagtctacgttacgtacggttgacttacctttctagactgggaccgttgtagatacgttgccgtccttttgccagtcctctttccgctatatttttctgtcctgcctcgtgcagccctggggcccgatattgtccgctcactttgccttcacagtccccagggccctgagtctaaatcttgtgttggtactctagccgtcgtaagcggtggtggtaagtcagaggtagtaatcgtacattccgtaagaaaaa

SEQ ID NO: 100141 - DNA, 1674 bp, Zea mays
  Clone ID: MRT4577_22844C.1
ccggccgggttggcttccttgggcatcccccctgcccctgcccaccccacgacagcccaaacccaaccccggcacacagcctgcagcccgctacatacaaaatgagctggtggcttggcctctcctccaccagtggcagtggcagtggctggccacccaatcgtctcgttcgtcatctacctctccctcctccaacccaagctaagctaaacagcttacagctcgctccgccatcaccgtatcgagagagacagagacaggctagcgagggaatggagaggatgctggccaggctgatgcggcggcggagctccgtccccctgtccggcctcctccaccacggaggagcgcccgccccgctgcaggccgccggcgccactggggcctccccgctgatcttctcgcaccagcagcagcagcagcacacggccgcctccgccgtcctgccggggctcaagatcagggactccgcgtcccagctgatcgggaggaccccgatggtgtacctgaacaaggtgaccgaggggtgcggcgcccgggtggctgccaagctcgagttcctgcagccgtccttcagcgtcaaagacagaccggcgatctcgatgctggaagacgctgaaaagagggggctcatcactccaggaaagaccacgttgatcgagcccacgtcggggaacatgggcatcgggctggcgttcatggcggcgctcaaggggtacgagctcgtgctcaccatgccgtcctacaccagcctggagaggagggtgacgatgcgggcgttcggcgccaacctggtgctgaccgacccggccaaagggatgggcgggacggtgaggaaggcgacggagctgtacgagagacatcccagcgcgcacatgctccagcagttccagaaccctgccaacgtcaaggtgcactacgacacgacgggaccggagatctgggaggacacgcttggccaggtcgatatcttcgtcatggggatcgggagcggcggcaccgtcacgggagtcggcaagtacctcaaggagaaaaaccctaacgcaaagatctatggagttgaacctgccgaggcaaatgttctgaatggtggaaagccaggacctcacctcatcactggaaacggagtagggttcaagccagatattctggacatggacgtgatggaaaaggtgctcgaggtgaaaggtgaggacgccgtcaagatggctcgagagctggcagtcaaggagggtcttttggtcgggatatcatcgggagccaacaccgttgctgctctcgagctagccaagaggccggagaacaaggggaagctcatcgtgaccgttcttccgagccttggcgagcggtacctgtcgtccgcgctgttcgatgagctgaggaaggaggcacaagccatggaaccggtcgcggtggattgatctcgccggtcaagctagctagcctgccgggcacgctggagatctggttcctatcgtcacagctgccagccaagccaattgtacttccattcccccctcatccagttttttattttattttaccgtcagtgtgtcacctcatctatgaaccttgcgaaaaggaaaaaaaaagtgcatgaataatgatgggaaaatgttgaaagagaaaaaaaaaaaaactcctttgagactagttctctctctctcctcgtgc

SEQ ID NO: 100142 - DNA, 451 bp, Zea mays
  Clone ID: MRT4577_22845C.1
ggcccggaaagatctttgtttctaatttttttgatttcgggggggggggcaccgggtcgaaggctttttattggccccttttgggggggggaacgggccccggggaacttacgggggcaaaggggtctcaggggccttttttaaaaacatttggggcaagaaaggggatgggtaaggggggcaaccccaaaaaataatgggttaaaggaaataaggccccgtctccatgctttgggccccaaaaaaatagggggaaaaaagggacttgtttttttggccctaaaaaaatcctttatttggaaggacactaacaaacctgtttgcaccctttgggttatttttttccttaaaacttggtaggaaagtccaaacggggggggggctgggtttccatttacttgcactttaaacggggggggttttttccatgcctgaaaaagcttaaaaattt

SEQ ID NO: 100143 - DNA, 2533 bp, Zea mays
  Clone ID: MRT4577_22846C.1
cagtgaaagcaataaaaatttcaggtttgtctgcttaatccttacagtatatggtgtcattacttaccaagaacaagaagttgggtgtgttgaattctgcatgcagtcatttttcaggaaccttaatgttccattgaattaccagtatttacatgctaggtgtcaatggctatctaaatggacataatgttcaaatattacttgtgaaagactgatactacaaatgcatgcaattcggctcggcacgcggctagacagggactgccagcggcgtaggcggtgtgggggatggagcgcgagatggcggacgcgcccgccgcggcgatccccgccgccgagccgctcgcggcggtggcggaggaaggggagggggaggcggccgccgaggcagtggggtccaccctcaccatggagcccgtcgccgccgcgaagaagttcatcgagaaccactaccgctcgcagatgaagaacatccaggagcgcaaggagaggcgctttaaattggagagacagctagcttcttctcaagttcccaaggagcaacaaatcgatttaataaaagatcttgagaggaaggaaactgaatacatgcgacttaaaaggcacaaaatttgtgtggatgactttgagctgctcactattattgggagaggagcttttggagaggttcgattgtgtcgagagaagacctccggcaacatttatgcaatgaaaaaactcaagaagtctgatatggttgtcaggggccaagtggaacatgttagagccgaaagaaacttgttggcggaagttgctagtcactgcattgtgaagctttactattctttccaagacaccgagtatctttacctaattatggagtacctccctggtggtgatatcatgacccttctcatgagagaggataccttgactgaacatgtagcgcgattctacattgctgagacaattcttgctatccaatccatccataaacataactacatccacagagatattaagcctgataatttgcttctagataaaaatggtcacatgaagctgtcagattttgggctgtgcaagccaattgactgttcaaagctctcaacgttgaatgaagatgaacccatgggtgatgacaacatgagggaatcaatggatattgatagttctttgtccaatacagcaaatggtagaagatggagaagtcaacacgaacagcttcagcactggcagatgaacagaagaaaactggcattctcaactgtcgggacaccggattatattgctccagaggttctgctgaagaagggatatggaatggaatgtgattggtggtctctaggcgcgatcatgtatgagatgctagttgggtatccaccattttatgccgatgatccaataactacatgccgaaagattgtgcactggagaaaccatttgaagtttcctgaggatgcaaagttgtcaaatgaagcaagagatctcatttgccggttattatgtgatgttgaccacaggattggcagtgcaggggcagatcaaataaaggcacatccttggttccaaggagttgcatgggataaactttatgaaatggaagcagcatttaagcctcaagtaaatgatgaactggatacacagaatttcatgaaatttgaggaactggaaaatcctccagccaaaacaggctctgggccttcaagaaagatgatgctgaactccaaagatctgagctttgtggggtatacatacaaaaactttgatgcagtgaaagcaataaaaatttcagatctgcaaaggaattcatctctaacaaggccttccattggttcgatattcggtccatcaggcatggattctcccatggaaccaaacggaagggacacacacatgcacacagtttcatctggtgacccaatgattccctaaccttcagtgccgtctgtcctcagcaaatttccgaactaaatcagcgtgcaaacgccagggtgatgtggctccagctggacaacatgcttatttttagccaggtctctgctctctttatcgtgggcaagcggtttgtagaaatccaccaaagtttctagttgtaaaatagtatgccacagacttcaacaaaggtcccatgcattattggctcatcagacatgggggcagtttttttttggagaaattgcaccttgcggctggctgcccaggttggcagagcaaattgcggccttctcttgtggcagttcccggtctgcaggaaagggaaatacgacggtgttgttgcagcaggaattctcatggttagtgtcgttgttggtgtttgatatgtatcaggaattttcacatttgaagtagggtttctgttagcagagttgtagctattgacaagcaacatccttttacggagttgcttttttttcgttgatgtatggaaaacgagacattgtagaaatcgaagttcgatctagccttgtatgctgcatatctgattcaacgtgtttctcagtatttttgtctaaaaattgcttaaatcaatgtgaaaatagaatttttgtgt

SEQ ID NO: 100144 - DNA, 456 bp, Zea mays
  Clone ID: MRT4577_22847C.1
ccaacagcgcccgaacaatccatacgaatcgagatctcggccgggcacaccaatacacatatagaactacaaaatggacattggcatagaaggatccgtgctcctagactgctggacgctgcgctactactgccaacgccttggctgctttccggggaacactgatcacacgacagagatgctgcgggactgtaagaaagtgaactcaaccgctgactataatctatccgaggacgcgcgggagctgctcgccgacgacatacgtgccagcagccaagatgctctgtatcgcctcaatactctctattagggacaagggcatatacacggtgacgcacattctaagatatagagatgcatgcgccgcttcacatccacagcatgaagtagttaatactggttctatcactgcggagtgcttacactacaggggagtgtgcttgttataagctaaca

SEQ ID NO: 100145 - DNA, 283 bp, Zea mays
  Clone ID: MRT4577_22848C.1
ggggcaaaagccccccccggtgacaggaaaaaaattggagaaaaaaaaaaaatgacttccacgaaaattttatgggatatccccacgggcgcgagaaattaaaaggaacccggtgaccttaggggaccggaaaaaaaaaaacccgattattcgatcgaacaaaaaagggcaaaaggggctaaaagcaatttttgagccccccggggctggcccaaatgggcgtattcaggcacacgggccattggtggtggtttaccacaccggacaccggggggtagccggg

SEQ ID NO: 100146 - DNA, 1427 bp, Zea mays
  Clone ID: MRT4577_22849C.1
aaagctctcaactttgaatgaagatgaacccatgagtgatgacaacttgagggaatcaatggatattgatagttctttgtctgatacagcaaatggtagaagatggagaagtcaacacgaacagcttcagcactggcagatgaacaggagaaaactggcattctcaactgttggaacaccggattatattgctccagaggttcttctaaagaagggatatggaatggaatgcgattggtggtctctgggcgcgatcatgtatgagatgctagttgggtatccaccattttatgctgatgatccaataactacatgcagaaagattgtgcactggagaaaccatttgaagtttcctgaggatgcaaagttgtcaaatgaagcaagagatctcattagccgattattatgtgatgttgaccacaggatcggcagtgcaggggcagatcaaataaaggcacatccttggttccgaggagttgcatgggataaactttatgaaatggaagcagcatttaagcctcaagtaaatgatgaactggacacacagaatttcatgaaattcgaggaattggaaaatcctccagccaaaacaggctctggaccttcaaggaagacgatgctgaactccaaagatctgagctttgtggggtatacgtacaaaaacttcgatgcggtgaaagcaataaaaatttcagatctgcaaaggaattcatctctaacaaggccttccattggttcaatattcggtccaccaggcatggattctcccatggaaccaaacgggaggggcacacatatgcacacagtttcatctggtgatccaatgattccctaacctgcagtgctgtttgtcctcggcaaatttctgaactaaatcagcatgcaaacgcctggatgatgtggctccagctggataacctgctcatttttagccaggtttctgctttctcaatcgtgggcaagcggtttgtagaaatccaccagagtttctagttgtaaaatagtattccacggactttaacaaaggtcccatgtactaagggctcatcatcagacaccgggacagtttttttctggagaaattgcaccttgcggctggctgcccaggttggtagagcaaattgcggccttctcttgtggcagttcccggtccgctaacatttgatcagggaagggaaataagatggtgttgttgcggcaggaattctcatgggggggagttagtgttgttgtttgatatgtatcaggaattttcacatttgtagtagggtttctgttagcatattttagaaacatcctttttgcagagttgctatttctcattgatgtatggaaaacaacataatttggagatcgaagctcgatctaacttttatgctgcatatctgatctagattacatcaaaaaaacccacgccatcgcaatgg

SEQ ID NO: 100147 - DNA, 436 bp, Zea mays
  Clone ID: MRT4577_2284C.1
cgaaaccgctgtagctgaaactgggatcaccgaagacctcatctagaaagacacggggcgatattgacaatctacttctgagaatggctgaagaagaagcggctgctgttgcggtgaacatgacaacctgaaaaaggaaaagagcagattgaagacactttggaggaagaaaattttaattttcaagatatacctttttcaagagtgggttgacgctgaaaaagaagagttaaagaaatatgctctatcctgtggatacaaaccagggtctctgctatttggtggagtcaatgaagggaagctaagatgccttcggaaccgaaccgaggccaaggttgttaggaccttctcaaaaagcgttggcctaccgaagatagaagcggacctctgcaggtaccagcgacagcatattgccggtagcttgttctatgctaat

SEQ ID NO: 100148 - DNA, 294 bp, Zea mays
  Clone ID: MRT4577_22850C.1
acataataaatgaataaggcttttattgattgtgttacatgcatgaagagaagaaacacaatcaataaaagccttattcattgtgtttcttctcttcatgcatgtaacaaggccggaaccggaaaccctagaacatatatatatacgtacgtatccaacagcagcacatacatatacatgtaaggaaattaaaataatttgatatagtacgtacgccttggaaagacctgcatgcggcgtggcatcaatatcggacgcgtgggcggacgcgtgggcggacgcgtggctggaccc

SEQ ID NO: 100149 - DNA, 388 bp, Zea mays
  unsure (1)..(388): unsure at all n locations
  Clone ID: MRT4577_22851C.1
gggaaccaacccctgaccttgttataactataattattgcgtcccgggcacaaatgatccatggggggggtccgggggcaaaacccgccttatttcaagcaaccccatacagcacaaggcggcttcaggcatataaacagacccaaatacagaaacatggatcggggggggaaaggatgactagctagttgttcttggggagggcctaaagggccaaaattctcccggggttgtaccccgggaggggggggggggggcagatccaaaactcggggccccccccctacttggggaacacccccagcgggggcgggatgatggcgatcaggatgcccacccagttggcagtcccctccccaggctgccaaggctnttgttcccccgcttt

SEQ ID NO: 100150 - DNA, 453 bp, Zea mays
  Clone ID: MRT4577_22852C.1
aaaaaaaggggctttggggggcgttgggtttaacaacaattttggggtggggggccaaatgcccccccccgggaaaatgccgaaaaactcggggactccttttcccctttgacagggacagaaaaaggccccccttttttccaattttccaaggggcgagggaacaaatttgcagttgggctttttttccttggaaaaaaaaaatttttcccccccccgaaaggatggttgggggaaagtctctactttttagtatttttgggccttcccccccagctggtttagctccctctaaatttttagggcgggaaaagggcccccggcccctgatttgctggccctttttttgcctgaggggggcccccctttaaaaaagcttcccgagagtttttttttcagctgggaaaaaaatcatccacagatgaatttttgagcagggcaaatttttttttt

SEQ ID NO: 100151 - DNA, 181 bp, Zea mays
  Clone ID: MRT4577_22853C.1
attccaccctcaccgaccgtacccctgttctcctactcttcaaactttagctttatcctccatacccttaccaaacgcctatgtagcttcacacaacactaccacaccgcaaattctctgccactcatctcgtccaggaaaacctccactgcaccgcccatcccttagccgactactacca

SEQ ID NO: 100152 - DNA, 386 bp, Zea mays
  unsure (1)..(386): unsure at all n locations
  Clone ID: MRT4577_22854C.1
cccacgagcaaccgaggagccgccggcgccagagagnnggnnnagcaagaccnccnancnggcgacgagcnccgggcgganncanncaccnacaaggagcncgagaacggcgnccngngggagggcgagggaaagngggncacccaagggccnggagagggagacaggggggccaanccaaccgccgagggnggngaggangaaagcgnngacgacacagccgngaaggnggnngaganngnngacacannncgncgacaggagcaaccnncnngngacaagaaagcagggggccccaacacaaaaaaacacaggaagaagcagacagcggggccggagccagagaaagcggangagaacaaaacgggngccgagggggcaaccaa

SEQ ID NO: 100153 - DNA, 127 bp, Zea mays
  Clone ID: MRT4577_22855C.1
attgcttcagcctctgatttcacgacctcttcgttcgaagaatattgagcaacaggcggccaccgctactgctttgaacttctgtcttgcactcagaccaccccttctaaaactatctcctgaactt

SEQ ID NO: 100154 - DNA, 367 bp, Zea mays
  Clone ID: MRT4577_22856C.1
cccgcgtccgcggtcgcgtgggcggacgcagggccgacccgggggtttgggcccggtgcctgcggacgtgccagctgttcctgtgcgcgtgcgtgtttgccaccgtcaacgcccgcgtcgcgcacatcctcaatttcctggacggctcggtccgtacctttttcaacgccgttcaggcattcgtgggcgtgcgggatgttttcggcgcgcaccttcgtgtttttcgatatcccccgggcgtccggccgtcgcctgtgttccgtgcgcgtcctccttcgtcaggatctggtgcaggtttctaggcgagctacttgcccgcgtgccctgtccgtgccagctgcttcttccatgtggatctgttgccgca

SEQ ID NO: 100155 - DNA, 128 bp, Zea mays
  Clone ID: MRT4577_22857C.1
attcggctcgagcctccatggacttggagcgctgctccctacggtttgcgcggcgcctgctctagccgccgaacaagacgccgacggtgacaatgttacggtttataagccacccatcgtcagctgca

SEQ ID NO: 100156 - DNA, 217 bp, Zea mays
  Clone ID: MRT4577_22858C.1
gacccacaagtccaaaggaagtcgcgttaatcacggtggtcatggacgccctccactacgcctaccgggtccatgtcgtcctcatcggacacgtgaaccacgtgcaagttgatccaacgggcctgtgcaaatacacgcatgcaacgttctagcggcgtgcagaactcgtctggcaacacggcggagacgcgctgagagtatcagcgacagcccacgc

SEQ ID NO: 100157 - DNA, 773 bp, Zea mays
  Clone ID: MRT4577_22859C.1
atttcattcttctattcacagttcacaccttggacacgatctatttcagagttattatagtcataagtcagttcctgtagtggtggaattgtctctgcagcaaagaacataatatgtggcatccttttgtcaccatggtcccagagaatattttgtgcttgaagatttggtgaacagctgtggctgatgaaccttccgatgtttccatacacagatgcatctatagtgaagcgcacatcttccatggcctgggagcaagagctagaagagttcaaacctgaaacatttgatagcaacacactgctaacattctcatcatcatagttaaggcctacatcaaacaagtaattgttgttccttctcttgtcagccgccttttgatgctgcagctcaccgatatactcacatatgaagctgccagcaggaatggaccatagagatcttacgccccaacctgtcttggttgtcctgaatacttccagtggtattttcgtatcatgctgactgaccctgttgcggcacgacggaggacatttacaagatgaaccacactcaaatatcacagacttctcattgagaattgcgccacttaagtcaaatgggatttcccctccattcttcacagcacaggcacagctctcagagtctgagcaaccattggtgcagtcacaaccctgattgtgtttttctgtaagcccaaatggatatctaattctagtggtgtattggaaaggtccaggttgcacatcatcgactgtattaatgacacagat

SEQ ID NO: 100158 - DNA, 406 bp, Zea mays
  Clone ID: MRT4577_2285C.1
ttgcctacagccttccatttcagggtctgaaagctgggaacaagaaacagggatatgttaagatcatcgagaggaaaggtgctacttcaattgaagctctcttccccggatattctacccaaattagttgctaatttcaatactttccgttaattacccttgaaaaatcccccaacttttaattccttaaaaaaatggtcaaaaacccttttatttcggaaaggtttcaatttgaatattgtttttaattgaccaattctaaattcccacattccccaattaaccacggttcggcaccttccattggctccaccagttgaccaaacttttggaatggttccttttggaaccaccatttgcatttaaggcccttataaggaaagaaaaacccccttgtcaaagtttt

SEQ ID NO: 100159 - DNA, 714 bp, Zea mays
  Clone ID: MRT4577_22860C.1
ttgggtccctcgaggccggccgggccgggcattcccccaccccgccagccggcacaaagcgcggcgttaatatctcccctcccccttgccctcaggtctccccaccgcccccgatccaccattcctcctccggatttcgcagtcagcggtggtgaaggtagcgggcgcggaggaagatggggctcgcgttcgggaagctcttcagccggctcttcgccaagaaggagatgcggattcttatggtcggtctcgacgccgccggtaaaaccaccatcctctacaagctcaagctcggcgagatcgtcacaaccatccccaccatcggtttcaatgttgaaactgttgagtacaagatcttcctaatgccatgaatgctgctgagatcgctgacaagcttggattacactccctgcggcagcgacactggtacatccagagcacttgtgccacaactggcgagggtctgtacgagggcctggactggctgtccagcaacattgcgagcaaggcttgaatatcaaatgcgaactgactaggagctccggatgtatcatggaaacttaggacagaatcgcctctacaacctgttaggtgtcttctaccggcacaatatattttttgtttggaatatgtaatgatgttacggttcaacgtttattctaccctactatactgttggatgtaaaaaaaaaaaaaaaaaaggcccctagggcc

SEQ ID NO: 100160 - DNA, 339 bp, Zea mays
  Clone ID: MRT4577_22861C.1
gcacatgtaggcttgaggcctaccttgaatgtcaaccgcgaactgactaggagctccggatgtatcatggaaactcaggacagaatcgcagttgcaacctgttagatgtcttctaccggcactatatatattttttgtttgatgtgtaatgatgttactgttcaacgtttattaccctactatactgttggatgttctttggacctgtttcatttcgcacaaggattggacttccaatatcatgctacattttacattcgtggtaaatacctgattagaaaaaaaaaaaaaaaaaaaaaaaaagaaaaaaaagaaataaaaaaaagaaaaaaaagaaaa

SEQ ID NO: 100161 - DNA, 421 bp, Zea mays
  Clone ID: MRT4577_22862C.1
acccacgcgttcgcctctctctccctcataataaacaacctcaactctctccaccatttctaccaaaggagccctcttacagggagggaagaagtgccacctcctccaccaacaccaaccatcttctccacagcttccttccagcgcttcctgcccgtctcccctcacacttcttcccagctcctcgccgtccgcgcccgaacggccatctccatcccgtcgtcgtccccgccggcgacacgggataatgaagtcccctcggagcggctggagcctaagttctaagctcgctagggagtgtactggtccctcaaggagaggtactccaccaggctgaacccgcacgagaaggtgaagcttgataatgagcccatggcgctgttcatggacggctacttcagggaccttttcaagatcccca

SEQ ID NO: 100162 - DNA, 573 bp, Zea mays
  Clone ID: MRT4577_22863C.1
cggccgcgtcgacggactggctgtccagcaacattgcgagcaaggtatacctatggcatgattgtcttcagttacaaatatattggtttgatctggaatttttcatctattttacctatctgaaatactgtttccttttaacaaatatattggtttgatctgaaatactgtttccgtttttacgcacatgtaggcttgaggcctaccttgaatatcaactgcgaactgactaggagctccgggtgtatcatggaaactcaggacagaatcgcagttgcaacctgttagatgtcttctaccggcactatatatgttttttgtttgatgtgtactgatgttactgttcaacgcttattaccctactatactgttggatgttctttggacctgtttcatttcgcacaaggattggacttccaatgtcatgctacattttacattcgtggtaaatacctgattagaaagttagccgaggagatccaatgtcatggtacatggaaatccagattaggttaaacattcttaagtatacagactatggtaccctagccaccacttttttttaaaaaaaaa

SEQ ID NO: 100163 - DNA, 151 bp, Zea mays
  Clone ID: MRT4577_22864C.1
acctcagcggcggagtttggcggtcctcccggtctcgctctctcgtccccccagacgatgggtaacctcgaaggccggtccgggtccctcgccatcctagcctcgcgccggcgccacaggaaacccattgtcagccgcccaatgccccacg

SEQ ID NO: 100164 - DNA, 1803 bp, Zea mays
  Clone ID: MRT4577_22865C.1
ctcgaggccggccgggaccccgcctttccggacgaagcgcggcgttaatatctcccctcccttccctcttctggtctccgccccgccccttgcctccgatccccaattcctccttcggatctcgcattcagcgcagcgcaggtgtgaaggaagggggacgcggaggaagatggggctcgcgttcgggaagctcttcagccggctcttcgccaagaaggagatgcggatcctcatggttggcctcgacgccgccggtaaaaccaccatcctctacaagctcaagctcggcgagatcgtcaccaccatccccaccatcggtttcaatgttgaaactgttgagtacaagaacattagcttcactgtctgggatgtcgggggtcaggacaagattagacctctttggaggcattacttccagaacacccagggtcttatctttgttgtggacagcaatgaccgtgaccgtgttgttgaagccagagatgagctccacaggatgctgaacgaggatgagctacgtgatgctgtgctgcttgtttttgccaacaagcaagatcttcccaatgccatgaatgctgctgagattactgacaagcttggattacactccctgcgccagcgacactggtacatccagagcacttgtgccacaactggcgagggtctgtatgagggcctggactggctgtccagcaacattgcgagcaaggcttgaggcctaccttgaatatcaactgcgaactgactaggagctccgggtgtatcatggaaactcaggacagaatcgcagttgcaacctgttagatgtcttctaccggcactatatatgttttttgtttgatgtgtactgatgttactgttcaacgcttattaccctactatactgttggatgttctttggacctgtttcatttcgcacaaggattggacttccaatgtcatgctacaaaaaaaaaaaaaaaaaaaaaaaaaaaaaaaaaaaaaaaaaaaacccccacacccgcagcatccccatttctccgtcccaaaaccctaggctagtccccccacacctggatccatcgggtcggaggccatggcgacggcgaggctccgatcctcggcctccctccgcggggctctcctccgccacttctccgttggtcccgcctcgactccgcgcgccgtctcccgggtcccagatttccaggttcctcagtctattatgtggaggcattttgcaacgtccaggcctaattctcttgcaagacgcgacaactttggtctgatggcctgtttgcacgctcagatacgatgcgcttcgcaggctgctgctgtgaaagaaaccgaatccagtagcagcaagataagcatcgggcccaaaccaaaacagatcaaggaggatgacgaggatgctaacctggtataccaagggccaatatcatcgaccataaagaaagtgaagcttctctccctgtccacctgctgcctctccgtgtctctggggccagtgataacattcatgacttcgcctgacatgaatgtgatcctcaagggagcggttgcatccaccgtcattttcctcagcgccactaccactgcagcgttacattggttcgtgagcccgtacattcacaagctccggtggcgtcctggttcggatagctttgaggccgaggtgatgacatggctagctactcccctcaaaaggactgtcaagtttgccgatgtcaggcctcccgaaacaaacaggccctttgtcacctttaaggctgaggggaacttctactttgtcgatgctgaccacttctcgaacaaggcatt

SEQ ID NO: 100165 - DNA, 1127 bp, Zea mays
  Clone ID: MRT4577_22866C.1
cattgggtacctcgaggccggccgggacgtccccaccccgccagccggcacaaagcgcggcgttaatatctcccctcccccttgccctcaggtctccccaccgcccccgatccaccattcctcctccggatttcgcagtcagcggtggtgaaggtagcgggcgcggaggaagatggggctcgcgttcgggaagctcttcagccggctcttcgccaagaaggagatgcggattcttatggtcggtctcgacgccgccggtaaaaccaccatcctctacaagctcaagctcggcgagatcgtcacaaccatccccaccatcggtttcaatgttgaaactgttgagtacaagaacattagcttcacggtctgggatgtcgggggtcaggacaagatcagacctctctggaggcattacttccagaacacacagggtcttatctttgttgtggatagcaatgaccgtgaccgtgttgttgaagccagagatgagctgcacaggatgctgaacgaggatgagctacgtgatgctgtgctgcttgttttcgccaacaagcaagatcttcctaatgccatgaatgctgctgagatcactgacaagcttggattacactccctgcggcagcgacactggtacatccagagcacttgtgccacaactggcgagggtctgtacgagggcctggactggctgtccagcaacattgcgagcaaggcttgaatatcaaatgcgaactgactaggagctccggatgtatcatggaaacttaggacagaatcgcctctacaacctgttaggtgtcttctaccggcacaatatattttttgtttggaatatgtaatgatgttacggttcaacgtttattctaccctactatactgttggatgttctttgggcctgtttcattttgcacaaggattggagttccaatatcatgcatgctacattttaaattcgtaccccatcgcaaattttaggatgtataccaaattataggatattccaacattttttggagagtccgagcatcttgagttggatcaaatttatatcataaaacatttatgatactaaaaagcatcggtatttttttaccagttatatttttagcggatctatttggtgtcc

SEQ ID NO: 100166 - DNA, 1277 bp, Zea mays
  Clone ID: MRT4577_22867C.1
agtgcccaccccgccagccggcacgaagcgcggcgttaatatctcccctcccttccctcttctggtctccgccccgctccttgcctccgatccccaattcctccttcggatctcgcattcagcgcagcgcaggtgtgaaggaagggggacgcggaggaagatggggctcgcgttcgggaagctcttcagccggctcttcgccaagaaggagatgcggatcctcatggtcggcctcgacgccgccggtaaaaccaccatcctctacaagctcaagctcggcgagatcgtcaccaccatccccaccatcggtttcaatgttgaaactgttgagtacaagaacattagcttcactgtctgggatgtcgggggtcaggacaagatcagacctctttggaggcattacttccagaacacccagggtcttatttttgttgtggacagcaatgaccgtgaccgtgttgttgaagccagagatgagctccacaggatgctgaacgaggatgagctacgtgatgctgtgctgcttgtttttgccaacaagcaagatcttcccaatgccatgaatgctgctgagattactgacaagcttggattacactccctgcgccagcgacactggtacatccagagcacttgtgccacaactggcgagggtctgtatgagggcctggactggctgtccagcaacattgcgagcaaggcttgaggcctaccttgaatatcaactgcgaactgactaggagctccggatgtatcatggaaactcaggacagaatcgcagttgcaatctgttagatgtcttctaccggcactatatatttttttttgtttgatgtgtaatgatgttactgttcaacgcttattaccctactatactgttggatgttctttggaccaaaaaaaaaaaaaaaaaaaaaaaaaaaaaaaaaaaaaaaaaaaaaaaaaaaaaaaaaaaaacctaaaaaaaaaaaaaaaaaaaaaaaaaggtccctgggccgaaacaaccttaagggcaaattttgaaaatatcaataaaactggggggccgttcaagaatgcattaaaagggccaaattcgccttatagggagtcgaataaaaattaattggccgtcgtttaaaaacgtcgtaactggaaaaaccttggcgtaaccaaactaaatcgccttgaagaaaatccccttttcgcaagttggcgaaaaagcaaaaaggcccgaaccaatcgcctttccaaacagttgccaaccctaaatggcaaatgaacgccccctgaaccgg

SEQ ID NO: 100167 - DNA, 166 bp, Zea mays
  Clone ID: MRT4577_22868C.1
gtgagatccaagtgacagagcttctcgataagttagacttttatgttctgcctgtgctcaatattgatggctacactacacctggaccaagagccgattttggagatagactcgctcgacccatcctggatctagctgacttggcacagaccccaacagaaatttt

SEQ ID NO: 100168 - DNA, 605 bp, Zea mays
  Clone ID: MRT4577_22869C.1
ggccgcttttttttttttttttttggttttttttttttttttttttgacaggccacgcacgcattgcttttttttttttttttttttttttttttttttcactttttatgtttttgggagcaccttacttaaaaaccaaggcacaaggggggggccagggccacaaaaaaaaacaaggattaggccgcagagaattaacgaaactactctaacgaaacaggacaaaccgaagggggaaagccagcaggaaacaagccgaggttcatgccacatataacaagctgacagagaaggggcgccattggaaggagccggcgggttgaaattaatcagcagaactttggcagacaagctctgaagagccgagccctcgggctctttattccttgctttgggcaacgggaagattgccgaagaacccagacataccccaaagagggcctttgaatccctgcctccagacaaccggatggtggacgcaaagaacttcttagctgcacagaagattttccaagccacccacagtggacagaaccccaccaaaggctatatgatagaagggaataggtggttgggaaaaaaaaagatcctcataacaaaaggga

SEQ ID NO: 100169 - DNA, 669 bp, Zea mays
  Clone ID: MRT4577_2286C.1
caaaaaatgacaactaacagagatggtcattattgcaaagcacccgcctttaggaattaggcaactattaacagacacggcgttttaagaggttcaactttacaaataattgtataaaaataattcataactttttatattaagctccataaatacgaacattatataaaatgtagttttccatgcggtctacaactttgtagttgggaagttattcgtcgaaaactgtttagcttagtatatatatatatatatatatatatatatatatgctaaaataatgtcattttaagttctcagacgatatgtacaatcaacctcaaatattgacatggactacagcaaagctctgttctcaaatatagcccataaaattatagctgaaagttgttaatttagacttgtttagagtccaaaatgtgttttacgtttctagggtttgaagttttcaaagaacgtacattgaatgttcacatcatatggttaataccgaagttgtggcgtggctaacctgatctacgagcatgttattcataacttcttgtgaagttgtttagaggctcaaatattagctttaaactcatatatgaggcctagctaaatttttgtttttggttttttttgaaaaaaatcaaacattctctaatgggagatacgtcctacaccaaa

SEQ ID NO: 100170 - DNA, 411 bp, Zea mays
  Clone ID: MRT4577_22870C.1
ggcagggaaaaaacggccttatgggaacaaaaaaacaaattttgtacaaaagggacaggagccccttttttacaaactcaacttaaaaagcttgccccaggttcgggaggcccgggaaaaaaggggattttgggacccatagcgccaaaagcctttaaaacggggagcgggcagcccaagttcactaaacaacatgggccacaacaggggaagggacaatatgcccaacaaaggccggggggcaggttctcagggggcaaaaaaggcagtgggtttttgaaaacccccaaaaatcaaaaaaagcttttggcaggggctcatgcccacgggtcaggggcatatattgggatctgaagcacacgggttccctttttggggacccaaagggccaaaagcctttaaaacggggag

SEQ ID NO: 100171 - DNA, 743 bp, Zea mays
  unsure (1)..(743): unsure at all n locations
  Clone ID: MRT4577_22871C.1
ccggccgagacttttccacctcctcatcacccaccggtcctgtctcaaagcaaaagcccgacatggcctccaactacaccgtccgcaaggttgcggctcccaacaccctcgagcaccgagtctacgtcgagaaggatggacagcccgtctctccttttcacgatattcctctctacgccaaccaggagcagaccatcctgaacatggtcgttgagattcctcgatggaccaatgccaagcttgagatctccaaggaggagctcctcaaccccatcaagcaggacatcaagaagggcaagcttcgatacgtccgaaactgcttcccccacaagggttacctctggaactacggtgccttcccccagacctgggaggaccccaacactgtccaccccgagaccaaggccaagggcgacaacgatcctctcgatgtctgcgagattggtgagctcgtcggttaccccggccagatcaagcaggtcaagggtcctcggtgtcatggctctcctcgacgaggaggagactgactggaaggtcattgtcattgatgtcaacgaccctctcgcctccagctgaacgacgttgaggacgttgagcgacacttgcccggtcttctccgaccaccaatgagtggttccgcatctancagattcccgatggcaangcccgagaaccagtttgcctttcactggcgagtgcaagaacaagggactacgctcttgacgttgtacgcgagtgcgccg

SEQ ID NO: 100172 - DNA, 271 bp, Zea mays
  Clone ID: MRT4577_22872C.1
caaggatttacatgtgtcctattagttgtagacacatcctggaattcataccccacaaatactttgtatacacactgtacttgtggggtatgaattccaggatgtgtacttcaaggacagtgtgtatacaaagtatttgcagagcatgacttttatatgtgtgggatatcaatgtgtatatttatatttaaagtgtatttattgttacaagtctattctctattatattttatttactctgcggttataaaaatcacccttgcatacaagt

SEQ ID NO: 100173 - DNA, 223 bp, Zea mays
  unsure (1)..(223): unsure at all n locations
  Clone ID: MRT4577_22873C.1
ggccgctaggcataactgccagncctctgccaccaagncacaccttccncngaatgcgcttgnngaaaggctgcaanacctctcgtaagttcctgccccnaggcgtnggctntgacgccatccatgaagggccatcgaatggctggatcgaggaagannctactagtatangtgctaatgtgcctcgncctcgnnttgtcttcacaggtgtganctanttaat

SEQ ID NO: 100174 - DNA, 312 bp, Zea mays
  Clone ID: MRT4577_22874C.1
atggaagagctggccgcagtcactcgctccctcggtctcgacccgagcgatcaggagctcaatgatatgatgagcgaggatggcgacggcgacgaagagctcaaggaagcctttgaggtcctggacaaagaccagaacggcttcatctccccggttgagctgaggacggtgatgaccagtctcggggagaagatgaccgacgaggaggttgagcagatgatcagggaagcagacaccgacggtgacgggcaggtgaactacgatgagttcgttctcatgatgaagaacgctgagcggaaaatatctgggtga

SEQ ID NO: 100175 - DNA, 663 bp, Zea mays
  Clone ID: MRT4577_22875C.1
gcacgagctggcattggtcacgtatactgccttgctgtcagttgcatggacgggctgacggtcgagcagaggctcgcgttccaggaggccttctcgctcttcgacaagaacggcgacggatgcatcaccatggaagagctggccgcagtcactcgctccctcggtctcgacccgagcgatcaggagctcaatgatatgatgagcgaggtcgatacggacggcaatgggatcatcgatttccaggagttcttaagcctcattgcccggaagatgaaggatggcgacggcgacgaagagctcaaggaagcctttgaggtcctggacaaagaccagaacggcttcatctccccggttgagctgaggacggtgatgaccagtctcggggagaagatgaccgacgaggaggttgaacagatgatcagggaagcagacaccgacggtgacgggcaggtgaactacgatgagttcgttctcatgatgaagaacgctgagcggaaaatatctgggtgaagggcgcgatgtggtgtggaactactgaactagtactctagtagtcgtcttgattggattctgtcagaaatctactgctgtaaattgctattgtatgcttatattagtactatgatcgtgttaaaaaaaaaaaaaaaaaaaaacgactcgtgc

SEQ ID NO: 100176 - DNA, 597 bp, Zea mays
  Clone ID: MRT4577_22876C.1
ggggctgtccggtcgcatcctgctgcgcgcacaaaatcttttttagtggtgtccggtcagcagctgctgtgcatgcagaattttttttttctctctgatcggtcacttctgcacagccgtctgggcgccatgctgcagactttttctctctgttcggtcacttctcctcacagccatgcatgcgtgtcaggggcgccagctatttttttccctgtccagtcgcttccggtcaacagcagctgcgcgcacagttttttttgtcacagccacactctactgccgtgtgcgcagccttttgttcttgtgaccggtcgctgtgtcacccgcgcagcaagaaaaatattttttttgtcacttccgtgcagaagtgtgagggatacagggcgcgcagaacttgtcttttgcgcagttctttttcttttgtcgtccggtctcatcggcgcagacacttggttttgatttttttggcgcatggaatctctgcagtccatttttttagaatcctgcgtcagaaatttgaatttttttggcgtcttccctctgctgtttctggctctctgaccacactggtcagagccagttgaactggcccatggg

SEQ ID NO: 100177 - DNA, 935 bp, Zea mays
  Clone ID: MRT4577_22877C.1
tgggtacctcgaggccggccgggccgggatacatacctactagtctactaccccttcacctaccttcacctggcaactggcattggtcccgtatagtgccttgctgtcagttgcatggacgggctgacggacgagcagaggctcgcgttccaggaggccttctcgctcttcgacaagaacggcgacggatgcatcaccatggaagagctggccgcagtcacccgctccctcggtctcgacccgagcgatcaggagctcaatgatatgatgagcgaggtcgatacggacggcaatgggatcatcgatttccaggagttcttaagcctcattgcccggaagatgaaggatggcgacggcgacgaagagctcaaggaagcctttgaggtcctggacaaagaccagaacggcttcatctccccggttgagctgaggacggtgatgaccagtctcggggagaagatgaccgacgaggaggttgagcagatgatcagggaagcagacaccgacggtgacgggcaggtgaactacgatgagttcgttctcatgatgaagaacgctgagcggaaaatatctgggtgaagggcgccatgtagtgtggaactagtagtcgtcttggttggattgttctgtcagaaatctactactgtaaattgcaattgtatgcttagtactatgatcgtgttattcgaagtgttggaggttggaaaaagtgatctcacgctcattaacgggtggccaacggccttatgtatacgatgaatatttagataggtggcttttattttgttacgataaatagcaggaggaagatccattgacgacctctactaggtttaccgacagcgaactaccatgaaaattacagttgtgacactcaaaaagaaaaaagaaaaaaaaaaaaaaaaacaaacaaaaaaaaaaaaaaaaaagcggcc

SEQ ID NO: 100178 - DNA, 654 bp, Zea mays
  Clone ID: MRT4577_22878C.1
cttttccccgtccagttccgtcttcctccccagcggccggcagctaggcggttgctctcccctctcccttcctccgcaatcctcccctcgatctcgtcggagcgggcggagatcgggccgcggcgatgacggtgatcgacatcctcacgcgggtggacgccatctgccagaagtacgacaagtacgacgccgagaagctcaacggcgccaacgtcgccggcgaggaccccttcgcccgcctctacggctccgtcgacgccgagatctcccagtgcgtcgagaaagcggaggcggcgaggcaggagaagaaccgggccacggtcgtcgcgctcaacgccgagatccgccgcgccaaggccaagctcctcgaggaggacctgcccaagctgcagcgcctcgcgctcaagaaggtcaaagggctcacaaaggaggaacttgctacccgtagtgatctggttgccgccttgcctgatagaattcaatcaataccggatggtagttctagtgcgacaaagaaaaatggaggttggggagcctcaggatcccgtcctggtggaggcgtcaagtttgactctacttctgatggaaactttgatgatgagtactttaaggggactgaagaatcaaataaatttcgtcaggaatatgagatgc

SEQ ID NO: 100179 - DNA, 762 bp, Zea mays
  Clone ID: MRT4577_22879C.1
ggtggtcctcttcgtacccacggctccgctgccgctctggaacttctggccgcgtccccacgctgcccggggtgcgttggcctgccagaggacgtcgccatcacggaccgcgcgctgcggaggcggttcgccgtgctggccgttgcgagcaccggggagtgctggtcgccggggaaggaggtcgacgtcgccaggcgggtgatccggtcctgggccaccaagaacgggctcaaaggcctgccggtagccgccctcggcgcttcgtccggcgggtacttcgtgtccaggctggcggccaagatgagcctcgccgccgtcgtgattatgatcgccgagggcgcattcgccagctcagctggcgcgcttccggcggcttacccgtccgcatggtcagaagcagcgacgtccttcattcggacgggtatggaggagaacgcgacggggatggaggagacctagcgatggagaactgacggcgacggcaatggggacggaacccggtttcaacgagactaatactgctctgaacctgttaatagaatagtcatgttcattttagagtgttggctatgcccagcttttccataacggagaaaccctcgcctgagcctctatttcgtcgaagtcacattcgttcgtgtttcataacgtcaaattgccttgccaggcaacaagatgggagaaaggttatagtgcttgacaatgagggcccaccgatgaggtcggggtggcaggtgggttagtagaggaatagggattgaa

SEQ ID NO: 100180 - DNA, 590 bp, Zea mays
  Clone ID: MRT4577_2287C.1
tcgagttttttttttttttttttttttttttttttttttttttttttttttttttttttttttcttaaaaacgggaccggattttacattttgtttggggggtttctcccaggccttttactcttccttggacagggggtccggatttgcccaacagcaaaagctgaaattgctttggtttcaaaaaggaatctaattaaaaacaattggggagggaaaaaaaaaatttgttcttacatcaaactagggctatagcttgctactgacccccccctgccggatgaagctggccatcacccgggggtttttgtaaaggcccacgggcctttttacaggcttggaaaagggggggcttccagcccagggccctggaaaggtttttagcctttaactgaccaaaaagtttcacgtttcctcctcaaaaggctaaaaaaggaacccccgttttttctaaccttatgggggcaacggaacccccgttttttacagttcccatgtttttttgggaggagagcgccctcccccggaccaatttttcttcttaaagggcaaaaaaaaaaaggtggccgccggtttttcctttcccaaaa

SEQ ID NO: 100181 - DNA, 442 bp, Zea mays
  Clone ID: MRT4577_22880C.1
cccacaccttcgattaaccctaccggcaggggcatctcgctagatccctgtacaggcactgggctctggttcgggaggcagcattactgattacttgatgcggctcatgccagggatagccagcatgaacgagatgccaattgctgacagagatccctccttcattgggtcttgcgcccggctctaccgcgccgtttgctacctcctcccaactcgctgtgcctgtgtctcacggtcttcaatgcctggtctggtgatatgctccctgaaaagcgacaggaacttgccgcgcctttcactacaccagaaagaactactgctattattggtgctatactgtcgattctcacccttgaagaagatgattattacggagcaaagtggagacatgtgtattgattatgctgcaaccattctacaactgatgctcacgatctaaaga

SEQ ID NO: 100182 - DNA, 719 bp, Zea mays
  Clone ID: MRT4577_22881C.1
attgggtacctcgaggccggccgggagatgttcaaggtatatcgccctacgacagtacatccatctgctcgctcccaacttctgtcataatacgactccatgaagaccagaaacgccagggcaccggattctcgccttcttccgcgcgcttgcatcgctcacgaagtcgtcgagctctcttagacagtctagtatgcctctccacgcccgcatataacccaatgcgaagtatcgaggcgtaggtcaaggaggactgcgtccccggccttcactatcccctcctagctcatggacagtgtggccttcgacaatggctgctaccacgtgtccctgctcttcgactgcgacaacctgggttgcatcgtcgcggagaagcatgtacgaacggacggtggatcatgctgggcatgcgcgcaatgctcattccacattggctgatatgagtgagggtgatattcacaccgacactgtaagaaaaccaggaagccatacactgcatctgcttatagagaatggccgtgttgaaatgcatacagttccgctacgagaaaatcctgcggcggaaggaaattcacaaacgcatgcaggatcagcaggatatgatcatgactatgatcctctgcatggatgacgaatgaggataccaggttctgctgtaatgcacgctcttctctcgaccaccatctatggcaaagattaaaagatcatcaacgatcagc

SEQ ID NO: 100183 - DNA, 332 bp, Zea mays
  Clone ID: MRT4577_22882C.1
cggactctttatcagacccatttgactatccttctatcaataccatcaatcatgatgcatcttattaatattggcaccaaatcaaatctgcaacatcaattatctaactccaaaaaccatgaatctggtgcttgtggttcttgctttcattgctttaatatcaagtgtttcttgtacacagacacgcagctgtatctttcatcaacaacaaattcatcatcatctacatcatccacatcaacatcatccacaaaaacatcaacatcaactacaaccacaacatcatcatcatcagcgacatctacaacaacattttcacattctacctcatt

SEQ ID NO: 100184 - DNA, 246 bp, Zea mays
  Clone ID: MRT4577_22883C.1
cccacgcgtgcgtccacgctatcgaccacgcgtccgcggacgcgtgggttgatacgcttcgatctctctatggttcttgtccccctctgacggagtgatggcctagctaactgaccttctcaacctgaacatgagggactgcaccgacaggatcatggccctgttcatctggagtggaggatccggaatacaccccaggagcaaagcgaggaccgcgataggccacatcaccgaccctagccagct

SEQ ID NO: 100185 - DNA, 316 bp, Zea mays
  unsure (1)..(316): unsure at all n locations
  Clone ID: MRT4577_22884C.1
cactaaccggcacgcacctgcggcgctcgaccagttttttttggtcattggccacgatcgccgctcaagttcggcaagggcctctcgggatgaagagtcactcgtcatcagccatgtccgccagcagagcgccatggaggctcatcgagaacactcggcgacggacgagattcctcatcagaccgggacagaggactcatatgaacggcggcagacggggaccactggactggcatcatcacacacggtgtcttgcgctgggacgccgatcacgctcgatgctnggcgctgctgaagctcgctgggggcagatggt

SEQ ID NO: 100186 - DNA, 660 bp, Zea mays
  unsure (1)..(660): unsure at all n locations
  Clone ID: MRT4577_22885C.1
tctccgcaatactactgccgcagctgctgacttctcctagccggccggccatgactgctcccttactcacgcttgtactcctcctgctgacctcgtcggtggccgtggcgtgcgccagtgccgatcccaagggcgacctcaagcgcatccgcgtgtacatgcacgaaaccatgtcggggccgaacgcgacactgctgacgtcagtgcagtccccgctgggcggcagcgcaacgttcgggcagatcggcgtgctggacaacgagctgcgggacggactgcaccggggtagctcgtcgccgctgggccggttccagggcttgtttgccatgactgggctggcgaacacgccgggccttctgtcagcggtggacgtcgtgttcacgggcgggaagtaccaagggagcacgctggccatgctgggcacgatacaggacttgcgggcctccgtcgagcgcacagtcgtcggcgggaccggcgcgtttcggatggcgcggggttacagctccatggtttacattcccgaggcgagcacggcgaacaacgatgtctacaggatcgactntctttgttgatgtttaggctttctccatggagattcttttatcttttaagagtcgaggaaataaaaggaagagaacaaatgcagaattaactcgtcgt

SEQ ID NO: 100187 - DNA, 240 bp, Zea mays
  Clone ID: MRT4577_22886C.1
tttttttttttttttttttttttttttttttttttttttttttttttttttttttttttttatataacaaccccatgcaaaaacattgcttttgatttgacaataattttttaggggattcaggtcattatccaacctggaattttttttttaagggaagccccaaaaaactaaactggggcatttttttaccacacaccgtacatgcattctttgtacaatcggggattaaacaccacc

SEQ ID NO: 100188 - DNA, 310 bp, Zea mays
  unsure (1)..(310): unsure at all n locations
  Clone ID: MRT4577_22887C.1
gccgcatatgaagtgaaaggcacttncaacaatttatcatcaatggcggccaagatattgtccagggttatgctccttgctctttctgcacctgttgctaacacgaccattgtccctcaatactcacaagctgctatgtctgcccttgttcccccataccttccatcgatgaccgcttcagtctttgaaaacccagcccttcaaccctagcagctccaacaagcaatcgtagcaggcaacctacctttctcaccccttgtgcattcacaatcgacatccctatctttggtgcaatcattgtgacaaacca

SEQ ID NO: 100189 - DNA, 2264 bp, Zea mays
  Clone ID: MRT4577_22888C.1
gggtaccccctcgaggctcggccggatatagctagctagctatcttgctgcctcgagccggccatatataacaataatcgtcctcgatctctcgtccgagatcgatctgcgtgccaagggaagggagatgggggcggcgccgccatcgtcgtggcttattgcgttcatcctgttcttcggcacgttggtagcgttgccgcagtcgtcacacggcggcggcacaaccagacactacaccttcaacgtgacgatgaagaaggtgacgcggctgtgcaccacccgcgccatcccgacggtgaacggccagttccccggccccaagatagtcaccagggagggcgaccgcgtcgtcgtcaaggtgctgaacaatgtcaaggacaacgttaccatccactggcacggcgttcggcagctgcgcacggggtggtcggacgggccggcgtacgtgacgcagtgccccatccagacggggcagagcttcgtgtacaacttcaccatcacggggcagcggggcaccctgttctggcacgcgcacgtctcctggatgcgcgccacgctctacggggccatcgtcatcctccccaagcgcggcgtgccatacccgctcccggttaaaccctacaaggacgtcccagtcatcttcggagagtggttcaacgcggatcccgaggcaattgtcgcccaggcgcttcagactggagcaggcccaaacgtgtcggacgccttcaccatcaacgggctcccgggccctttgtacaactgctccagcaaagacacgttcaagctgaaggtgctgcccggcaaatggtacctgctccgtctcatcaacgccgcgctcaacgacgagctcttcttctccatcgccaaccacacgctcaccgtcgtcgacgtcgacgccgcctacgtcaagccgttccacacggacatcgtgctcatcacgccgggccagaccaccaacgtgctcctgcgcgccgagcccgacgcggggtgccccgcggccacgcacctcatgctggcgcgcccctacggcacgggccagccgggcaccttcgacaacaccaccgtcgccgccgtgctcgagtacgcgccgccgggccacatcaggagcctcccgctcttccggccctcgctccccgcgctcaacgacacggccttcgccgcgaactacagcgccaggctccggagcctggccaccccggactacccggccaacgtgccccgcgccgtggaccgctccttcttcttcgccgtcgggctcggcaccaacccctgccccgtcaaccagacgtgccaggggcccaacgggaccatgttcacggcgtccatgaacaacgtgtccttcaacatgcccaccaccgcgctcctgcaggcgcactacggcagcgtcgccggcgtgtacacgcccgacttccccgtcgcgccgctcgagccgttcaactacacgggcacgccgccgaacaacaccaacgtctcccacgggaccaaggtggtggtgctggactacaataccagcgtcgaggtcgtgctgcaggccaccagcatcctcggcgccgagagccacccgctgcacctccacggattcgacttcttcgtcgtcggccaaggcttcggcaactacgactcgtccaaggacccacccaagttcaacctagtcgacccggtgcaaaggaacaccgtcggcgtgccggcagggggctgggtcgccatcaggttcttcgcggataatcccggtgtttggttcatgcattgccatctggaggtgcacacaagctgggggttgaagatggcatgggtggtcaacgatggcccgttgcctgagcagaagctgatgccgccgccggccgatcttcccaagtgctgaagatccaccgcgcgttgacattgtccaacattatatatgattcgtttctattgcataaacatatcaatggagatacacattgtcgtcgtacatatagcgtcgtacacagcgtttaaagaggctttgtggattttctatgcattgtttcttcttcattcttctaaaggttttaaaagttgtgttttgtgataggaagtcattgttttactttcacatagatttttttcatctggagtagtttgaaatcctttgttgcaattcgaactcaataaatatggtttggaaagaaaacaagttgaccaagtgagaaaaaaaaaaaaaaagcaggagtaagatggcttagtaattgttcatcttgaaattcgaaatcatttgttccaaaaaaaaaaaaaaaaaagcggcc

SEQ ID NO: 100190 - DNA, 132 bp, Zea mays
  Clone ID: MRT4577_22889C.1
gcgtgtattgtcaaggatgttttggggtagcggtgtagtaggcgagggatccgtgggctctcgaaccgctagtggcgagtagtgacccggaaatgggggaggggtagggcaactggccagacgcgggtatcc

SEQ ID NO: 100191 - DNA, 2185 bp, Zea mays
  unsure (1)..(2185): unsure at all n locations
  Clone ID: MRT4577_2288C.1
agagtgattggtacctcgtcggtgagtggcagccagggcagggaagtcaggaggaagattctgctgcaggagcctcagtactgccacggctccgctttcccgtcaactccctgttgctctgctgcacagcaatcgcctcgtttcatagtaaggaggaggaggttgaggcgaagatgatgcagcagatgcagcaggagcagtggaacgccgccgccgcggggctcctccggccgaccaagtcggcgccctgctcgcccatcaagccagcggcggcggcggccatgctgcggacccactccgactccttccacgtcgcgcacaaggtgcccgtcggcgacacgccctacgtgagagccaagcgcgtccagctggtggacaaggatccagagaaggcgatcgctctgttctggagtgcgatcaacgccggcgaccgcgttgacagcgcgctcaaggacatggccatcgtgatgaagcagcagaaccgcgccgaggaggccatcgaggccatcaagtcgctgcgaagccgatgctccgaccaggcgcaggagtccctcgacaacatcctcctcgatctctacaagagatgcgggcggctggacgaccaaatctcgctgctcaagcacaagttgcagcggatccaccagggccacgccttcaatggcaagcggaccaaaacggctcgctctcagggccgcaagttccaggtcactctcgaacaagaagccaccaggctccttggcaatctgggatgggcgctgatgcagaaggagaactacacagaggcggagggggcgtaccgtcgtgcgctgctcatcgggccggacaacaacaagatgtgcaatctgggcatctgcctcatgaagcagggccgcgtgctcgaggccaaggatgtgctcaagcaggtacgccccgcgggggtcgatggtctgcgcggtgccgactctcacctcaaggcctacgagcgagcgcaagagatgctgcgggacctcgagaccaagctcgtcggccgcccgcgcgctgaccagctcgacacgaactggctctacgatgcgctgctgctgggatcgtcctcgagcatctggcagccgcagccgtgcatcgaccaactctttgcggctgtcgtcgctcgcagccaagtcacataacacgctgcctcagcggcaacagcagcagaagccagctcctgtccatgatcccctgggcaacctgaagagaacacggtccggcaattgcatggacaaggcaggagcagtggtgttgtgccgccgcttgcagcgaagcctcatagcacgctgcatcagcagaagccacatagcacgctgcctcagcagcagcagcagaagaagaagccagctcctgtccatgatcccttgggcaacctgaagaggacacggtccagcaattgcatggccaaggcaggagcagtggtgggcaaggcgcaaagcatcgacgagaacagcggcaggaggaagtcgctctcagctgaggacagatggccagagctgcccgaccacagcgcgttcgacgaggccctcgtcgcggatatcctgggcccggtgttcgacgacaaaccaacagctgctggaactaacggccacggcaagctgccggcgagctgcgacacgagcccagcagcgaaggagaagatcagcaagaggctgaggatcttccaggacatcacaaagacagtgaacaatttctgattcggtttcggttttcttcacgttcctactcacaacaggcaggctcgaggtggcgatacacagagaaggagaaagagcttgttctcctgagagctcctgtctggcaactaaattaaacagggattctattcagtttaaatttaatgctgattttgattcaatttattaacaccaaaataacagctgattctttttccacgaggctctccttgtaatagaactatagaagtgggctgctgcatctcgttctaatttcgtttcttttgaataacaaaaagttcatttatgtttaaatttaatgctgattttgattcaatttattaacaccaaaataacagctgattctattacaggtgagcctcgtggaaaaagaatcagctgttatttttccacgaggctctccttgtaatagaactatagaagtgggctgctgcatctcgttctaatttcgtttcttttngaataacaaaaagttcatttat

SEQ ID NO: 100192 - DNA, 360 bp, Zea mays
  Clone ID: MRT4577_22890C.1
gcacaaagcaggagattgcatttggacagttctcaaaggccgcgtgtacaacattgctccatacatgaaatttcatcctggaggtgttgatatgcttatgaaagccgctgggaaagactgcactgctttgttcagtatccttctattattatttctgcactgtgatacattatcttgctgcttgtgggctcatactggaacaccattcttattattatgcaagctggtgtggcctaaaggcatgatatacaaacagcgatcactatgatgcctttgcagcttttgctcaatctcttcgtgattgttgattgtgcatctgcttataattcttgattgctccttgactagactattagataa

SEQ ID NO: 100193 - DNA, 286 bp, Zea mays
  Clone ID: MRT4577_22891C.1
ggcttacatccatattagccccaaaaggagcaaatggctgggttacaatgtagaagagagggagcaacacatcaaagatatgcttaagtacattgacgattttggcgattctcttgcaataagggccgagacgtattacaaaagacgacctttgcttgtgaatcatgctgagatattctatcggaactaccgtctctcttgttgagcgttatgaccacttgactgataatctgtgcaggagcatttagatatcaccaccgcattctgatggtcctggtatattgat

SEQ ID NO: 100194 - DNA, 709 bp, Zea mays
  Clone ID: MRT4577_22892C.1
ttttttttttttttttgaccttcgtatccttttttttctactttatttcgtagccaatgaagaaaacaacaacaaatgtaatcaagaacagatagagtagcagtaatagtagtacacatttagaagaacaagacagaaacagttgtacacaaaaaaatagagagaaagagagagaaaaagagacaagcacgagttttatgtgttcaaatatctcttttttcacatacaaaacaagaatgtcattctacaacaatataacaagtagtatatagaaaaaaaattctgaactcgacaaaggaaaaggataaggaacggttagagatttaattttattttagtttatttattcttcatcgtcttcatcttcatcatcgtcatcatcatcatcatcattatcttcatcggatgatttcgattttgctgcaggtttctttttaccacctttagctggtgcagcctttttgcttccacctttagcagcacctttaccgcctttggcaggtgaactactagcaccaccaccaccgcttttcttgtattcagcaacacgtacttcatacttttgcttttcaacagcggctttttgttcataacgttttctaacatcatcactaacttttttccatcttgcaccgatttcttttgaaatatcaccaacggataatgatggactttttttcttatatctggtcgtcatcttgtgaaaaga

SEQ ID NO: 100195 - DNA, 262 bp, Zea mays
  Clone ID: MRT4577_22893C.1
tttccctgaaaacctcacatgcatacatacacatatatacacacacaaagagagttaatcaactgatagtgtttccttcatttctgatatagaattgcaattttaacacacataaaggataaacttttagaaacttatcttacaaagtgtattttataaaattaaagaaaataaaattaagaatgttctcaatcaaaaaaaagaaaaaaaaaaacatactacggggaattctcaataatatttaagaagtattgggattctg

SEQ ID NO: 100196 - DNA, 886 bp, Zea mays
  Clone ID: MRT4577_22894C.1
ggtgaaggctgctatttcattcatcaaacccgatttccttctgctacacaggcttgccccaatgtgattggtgacaggcaatgtggtaaaaaggtgacaaagtctgattcaggcaactggctatgtgacaagtgcaatcaagagtttccagagtgtgattacaggtatctcctacagttgaacattcaagaccacacgggaacaacttctgtgacagcatttcaagatcgtggacaggagatacttggttgctcagctcgagagctcaacatttttaaagagaacaaagatcctcgctacacagatgtcttgatcaattgcttgtatcagaactatctgttcaggctaaaagtgaaagaagaacaatacggcgatgtacgacaagtgaaaaacactgtggccaaggtggagagggtggatcctttggctgagagtaaatttctgcttgattccatttcaaggtttataccatgagagttttgttcttacatctatcagctgctggtaagtgtgttgcccgcttagaagtgataattaatatgtagctttccctactcacacgcccggaggtttctttctcggatagaattctatcattcagcagtaaagagttttctccacttttggtctgccagatacctgcagcttgaagctatgtgttctttcataattaactgaacacttgtaagtgtgattatgagagttctgtttagctcagctactttgtggttactactattttggtttagtttggtatagtcggacattcctactgctccaacagtgggcatgaatcaaccattaatgcgatggagaaaccattgtcttttgtgccaaagcaatttataaagcacaagtcgaaacaagagagctgtatttacagggc

SEQ ID NO: 100197 - DNA, 309 bp, Zea mays
  Clone ID: MRT4577_22895C.1
gttatttgtccgtgcgatccgctacctggttagtggcatgtgcggaccgcaatacttcaaacgaccacgacttgagacgtgatcatcatcgtggctgctataggaccctgtcgcattgcgagcaggcctttcacttgcttctctctgtaagctctgcacgggacatggacttcttctataacaggtactaacacatctgcctgaccaggactggcaccttaaaattgcactgctaactgatcacaaagaaggaggtcttcaggcacgtataggagtactcctagaacggcaccctctgttaccgggact

SEQ ID NO: 100198 - DNA, 129 bp, Zea mays
  Clone ID: MRT4577_22896C.1
cgggctcaaggcaccacaacttgatttacttgtgctaactgggatcaacggaattggttttggcaaacttttttccttattttcggaacaaccatttttttcatttaaaccaattgtttaaattgaacc

SEQ ID NO: 100199 - DNA, 360 bp, Zea mays
  Clone ID: MRT4577_22897C.1
atggaatggggatttttatttatttttctttaatttaaaaactgaacaagggttataaaaaggcagggcggaccccccattgtaaaagaaacctaaaccgcgaagggatcccgcccgtaaggggcgggacacccccccggaataacccaacaagggggtaaaatggggaccccaaaaacgggggaaaaaaaaaaaagggccaaaaaaaggtttaaacattcaaaatatggtacagggggggaaaaaaaaactcctgaaaacccaaaaaaaggggggggggaataaaaaaaaggggcgctccccccaaaattgggtaaaagaaggattttttttccgggaaacaccggggggggaccaaaa

SEQ ID NO: 100200 - DNA, 278 bp, Zea mays
  Clone ID: MRT4577_22898C.1
gcctttcttttctctccggagcgcaggaaccacggggggggggttgatttgacatgggctttggtcaaccaacaccgggcgctccaagattgccagctgactatgctggttggatgggggacataaaacctttgtcggacttgagggatacatacaaggctgatacgggcttctatgttgaagagacggccagggttgcgcacgatcattcctggaaccatgggaagcctcttctgcttgtgctacatgggaggaataccgactctgggaatttctca

SEQ ID NO: 100201 - DNA, 190 bp, Zea mays
  Clone ID: MRT4577_22899C.1
atatatgatgacgctgtgtaggatgctttatgttaggcctgtgcgtaagccatgatatttcccattattaataagcgattactgagacagacctgatgctaatccaatgggcgattatacagttaatgcataaaaatgatgaagatttaacgtcatgctactgcacgtgtggattttcacgattacccat

SEQ ID NO: 100202 - DNA, 1845 bp, Zea mays
  Clone ID: MRT4577_2289C.1
agcgtactgccaattcggcacgagggtttcatacagggcagggaagtcaggaggaagatgatgcagcaggagccctggaacgccgccgccgccatggggctcctccgcccgaccaagtcggctccctgctcgcccatcaagccgccgccggcgaccatgctgcggactcacttccacgtcgcgcacaaggtgccggtcggcgacacgccctacgtgcgagccaagcgcgtccagctggtggacaaggatccggagaaggcgatcgcgctgttctggagtgcgatcaacgccggagaccgcgttgacagcgcgctcaaggacatggccatcgtgatgaagcagcagaaccgcgccgaggaggccatcgaggccatcaagtcgctgcgcagccgatgctccgaccaggcgcaggagtccctcgacaacatcctcctcgatctctacaagagatgcgggcggctggacgaccaaatctcgctgctcaagcacaagctgcagctgatcaaccagggccacgccttcaacggcaagcggaccaaaacggctcgctctcagggccgcaagttccaggtcaccctggagcaagaagccaccaggctccttggtaacctggggtgggcgctgatgcagaaggagaactacacggaagcggagggagcgtaccgtcgggcgctgctcatcgggccggacaacaacaagatgtgcaatctgggcatctgccttatgaagcaggcccgcgtgctcgaggccaaggatgtgctcaagcaggtacgccccgcggcggttgatggtctgcgcggcgccgactctcacctcaaggcctacgagcgagcgcaggagatgctgcgggacctcgagaccaagctcatcggccgcccgcgcgctgaccagctcgacacgaactggctcttcgatgcgctgctgctgggatcgtcctcaagcatctggcagccgcagccgtgcaccgatcacttgctgccacctcctgttccggctccagccacggcgccgcgcggccacttcgccgatgaaaacgccggtgtgagcaagaagctggcggtgctccaggagaacatgcttaatgtggacgcgcagcccttctactctttgcgggtgtcgtcgctcgcagccaagtcacataacacgctgcctcagcggcaacagcagcagaagccagctcctgtccatgatcccctgggcaacctgaagagaacacggtccggcaattgcatggacaaggcaggagcagtggtgttcaaggagcagagcatcgacgagaacagcggcaggaggaagtcgctgtcagctgaggacaggtggccagagctacccgaccacagcgcgttcgatgaggccctcgtcgcggccgtcctggctccagtgctcgacgacgaaccaacagctactgaagtcaagctgccggcgagctgcggcacgagcccagcggtgaaggaaaagatcggcaagaggctgaggattttccaggacatcacacagacagtgaacagtttctgattcgttttggttttcttcaatttcctactcacaaattaatcagggaaggagaaagggcttgttctcctgggagctaaattaatcagggattcgattcgatttttaatttgatgctgattttaatttaatttattaacacacaaaaataacagctgattcgcttcttcagcttgacactttagaagcgcgcgcttcctttaccgcaagattctcctcgtaatagaagtggactgcatcttgttctaatttcatttcttttgaaataacaaagttcatttgtgtaaaaaaaaaaaaaaaaaaaaaaaaactcgagagaaggcgccggtaccc

SEQ ID NO: 100203 - DNA, 2019 bp, Zea mays
  unsure (1)..(2019): unsure at all n locations
  Clone ID: MRT4577_228C.1
ctcgaggccggccgggccggggattccgtggccattatctactcctcggctcctctcctcgcagaagaatttgttcccccaatttggagttggaaaagcgtcgaccccagaaaacgggaggcctcgacctcgctagtctccgttccattcgaaaagccatcgcctggtgagcgagaaggggaaggtcgatggcgacgtgctcccgcccgctcttcgtctccgactcggcggcctccgcctcgccgtctcgggcgtcctttcgccgccttcacacggtcgcagtcgtatcgatttgggaacccctgccccacccaccactgcgggctgcagcctgccgtttcgctcgaacgaagcaatgctccaggagatccaccgagtgtttggcgagtggaccgtccgtttccagattgacgcggccaataaggagaatgctgtcccgttactcttcactgatggtcactttgcacggcaacctcagccggtgctacaaggccatgagcgcgctgcggccagatggggtatccaggcacttcatgtccgctggtggtttcgaacgcgtcgttttaggggtggtgctcgtcatgtccatctcgggagcttcttatacagcaccgtcatcatcggcgctcacagaggaaaacttgcttttcctggaggcttggcgcgcggttgatcgagcatactatgacaaatcttttaatgggcaaagttggtttagataccgtgaaaatgcccttcgcaatgaaccgatgaacacaagggaagagacatatgcggcaatcaagaaaatgctttcaacattggatgacccttttactcgtttcttagaacctgagaaattgaagagcttgcggtctggtacgcaaggcgcactcacgggtgtaggtttatcgattggttacccaatggcaattaatggatcaccttcaggagttgctgtcatgacagccacccctggtggtcctgcagaaaaggctggcattcttcctggagacaccattttggcaattgacaacagaagcactgaagatatggatatatatgatgccgcagaacgcttacagggccctgaaggaagttcagtagatttgtctattcgtagtgggaccaataccaggcatgtcgttctaaagagacaaacagtcaatttaaaccccgtgaggtcaaggatgtgtgagattccaggctcaaaagatagctcaaagatcggttacatcaaattgacaacatttaaccaaaatgctgcagaatctgttaaggaagccattaagacattgagggacaacaatgttaaatcatttgtgctggatctgcggaataacagtggtggcctttttcctgaaggaattcaaattgcanagatttggatggacgagggtgttattgtgtatatgcgatagccaaggtgttcgtgacatttatgaggctgatggcgctgatacaattgctgcatcagaaccgttggttgtgctggtaaacaaaggaactgcaagtgcaagtgagatccttgctggagcgctgaaagacaataagagggcagtcgtatatggggaaccaacatatggaaaagggaagattcagtcggttttcggattatctgatggatctggcttggctgttaccgtagcacgctatgaaactcctgcacataccgacattgacaaggttggtgtgattccagaccgaccactgccagcttcatttcctaccgatgaagatgccttctgcagctgccttagggattcaacggctgcttgcaatctgaatgctgctcagctgtttgcaaaatcatgaccaggcccttcattcaacattttgggtcttgggcgttgtacagataaccgtggtgtttcgtaggagctgcttgtgcgtggtgtgtgggtagtccgtaattcttttcattagcattgatttttgtcccagttttatcgcctgtgaaatgaaagcattgtttctgcgtgaaatcacggtcgtgttgaacatgcacttgatgcaacaattttgaatggaagcactaag

SEQ ID NO: 100204 - DNA, 610 bp, Zea mays
  Clone ID: MRT4577_22900C.1
aggagcccaatgcgctgctcgagggcgtcgccgtcgcgggcctcgtcgggattatgcgccagcgcggatcatgtgcggagcgaggcaggttcatatccaaacaagaagccacgatggaatctggatttcccctctatctgatggaatctggatttggtgccagtctgttttcctgtgattttgggataccagccccattccccttcatggagggtatgcgttgctgttggtcggcacactggaatggaacagatatagacagaaccttcaggttcataagcaaggagttgcgcttgaccgatctatggatctctctagatgcactgactaaggtgaattgaaagcggaactagacatgatgtttgaattcgagggtgaattagtatctgcaaaccaaaactggcagattgtttataccgacaacgagggtgatatgatgcttgtgggagatgacccgtgggagaatttgatgtggttgtgtatgatgtactttatattttggcatactatgcacaaaaacaaatgccttctatgaccatcgtgatttatacattttcaaacaaaattttatgataaaaaaaaaaaaagggcggccgccaccgcggtggag

SEQ ID NO: 100205 - DNA, 440 bp, Zea mays
  unsure (1)..(440): unsure at all n locations
  Clone ID: MRT4577_22901C.1
gggtggatatctggtactgtatgttagtgaagaaggagggttcgatacaacatacagtacacagtccagctgatgctatcgtaaancatttctgaaacttcacgttacattagatcaaatcgacctgggaaagcacgggtggaagacaacaaactcttcgttgatattgatgtaataatggtattcacaaagcacactgagacgacacaacatcttatcctagagtacctgtaccagccaggttagaagccagaaactctaaaagttccctagctctaccacttgcatcctgcaatctctaaatcctctttggtttgatgcctatctcaatttccttaagcttcagctccagctccaatcgctcattttccagcgccatcctttcattctccagcttcattttctgcagctccctgtcctttttcttgctgaacttcagc

SEQ ID NO: 100206 - DNA, 295 bp, Zea mays
  Clone ID: MRT4577_22902C.1
gtaccctcgggctcgccgggactcgctcgtcggctcggcgcgcttcctgattggttgaccaccgcctcctgtccccgccgggcgggtccccctccatgttcgccgtcggcgtgcgccgcccctccggcagggtccacggcctcctcaacgtggccgcgagcctcgtcgcggtgcccccgtccccggccgcctgccacgccctccgcctctcgccggccgtctccctcatcggggggggcggggggcctaccccaagccgtgtgcttcgagttctaaaccgtgcgcaccggatacc

SEQ ID NO: 100207 - DNA, 562 bp, Zea mays
  Clone ID: MRT4577_22903C.1
ggtgttgggtttttttttttttttttttttttttttttttttttttttttttttttttttttttttttttttttttttttttttttttttttttttttttcattttattctaattttttattttttttttctttttcataactcatttgggggggggggggacttaaaaaaaaaatcttagtttttaccattggattacaaaaaaaaaccaacacccccaaatcttttacatccttctctaaaacacaagaactatttttttccccctggcccaaaaatcttgcttttttatcttccccaaaacccttttgggcagccccccaaaaataaccaacttgggcaccctaaacccgggcattcttttttggcaaaagcccaaaattttgttttccaaaaccccccccccccacccttgggctgctgccccaaacttaaccgttaggaacccccacccccacttttcccacccctcgaaaacccttgaaatcaccgagacctccaccaccttccaaaccccccacattatcttctccacctgcaggctaaaaaaccccccccctac

SEQ ID NO: 100208 - DNA, 907 bp, Zea mays
  Clone ID: MRT4577_22904C.1
ggataaccggcagggtataaaatgtaaccctcattatcctaagccttttgaaccttgcccttaacaaagttagacaatcttttaggagcattaagcttgacattgtctaccttttggaagccaatgccatccttaatgccagagcgtctcccactatagagcatgcttctagcaaatttaaatttttcattttctaagtcatgttcattaatcttagcactaagttgagctatgtgatcattttgatgtttaattaaagctaggtgatcatgaatatcatcaatattatatttctacatctagtacaaatagtaacatgctcaatggtagatagtagagggtttgcaaacatttaattcatcaatcttagcatgtaacatgacattttcatttttaatattggaaataacatcattgcaaatatttaattctttagccttagcaattaatttttcattctcaattttaaggctagtgagagacgcattcaatttgtcaatcttagtaatcaaattatcattatcatttctaagattaacaattgaatcatcactaatatctaacttctcaaccttagcaatcaattttgcatttcatttctaaggttggagatagtgtcatggcaagtgcttagctcactagttaaattttcacatttttctatctcctgagcataagcatttttgactttaacatgctttttgttttccttaataagaaagtcctcttgggtatccaagagttcatccttatcatgaatatcacctatcaattcattcaatttttatttttgttgcatgtttaagttggcaaaaagggtgagaacatcatcatcattaccacatcgactagaagttatcctcgctcactaggatgtgtgctatattctagtgcaggctctagagtc

SEQ ID NO: 100209 - DNA, 221 bp, Zea mays
  Clone ID: MRT4577_22905C.1
ctgagatgctcaaggtagctcacgagcgtctggccctcactgtccgtaccgctggcccaccctgatcttctgggagaggtcggagtcggagcacaaccgtccaaccctagaatgatcgtatcactactcccgagcctctcgttagcaacagaaaccgtagttagctcgcgatataactcctgccttcaaatcattcggccagactcggctcctggtgctag

SEQ ID NO: 100210 - DNA, 550 bp, Zea mays
  Clone ID: MRT4577_22906C.1
ctattaatcatacaatatacttgcatacataagagtcgtacaacaaagaaacaagagaaatatattgcataacttagcccaaagttccaaaagatatctatattaggttctggataccaatatccaataaagcctcgtatgttgtttgtttcatcttgaactttttttttgctccggtacacgtttacagatatgattttcaagcttgaagctttatcaaactgttacagttagacatcgtacaatggtggaaggttctttcaaggtaatgacaatattagaccacaggaccgtcccccaaatctttcctccttccctcctttccaatctgatctccgtgcaacagattttggttgaacccttctcaaggttaaacataatcgcaagatttcccccgagattcgacattctcgagccatcacgcttgtcaggaagatcgtcgagacccttcaagcgatcccaaaccatggcaattggatcaaacacccatattctattcttgctaccaaaagtggtaattctttccatcaatgacgcaagaaccaacact

SEQ ID NO: 100211 - DNA, 419 bp, Zea mays
  Clone ID: MRT4577_22907C.1
atttctaaaaaaaaaaaaaaaaaaaaaaaaaaaaaaaaaaaaaaaaaaaaaaaaaaaaaaaaaaaaaaaaaaaaaaaaaaaaaaaaaaaaaaaaaaaaaacccaaaaaaaaaaaaaaaaaaaaaaaaaaaatttttgccttccccggggggcctttaaaaggggcaatttttgcaattttccttcccccggggggccgttcgaccttccttttaggggccccatttccccttttaggggggggtttaaaatttcatgggccgggtttttaaaccgtggggctgggaaaacccttggggttccccattttaatcgcttggaagaaattccccttttccccatttgggttattaccaaaaagccccccccctatcccctttccaaacatttcccaaccctaattggcaattgcccccccct

SEQ ID NO: 100212 - DNA, 383 bp, Zea mays
  Clone ID: MRT4577_22908C.1
gttgtaacacaccaccgcgtggtttcctaacaaaaaaacaaatcctattcaaaagaaaaaccaacctttgatttaacaaaaccaaggaacccaccccctcctttggaactgaaaacacaacacggaactgtcctgtctcaccccataaaccaaaccgtccaccatgtcttaaacagaaccaacggggcgtgatcacataaaccacacgcccgccctgaaaaaaaaaatggaatcctttctaactgaacttccctcccttgggttccttccctttccggaggaaaccaatctctccggacctaacaaaaattacatagccaggcggacctcacctccggggagggaaccaaacccccaccctgtattatattaacccggacccg

SEQ ID NO: 100213 - DNA, 1130 bp, Zea mays
  Clone ID: MRT4577_22909C.1
ctgacagaggcgccattttcctcggcaattcacatacggggggagatggggacacagagctattattaggaccattatggcgcatatctatacaaaagcattccgtttgacacccaaatcgcgattttgtagtattatttgtatgttttggtttcggtgctaagcatgatttgatgagtgccatgtaactgatactcgctccgtaattttttttatttgacgtgttttagtttgaatatgaactagcaaacgataaatattctagaaaaaagtatgtgtagtacacccatctgtgatcatgatatgatcagatcacggggggcaggacggtggtacaagataaaagtggttttgggatctagagaagatggcgacgatgtagctgctgcctgcatggatgagcttccggttaatgcgcgttgctttcacgcgcatgcttgcggccagtgcccgtccttctcgctcaatagggcggatgtggtcccgcccagggcacaatccgatcgctgtggtccgggaccgggaattggatcccattccattagcttattagattacgatgggattcagacttttcagcaagctcgcaagttttgtgatgcaaaacatcggtttaacgttgttcgaacctttttacagacgcatcatcctatgtccaaccccaaacctgacaatggcactcattgctgtgtaattagtgcgacagttgctgatattgctcctcgatcctgtttcccgacgtggcggtttcatgttttcgttccctttctttattctaagtcaaacattttttgttgttctaaccatatgtatatataaaaagtacgccgacgtttttttttaaaaataatggctggcttcaccccttacaagaagaaggggaatcaatataaagtagaacgatccaaacgcaatcaccgtttaacaaagccttttttttgcatagaaaaatccggctctccaaaaagaaaacgtccttcgtggaaggcaaacggaaaaataataatactacatccccgttggttgtgatgtgcaacatgcttggatgaatcaacttctggtcatcacacatcacaagaataagacattactctttttttatttgtcacgttttagtctaaatatacgat

SEQ ID NO: 100214 - DNA, 2142 bp, Zea mays
  Clone ID: MRT4577_2290C.1
ccgggcgctttcccgtcaactccctgttgctctgctgcacagcaatcgcctcgtttcatagtaaggaggaggaggttgaggcgaagatgatgcagcagatgcagcaggagcagtggaacgccgccgccgcggggctcctccggccgaccaagtcggcgccctgctcgcccatcaagccagcggcggcggcggccatgctgcggacccactccgactccttccacgtcgcgcacaaggtgcccgtcggcgacacgccctacgtgagagccaagcgcgtccaggtaagtgtatgcgttcatgcgtttccttatttcttcccggggatgggttcgattcgatctggtttggatttcctctgcggcggtgcagctggtggacaaggatccagagaaggcgatcgctctgttctggagtgcgatcaacgccggcgaccgcgttgacagcgcgctcaaggacatggccatcgtgatgaagcagcagaaccgcgccgaggaggccatcgaggccatcaagtcgctgcgaagccgatgctccgaccaggcgcaggagtccctcgacaacatcctcctcgatctctacaagagatgcgggcggctggacgaccaaatctcgctgctcaagcacaagttgcagcggatccaccagggccacgccttcaatggcaagcggaccaaaacggctcgctctcagggccgcaagttccaggtcactctcgaacaagaagccaccaggctccttgtaagtgcactcatttctcataatttcttgctgaacaaagcttaaatccaactcaaatacttggccactccaggcctccagctttaaattcatacattcaacaactcaagtgctcaatctttgttcgctggtgatcaatcttgttgtgcagggcaatctgggatgggcgctgatgcagaaggagaactacacagaggcggagggggcgtaccgtcgtgcgctgctcatcgggccggacaacaacaagatgtgcaatctgggcatctgcctcatgaagcagggccgcgtgctcgaggccaaggatgtgctcaagcaggtacgccccgcgggggtcgatggtctgcgcggtgccgactctcacctcaaggcctacgagcgagcgcaagagatgctgcgggacctcgagaccaagctcgtcggccgcccgcgcgctgaccagctcgacacgaactggctctacgatgcgctgctgctgggatcgtcctcgagcatctggcagccgcagccgtgcatcgaccatttgctgccacctccggctccggcatcaatcccagccctggccccggcgccgcgcgaccacttcgccgatgaaaacgccggactcagcaagaagctggcggcgctccaggcgaacatgcttaatgtggacgcgcagcccttctactctctgcgggtgccgccgcttgcagcgaagcctcataacacgctgcctcagcagaagccacatagcacgctgcctcagcagcagcagcagaagaagaagccagctcctgtccatgatcccttgggcaacctgaagaggacacggtccagcaattgcatggacaaggcaggagcagtggtggacaaggcgcaaagcatcgacgagaacagcggcaggaggaagtcgctctcagctgaggacagatggccagagctgcccgaccacagcgcgttcgacgaggccctcgtcgcggatatcctgggcccggtgttcgacgacaaaccaacagctgctggaactaacggccacggcaagctgccggcgagctgcgacacgagcccagcagcgaaggagaagatcagcaagaggctgaggatcttccaggacatcacaaagacagtgaacaatttctgattcggtttcggttttcttcacgttcctactcacaacaggcaggctcgaggtggcgatacacagagaaggagaaagagcttgttctcctgagagctcctgtctggcaactaaattaaacagggattctattcagtttaaatttaatgctgattttgattcaatttattaacaccaaaataacagctgattctttttccacgaggctctccttgtaatagaactatagaagtgggctgctgcatctcgttctaatttcgtttcttttgaataacaaaaagttcatttat

SEQ ID NO: 100215 - DNA, 232 bp, Zea mays
  Clone ID: MRT4577_22910C.1
caaaaacaacccgcactcgcccaaaaccctactgctcccgatccgctcctgcttggacgagatcactatcgacgacaccgctttcgacatctacgggtggagcaagcgaggaaaggcagcaagcgagagcgatccgcgcgctgaaccctaacggcgaggagcttaacacgccggcagtgctgcacatgaacatcaacgcccacgaggcatctacagcactcacggaacacca

SEQ ID NO: 100216 - DNA, 224 bp, Zea mays
  Clone ID: MRT4577_22911C.1
attacataatacggtaacagttgaactggaacaagaaacaagcggtggagaacattgatggcactacccagctgtggtggtgcaaatcaaatgatttaaatcacatgacacaaacctggtcttaaatgaatggtacatcatcaggcgctgtgagacttcggagagtggaactattagaagccaggtacggttgacaacaacaagctttggacgtgcccgaatta

SEQ ID NO: 100217 - DNA, 1923 bp, Zea mays
  Clone ID: MRT4577_22912C.1
cttttcctacgcctgggcggacgcgtgggcggacgcgtgggcggacgcgtgggcggacgcgtgggcggccgcgtgggtttcctaaacccgagggcctccatccctccacgttctcagaaacgtcgtcgcccacgcgtctataaaccacaccaatcttttggcccttcgcttctccgttctcccccaaccaattcgccttcacctcgccgcttcctccttgaccgccaccgttgacgtcgtcttccggcgaggtagctcgccggaagacctcacctggacttttccgacgcaccctccacacactctttaaccctccggaatggccgcctgcttctagctcgtcgacgccccaatctccgcttgcttcctcgacagccccatccgcctcttctcgctctcgctacggctcctctgcctgttcgccatggcgatccgcatcaccgtctcctactccggctacgtggcgcagaacctcgccgcgtcgctcggccaccgcttctcctccgcctccgcctcgggcagccgcctcctccatgacggcgcctggcgccccttctgcatcttcacctccacccgccagcccgagcagcaccgcagcagcggcagcgaccgccatgacggaggcgactacaaccacccgaagccccaggccatcgccgccggagctcactcgttgctgctcacgcgtgcgtgcttatcgtccaagtcgccgccgccgtctcttgccgtggggctgctctcggtgcttgcgcagaggacgggaccgacgcctggaaccaccggatcggcggcatctctctcagtctcgtcgccgatttccctcggtttcaaccccacctccttcctcccgttcctgcagacagcgaggtggctcccgtgcagcgaccttgccacctcgtcgtcttcggcaccctcttcccctccccgctcgctggcgccttcggctccccccaagaaggcgttgattggtgcttctgctggttctaccggaattgcgacgagcagtggtgctggtgcagcgatgagcaggagcaactggctgtcgaggtgggtcagctcctgctccgatgacgccaagacggcgtttgcggctgtgaccgtgccacttctctacgggtcgtccctggccgagccgaagtccatcccgtccaagtccatgtacccgacctttcgatgtcggtgatcggattcttgctgagaaggtctcatacatattccgggatccagaaatttcggacatcgtgatcttccgggctcccccaggacttcaggtttatggctacagctcaggtgatgtgttcatcaagagagttgttgccaagggaggagactatgtcgaagtgcgtgatggcaagctgtttgttaatggagtagttcaggatgaggattttgtgctggagccacacaactacgagatggaaccagtgcttgtgccggaaggttatgtgttcgtgctgggagacaaccgcaacaacagctttgattcccacaactggggtccacttccagtgaggaacattgtcgggagatctatcctccggtattggccgccatcgaagatcaatgatacaatttatgagcctgatgtgtcccgcctcgcggtgccgtcctcgtagtagtcgctgcagtgatgctggatatccagtgtgtgtgtacaatgaccttattacttcgtggagcctcatttgatgagttgagctccagttccaattctctcagaatattttgtctcctgagtgttccctgtaaattctctttgcctgacagatttgttttccctgccggttggcagatgcttgttcaaagcacgggaaagtgtagtaccttgcatcttgcaatacaaactaattaaaccggttacccttttttttcttttatcgagattaaaaaaaaaaaaaaaaaaaaaaaaaaaaaaaagcggcc

SEQ ID NO: 100218 - DNA, 311 bp, Zea mays
  unsure (1)..(311): unsure at all n locations
  Clone ID: MRT4577_22913C.1
ccctttccagttgtttaccaacatagaaatgccnaccggatgtctcatataaaagtttgagggcatacnacacancaaaccctntaaaatgagatacgcaaatcatcagaacttgtcaaaaaagcttacgcggatgaatccacttccggcaacaaagaccaagatatgatccttttgccgtatagagaggccaatgtgttggtactgattgagaaaatggaacatctcgaacagattgtgaaagtagcatcaaacaccatcatagagaaagacctaatactttccaagcttcaaatactcattcagtactt

SEQ ID NO: 100219 - DNA, 197 bp, Zea mays
  unsure (1)..(197): unsure at all n locations
  Clone ID: MRT4577_22914C.1
cacgcgtccnttannttaaattgattttcagagcaacagccctatgacccgagaagaaatcgcctggggggtcgtaacagtgctgtgaatagaccgttgcaacgatataaccaagattaaatcttccagcgtacgtgggacccattgactcctggatgggggcgacgcgggagtctgctgttttgctgccatgcttc

SEQ ID NO: 100220 - DNA, 1757 bp, Zea mays
  Clone ID: MRT4577_22915C.1
gaagtcagccgaccccgatccccgactcacacggtacgcgcttctcctcctcgcttgccgccgccgccgccgccgccgccgcgatggaaaaggagaagctctcgttctccatatcctcctcgaagcagcggccccccaagcctcccgcacgacctgcggccgccgcagacgacgatgacctccgctccgcgcccgctccgggccagcagtacgtcaccgagttcgatccgtcccaaaccctagccgccgcctgcgcggcgcgcgccgtcatcgcgccgctccccaactccggcaacttcctcacccaccgcccacgcaaaccgtcctcgctccccacccctgaggaggaggccgccctcgccgcggaatccggcggctggggccccgccttcgtcctcgacacctcgaccgctcccgaagacccatcatccaaaatcggctacggcctcactcgccgcaacggcgccaccgacgctgctgctgccaaggaaccggagaaggcgccgccaccgtcaccgcctcgggccactgatgctgcctccgctgccggcaacctcatgctgcagcggtacaaggaggacatggaaggccttccggagcaccgtggaatggacgagttcaatgagatacccgtggagggatttggcgcggctctccttgctggatacggctggacagaaggtaagggcattggtaggaacaataagacgggggataccaaagttcttgaatacgaccgccgtgctggcacacaggggttagggtacaacccctccgaagcagaccctaggaagactcgttctggcgactggattgttggcaagaaggtgtcagagaacgggagtacgaagagagatcgaggcagtagagataggatggaagagagcgattctagtgcccagaagaagagatataatgaggaaaggtctgagaaggagggccgtgaaaaggtgaggaatggccgtggtagccgagaaggcacaagtaatgcaagtgatactcatagcaatgtacggtggttgcagagccatatcagggttcggattgttagtcagaaactaagcaagaggctgtacttgatgaagggtaaggttgtcgatgtggtggggcctacaaaatgtgacatcatgatggatgatggatcagagttggtgcagggcgtggagcaggatatgcttgaaactgtacttccacggacgaacgggcgggtgcttgtgctttatgggaagcacaagggtttatatgggcacctggtagagaagaattccaaagaagagattggattggtggaggatgcagatacaaaagatattgtacgtgttagatatgatcagatggcagaatacactggagatccagagttgcttggctactgattaagttttttggggaggatatgcttaccgggagccttctgctatgcttggtattatatttttcttctttacaaactgtcaagaattgctgcaatgtaaaaccttgaacaaactggcgggttgctatgcatttcttacttgtctttgtaagcttgctacttatttgtcagccctcaagttagtaatcatctaggagtgaccactaatgttggagtggggctcttttgataaatagtggaatgtttctgagtgtaactgtttgtttctttgtacgcgaaagaagctgtagttttgtgttctattaacttcatgtcgacctatgttattttgttctctcttgcttcctttcttgagttcttataaattgaagagggcttcttg

SEQ ID NO: 100221 - DNA, 169 bp, Zea mays
  Clone ID: MRT4577_22916C.1
cattttgcttccttggggcgcctcaatttacttttgttgtgaccccaatttgatcccaacagaggaccccaatcattcattaccccgctaccccttttacacatcccaaaaaaccccctttatgtaaccaacccattaccaatctgcagtccccacaaccttcaaaccc

SEQ ID NO: 100222 - DNA, 681 bp, Zea mays
  Clone ID: MRT4577_22917C.1
ctcctataggggattgggttcaacaaaggcggccggggtggtcctctcgcggaccagccgagcgacgaggggcgcggacgtcgaggcagagcgagaaaccgagagatagaggtcatcgccgcgaccgaagtcgcgctcacgccatcacccagccacagacaatacttgagcgcgttcgtcggagcgtgctaagtctttccgtagcctagccgagccaagaattttagcagcagtcgaggagcatctcgccggcgagcagggaaagagaaaagacccgccgcaagctagatcctgttcacatcgtcgccaagtccacggagatcagtccagggtgatcgtcggcgagctttgcacgtgttggtatcctcgattcagtgcatgaatcattagggacccaagaattgctcaacggagcaattcctccgccgcggttccacctcctgccatggaccggctccaccacgtcgcttttgctagtaagcagtgttccgtccagttattctattcgtgaaaagcaccagtcggggcgaggaacggagcaccggatggccgtcgtgcgcgacgccggcgagccttaccgccgcagagcagaggccgccgccgttgctcagcatcggaggtcggagatgtgccttggtttgtccaacgatgaatccatggctgagattacctcgtggggga

SEQ ID NO: 100223 - DNA, 192 bp, Zea mays
  Clone ID: MRT4577_22918C.1
cacaaagcagacagcaggatatactctcagcttgtagatcagtagtttttcagagtatcagatttcttaaaacaagtggattcacctatcgtagccaacaaacaggcagtgatgtcacagcagcaacggttgaactttccaaagtgatgcagaggaagatactgattttatcgagcatttttcctttgctat

SEQ ID NO: 100224 - DNA, 264 bp, Zea mays
  Clone ID: MRT4577_22919C.1
gggttaattccttgggggaaaaacaggcccaatttggtaaaacggggcaggcgaaagaaaaacttccagtatccgatagaaaacaacgggttctttgggacagaaatagggttaatggccaggggggcaccaaattaaggtttggttggggaacaaaaaccctactgggatctagacagaccatcaagagctgccctttgctttgttgaaaaaaagggtgaccccgcatttgcacaaggggagggctactaaacccattttgga

SEQ ID NO: 100225 - DNA, 208 bp, Zea mays
  Clone ID: MRT4577_2291C.1
ctacagtaaaatcttggctagtttctaaactggaatggggctcaatatacaaatacatggtccagaaaagaagtaatttacatctaattcagttcagtgtttgaaaaaaacttgacttatacgtatgccacaacatttgaaaataaggacattcgtcaactgctatactagaagtaaagaaggttatatgaggaacacgcgacagact

SEQ ID NO: 100226 - DNA, 406 bp, Zea mays
  Clone ID: MRT4577_22920C.1
gtactctcataacgatcttgaagagaagtccacatctgatgagactgatcaaatggaacaatctctacaacaaattgatcctccacactagcaacaagaacagaactgacacgagcatcctgatgcaaccacaacttgtaagcattgaactaagactcatatgatgccatgagatcatcaaaatcagcgagaaactttgccttgtcttcatcaattgcctttggtatctaagaaggcgagcatggaagcttgctcgtgagaaactcctagaggtgcatgccacacgtggtagcatatgcgaggaacccagacatgatagatggtcccatgaaatagcagtggacaacgaaggacgagagcatcaccgttggaggaaaatggtgacatcttagacaagcagatgatg

SEQ ID NO: 100227 - DNA, 406 bp, Zea mays
  Clone ID: MRT4577_22921C.1
cccacgcgtccgccggattccagagtccttcgctgacatgccttccctcagtgttcttcgtcttgcctataatcgcctcgaaggacggttccccatgaggatcttccagaacagaaacttgacggttgttgatgtcagttataattctaaagtatccggtctactgcccaacttctcatctgccagtattatgacggaactgctttgtagcaacactaacttctctggtcccattcctagttcaataagtaatctcaaagccctcaagaaattaggtattgcagcagctgacgacctacaccaggagcacctccccacttcgatcggtgagctcagatcgttgacatcattacaggtttctggggctggtgtggtaggagaaataccatcttgggtcgcaaattta

SEQ ID NO: 100228 - DNA, 203 bp, Zea mays
  Clone ID: MRT4577_22922C.1
gcacggccggggggggggggggggtgttttgaaatatgccttggttgggtctgccctaaaaaccatgacctgtgtctgcgttggacgccgtttggctctggtcgtgtgtgtccgtcgatgtgctgggtgctgcgctggttattgtttctggtctgccccttttgtggggggggggggctggcgcctgccgctccggtggcttg

SEQ ID NO: 100229 - DNA, 213 bp, Zea mays
  Clone ID: MRT4577_22923C.1
ggtctgattttcatggattttccgtgctatggatggactcccggtgaccatgcgactcctgcaccctcccctccacgagttccttctagaactgaacattgaggacattgtaagtgaattatcgtgctgagacggaagtctatcattaggatggcctcgagctaattgaaaagttttcataagcgcccccgaagtctgtgttctgtggaagcc

SEQ ID NO: 100230 - DNA, 918 bp, Zea mays
  Clone ID: MRT4577_22924C.1
cccgggtcgcccagcgtccagcacgccggagacgagccccaccgacacgcacgctaaaggcagccagccatggagctgctgctcgtcccatgccgcgccgccagcgcccgcccgctacgcgcagccagccccagagcctttcgcggccccggcgccaggccggcagccgccagctccagcaacgccgaggtcatcgacaccacggcgacgacgtcgtcgccggacgccccgaagcagtggcgcgcgggcgggcttgggctggagctgtcggaggagttgcggcgcggcatgacgtggcggatgctggcgcctcccgcggcggcagtggcggcggacgccgcgttcctggggctgctcgagcgcgcgcagcccggggacctgccggcatgggccgccgccgcgggctccgccgtgctcttcgcggcggggctgctcggggtccactacggcttcctgtcgtcgaggtgggacgcggaggagacggggtccgtccttggctgggacctcgccgtgcggcactggaacgtcctttccacggcgaaggaatattcttcttcggtggaggaggaggaggaggaggaggaggaggaggaggagagaagaggaatactacgaagaagacgacgacgaggattaagtagacagtgattagattattaatctcagggggtaaatgtaataacagaccttggttgatctaagaaaccattcaaactcgggacaaatgacctttgaaatgctcgccgtacggtaaattcctgtggatttcaaggggggaactggcgttgggaaggccgaaggggcactatggctaatcctagtgttccctatgatttagccgtgactgtaatctgtaaacattttagagtgtgtttggtagcaaagttttgaatactatggttttgaatactatggttt

SEQ ID NO: 100231 - DNA, 140 bp, Zea mays
  unsure (1)..(140): unsure at all n locations
  Clone ID: MRT4577_22925C.1
actagaaactcgaattgcataacgncacataaaaatctcattctcctagaataaatacagctgatacatagccaataccagattacattgaccagtcgatatcccgacattaggcgcgtgctactggcactaattcagag

SEQ ID NO: 100232 - DNA, 972 bp, Zea mays
  Clone ID: MRT4577_22926C.1
gtctaagtctgcatttgagcatctcaaatatctggaaagtctaaatcttgaggatacaccgctatcagctgaagttatacctcccttggcatcctttgcaacactgaaatatttgtacctgaaaagtgatttcttgtctgatcctgccttgcacgcactctctgctgcctccaatttgatacaccttgggttccgcgggaatatattgtcaagctttgggcttttacagtttgtaccccctgtcacactctgtgtgttggatttaagcggctgttggatcttaacaggcgatgctatttcaacattccgtaagcgtcatcctacgattgaattgagacatgagctcctgcacgaagttgaggaaaattttgttggtggttcccaatttcgtaaacctagacgcagacgatctcctcatgtgaaagcagaagttggaaacagttttgctggctcaagtaggctacacgatatccgttttgtagatgaaaggataaaatacagcaaggaggaatttgtggagctgcaaggccttgctaaaccaaattcgttaatgcttggcgtgtggcttccaccagaactgcgaaggcccaaatgatagttttggatcttgattccttacgcatttactgccagcatatcataatcttccttgagttattcttgatatgacagacttttgagaattaagcatcaagcatgtcactcagttccaaattatagttcactttggttttgtcctaggtcaaacttttctagctttgacctatgcattcaaataaatgctataccaaaatgtatttcgtgaagaatctaaagaaactgatttgatgttctagatggtggtacactttcctttaaacttggtcaaacataaagaagtttgacttatgaaaccaaagttaactataatttggaacaaagggagtacactggagttatctaaaacaaattttcgatcacattagttttaac

SEQ ID NO: 100233 - DNA, 282 bp, Zea mays
  Clone ID: MRT4577_22927C.1
taccgtatcggaattacccggcgccgaaccagcgccagcccgctccgttgttataaggaggtttttcaccgcgcgcgcctctctccgcaagggcgcggtcaccgacgtcgtggcaatggctgccatcgccctgcttgccggctgtgccatggcccatgaggtgctgctgggcgcatgctacggcggtctcgtcttctagcccatccagttcaccttcaaggccggcgacaccatcatattcaagaacaacgccggctttccgcacaacgtctacttcgacta

SEQ ID NO: 100234 - DNA, 157 bp, Zea mays
  unsure (1)..(157): unsure at all n locations
  Clone ID: MRT4577_22928C.1
tttcatagccgcggaaaccctacccacccgggccgctcacgcaccgggcgcgcgcagcctcctgtcgcgtgcctgccttctacaccgcccaaagcgattggatctcgagatcgtntggtgccacgtttgatgactgggattctgaagattttcagcc

SEQ ID NO: 100235 - DNA, 409 bp, Zea mays
  Clone ID: MRT4577_22929C.1
ccgacgcgtacgcagaagatggaggttccgtttgccttaccccatccgtgaatcgggtggagcatcggatgacgaggaggaagacatccggaaaatcggggagaacctggtgcagacgcaggcgctcatgaacgcgctcgcgtactcgctgaagaacgttctgcagaaggtgatgccggagctgtggaaggacatcaaccacaagatccaccagaactggatctataactggatcttcctcacgctcctcgtcagcacctacgactacgccttgtaatacaccgtgtatgacaaggtttacgacaagttttacatgagatgttatatgcactgagctttagagactgacattggatttaacatttgcatgatcaagtttagttaaccgcctatatgtatgtatatattc

SEQ ID NO: 100236 - DNA, 419 bp, Zea mays
  Clone ID: MRT4577_2292C.1
aaaacctgctgccctcttgctgtcttaacggcgcggtttggcggggccgggccccggcgccagtgggtcgggaccggccgtggtcgcgctcccgccgcgtgtgggcgcgtctccgcgccgggcgcgcaacaacgtggcgcgcgcgggcgacggagccgcgggagggcgggggggctacggcgggcgttgcgtgtgccgggtacacttgcgcttgatgtgcgtgtcatattttgatctttgcgtgcgccccggagtgcccggatgagcgaccacctgcccgacgccgccgcatggaaaatgattgatcgggaggagggaaataatggccgcggcggcggcgaactgaactgatgcttactgtgcgacgggcgtgagctgatgatgacttctctcgtcggaagtgccggctgagtcggcgg

SEQ ID NO: 100237 - DNA, 615 bp, Zea mays
  Clone ID: MRT4577_22930C.1
ccgggtcgacccagctttttgcgctcgcgggttgctcgagaggtgatcgatgaccaccggcggcggcctcgcagcggggaggagggcggtgaccgggacttcgtggacgtgttgctggacgtccacaacaaggaccaagagcacggcatccaactagagaccaacgaaatcaaggccatcatcttggacatgttgggggggggcacggacacgatagccacggcgatggaatgggccatggcggagctcgtcacccacccgcgtgccatgcggagagcccaggacgaggtccgcgcggcggcggccggctcaaccggcgtgaacgaggaccacgtcgcgcagctggactacctcaaggccgtgctgaaggagacgctccggttgcacgcgccgttgccactgctggtgccccgggagccggcggcggacaccgagatcctggggtaccacgtcccggcgcgcacgcgcgtgctggtcaacgcctgggctattggccgggaccccgcgacgtgggagcgcgccgaggaattcgtgccagaacgggaaagggacgctgtcgctggacatgaccgagatgaacggattagccgtgcatatcaactccggtcttccgct

SEQ ID NO: 100238 - DNA, 610 bp, Zea mays
  Clone ID: MRT4577_22931C.1
ttgggtacctcgaggccggccgggactttcctcgtgagaaaggagagggtaggagcagacgaacgaccagggatcccgacaccgggcgccctgatacttcctcagacctgactgcatatctctttccaacaatctttaccaggcgggaagtgagcacatggtggaaggtcaatgtctctgcgttaactctcttggaagatgggagaccccctgaacaacagagccaccactggtgactgctccaactgctgtgggaagggctccacccgcttgtatgccgcctgctagaaagtcttgtggagaccagcgagactgatgctgcatcatactcctccatccaataaataccacagggccgacggaatgaacaccgagtaattctcttacaaggactgatcttggaccagagtgcaacttgcctcctgcaagatgtgtcttgcctgccacaactggttggagacccatgttgtggctcattccactgtcccccaccactggggcctctagccctttatgaatcgtgaacactacatagtaccttgatgagtacccgaatgtccctgacagaaaggacccctatgatgacactatgattgcaatactaagctgg

SEQ ID NO: 100239 - DNA, 551 bp, Zea mays
  Clone ID: MRT4577_22932C.1
agggtagtagagattattttgatattttgtctttttttacaagcgtacacacacaaaaagggaaaaagggagaaggacgaagaagagcaaaaatgtctaaaataacattaaaatcaagcacattgtttgcagtaaaaaaccaaatatctccaatatcttctcctagttcttgaaggggatccacggcttggctacaagcggaagaccggagttgatatgcacggctaatccgttcatctcggtcatgtccagcgacagcgtccctttcccgttctggccccggctcgccgcctcccagtcaaaatgatacagcaggctcgccagggccatctcggcgcttccctccgcaaacgcgattccggggcacatcctcctgccggcgccgaacggcaggagctcgaagtgctgccccttgaagccgacgtcagctgcggcggcgccgcccaagaacctctctggcacgaattcctcggcgcgctcccacgtcgcggggtcccggccaatagcccaggcgttgaccagcacgcgcgtgcgcgccgggacgtggtacc

SEQ ID NO: 100240 - DNA, 199 bp, Zea mays
  Clone ID: MRT4577_22933C.1
ccggatgctggtcgtcgcgggccgatccggctcgacacctgggctcatggcggaacagttgggcgtgcccgccgcgacgttgtcgttccatctgaaagaactcatgcacgccggcctcgtcacccaggagcgcgacggccggaatctgatctaccggacctccttcgagcaaatgaatgcgctgctcggcttcctgacc

SEQ ID NO: 100241 - DNA, 255 bp, Zea mays
  Clone ID: MRT4577_22934C.1
aggagccgttgtcagaagctggttatttgaaacgctttgctgtccactaggaagggtatgaccttccaaatggcactacacaggtggtgcttacacacatgagcgatgcaattgctgcactgaagctccataaggatgagcttccatgctagtaagactggaatatacactccatcagaatcaccttctgagtgaccatgacaccacccagaactcacccacatgttctactgcaacttctactacatcattcac

SEQ ID NO: 100242 - DNA, 1004 bp, Zea mays
  unsure (1)..(1004): unsure at all n locations
  Clone ID: MRT4577_22935C.1
tcgagggccggcnncgggccgggttcaaaaaaaaaaaaaaaaaaaaaaaaaaagaattacagttttcgacagtcgtcgcatacagtcgtcacagtccctcgcgtagacgcgcacccacctccatccctcccatcctagacctgctcccccgccgccatgacgatccgccgtcgcacacccgccgaccctaccatcgcagacctcctccccattgccagatcgatccttcatcgcccctcgatgacaacggcttctcagaactaggcatcctgttcactctatatccatggaggcggcgatgcagacgattctcgtcgggatggcgcacatggagttccgcttgactgcggcgctggcgggcagtggcggcgaacaggcttccacctcctcttccttcgcctcgctattcggctcgttcgagtcagagtccgctcctcctcccgtcctctacgactgctacgacgagccgaacgacgacgagattgccgaggtgctcgcgctactagagtacaacgaggggacttcgtcggccacagtcctcgtcgactgtaacaccaccagcaagtcgcctaccaagtgttcgacaatggagttctccgacgccgacagcagcgccaggactcgcgctgtcacctacgatgagcctagcttccaccgcttcattccgccgcccttccgtgccggggaaaccaacgaggaagaggactcctctgccgaggaggccatggcggcgatgggagcggtcgcctcaccatcccctttccttctcaccgtggggaatctgctactgccctacctcgcgctaccaccgacgcatgctgcggtggtggacgagccgtaccgtgacgctaaggctgctcgggcactggccgagacggacaaggccaagggttgcgcgaccatggaggcagccgcggcggtgcaaaagctggccgagtccgtcgtaccgcttcacctcaccacggagcttcgtcagcgtggtcccgtcgacatcgaggccaaca

SEQ ID NO: 100243 - DNA, 309 bp, Zea mays
  Clone ID: MRT4577_22936C.1
ttagcaatgttgcatgagatgcataaactgcctgaactaagaagagacaatcatgcgcaagttgtattaactaataatcgcagaagggcttcttacacagcgctcgaaatacaagcaacatggataacatataatgatttcaactcaaatcaaataacacttaccataaagtcttatgctaataggaacgtgatttgacaattattccattatatctagagagtaaatgcttggtaacatgaaaatagaacaacttttaaatcattatttctatgaccatttcatttaacttcatagtaaaaattaggc

SEQ ID NO: 100244 - DNA, 574 bp, Zea mays
  Clone ID: MRT4577_22937C.1
cccagcgtccgcggccgcgtggggatattttagctgttggaggctcgtcaatttgtgctccgtcgcaacacacgtgtacatacctagtatttatatatttatcttattatttttctcctactaattttaggttttacaatatctacctcctctgccgctcccccctcacgcagctttcatcggcgccgcttgcctcccgggaaaaggctcccatcggccacctccgcccaggccatcggtgccgcttgctcccctcctaccaccaccatagcatgctaccccctcaccacgcagctttcacagcacaatttttaatacacaatgtaaagcacgtaatctagaaacacgcttacgctatgtatctctcgcgtagggaattggcttctggaagatctggttcggcaaaccacttgcaaatcaaagatccttgaagagatatgaagtctgaaacaaagagcaataatgacagaggcgaacatagacacaacatgtattttgaaacaaggatacattttcgtgtgttacaaaggaaaaggacgcattaaatatacgacttgtgtcaaaccaacgaaaa

SEQ ID NO: 100245 - DNA, 303 bp, Zea mays
  Clone ID: MRT4577_22938C.1
ccgaggtcgacttagaggatcgcgttagttcaatggattacttatcctggcccattctaccttgacccatttagtgcatggttttaacggctgtccggccggtgcaaaaggcgatcgcctaggaaagtttgtccggtaatgtagtgtgaccaggacttcgctctctctctagccaaagcttttctacgccgccatggtcagggtttacaatatccacacttggaaaattcacactaataaacttttttccctgtctctctccccaagtttagggaaaaaagagatccccgggtaccgagctcg

SEQ ID NO: 100246 - DNA, 255 bp, Zea mays
  Clone ID: MRT4577_22939C.1
cgccaacaacgggagcccctgccccgagctcgaagaagaggctgagtgcgtccctgataactgcgtctaagaccagagccccgcagcccctggggccccccggagccatggggtgtcgggggctcctgtgcaggctcatgctgcaggcggccgagggcacagggggtttcgcgctgctcctgaccgccttgaggccgcgccgaccatctctgcactgaagggccctctggtggccggcagggcattgggaaacag

SEQ ID NO: 100247 - DNA, 444 bp, Zea mays
  Clone ID: MRT4577_2293C.1
ccccaaaggggccccccgaaggcaggttttttaatgggaaacaaaaaaacctggcccggtccatttccctcaaaaaaaaaggaaaaaaatcccccgggctgggaaaaacccccgggcaaacggaaaaaaaaaagctaagtggccaattttttgggggggagcccatgggaacccatttaataaaaattccggaaaaacggccccccgggttgggccacctaaagggccttgcccctcaattcaagggcccttttccaaaattccttccccgggccccccccaaagagccaaaggaaaaggctccccccggggtccccccgaactttgttttaaatttcaatcccgaccccccatttttttcactggaaggggaatttggtctcttggccggaaaaaaagggccatttaaaaaccgggaccccccccaaaatggcccccaggggg

SEQ ID NO: 100248 - DNA, 357 bp, Zea mays
  unsure (1)..(357): unsure at all n locations
  Clone ID: MRT4577_22940C.1
tttttaataattttttcnacaaaaaacaatgtcacatatgtatttcttatacaatttttggacaaaataagctaaataaaatacatcatatgacgacagcgatccttcacaaccatagttgactaggagacgacggcctagacctcttcgaactcatatttatgaaccctatttgggggtacctattttttgacctggtgtgattatacaaatggtgagctcccatatgggcatcgctcaacaattgtgggaaaaaggttaagtgtaagggtttcccaggaagaagggtaaggctgagcattgcttttaataagtcggtcaaaattttattaacaggttttaaagttaaggtaaatc

SEQ ID NO: 100249 - DNA, 325 bp, Zea mays
  Clone ID: MRT4577_22941C.1
aaaaaataaaagcgacatttattccgctgggcataatatcacagggcattgcccggaaggaaacacaggtacagcatgatgacacgcacacttgacagaaacacatgctgatactaggctcgggctaacaagtgcgcacgtgcgactcatggacctgcacaaggtccgatgccctgttttatcctcttgctctgcatctcatgggcagggcagggcatgcccatctacttgaattgcgatgcggacacacatcggtgtctccatctagctgcacacatatatacatacatgcttacacagcgagagataaacagatcgatcttac

SEQ ID NO: 100250 - DNA, 953 bp, Zea mays
  Clone ID: MRT4577_22942C.1
ctctccccgcgtgtaaataaacgggaaccttctatcctcccccttttgggttcggtcctcctccgtccgtcgccgtcgtcaaacctcaagcgcgacgtgtgtaaacggcccgcgccttcggcagacgccaacaacagactcagactatactcgcagcagaaaggttagttagctgagctccgcggggggtcgaaccgagactcttcgtcgcgcgcgccgcagggccagcccagcaggcggcggacgcgaaagcttgctcagctctgtgttcaccggcggcacgggccgtcccggcgatggaatccttcggtgtccctcctgcgcccgtggcggcgccggagaagaggaagaagccgctcgacctcaaggaccccgtccccgccgccgccgccgccgccgccaacggcggcggcgccaccaaggcgtccccagcggcgaagtgggcggagaagaagaagctggtgggcggcgacgccggctacgtgctcgaggacgtgccgcacctcacggattacctgccccagctcccgacatacccgaaccccctccaagacaacccggcgtattcagtcgtcaagcagtacttcgtcaacccagacgacaccgtcacgcagaagatcgttgttcacaagaccagcgccaggggcacccacttccggcgcgccgggccacggcagcgggtgtacttccagcccgacgaggtgaacgccgccatcgtcacctgcggcgggctctgccccgggttgaacaccgtcatccgtgagcttgtctgcggcctgtatgacatgtacggcgtcaccagtgtcgttggcattgagggtggatacaagggtttctattctaaaaacacggtcgcgttgacaccgagatcagtgaacggcatccacaagagaggcggggacggtcctggggacgtcgagaggagggcatgacactgccaagattgttgactg

SEQ ID NO: 100251 - DNA, 187 bp, Zea mays
  Clone ID: MRT4577_22943C.1
cccatcgccccaacggcacggaacagacaggcggaggggtactagatcaagaggcatcatcaacgggtcacgaccgctggattcaaacattgcaggcacccagaaccaccgtggtgagcccacaggaaggccagcatctatgcaggcagctggtcagtcgggagcctttcaagacaaaccgagcgcg

SEQ ID NO: 100252 - DNA, 801 bp, Zea mays
  Clone ID: MRT4577_22944C.1
actttctctcccggctgtttcgtcttccttggctttcctcctctctacgcgctttcatttcatccatgtcggcttcctcgtttgctcggcttcagcacaaacgcttcatctggtattgacatccacctcggctctgtttgtttggtgagatacagtttcttttctcccccgtcgtctgctccttctcggtgggtatctggttctagattggaaatatccaacgccctctcgctttttaaatccttcaatcttccatatgcctgcttggcactgctagattcgtttaggttttccctacaacatgtgaatatgtcactgcctttttttggataaaatggtttggaagatctgcaaacttcatttttctttttttaggattccacccttctactgaaaggttcgtgttctcttgtttgtgctctccaattttgttttttttctttttcctaggcttcaggttcgtttcttttccgaaaatgatcctttttggttgagctaagttttcctttttatatcctcgtctgtttcgttttaggtggacatctgatttcattcaggtgaactgtttgcatcgaagcggagatttcattttccttttttgtcgatacattgaggttcgaaaagggcactattttacttagctaattgattgagtgcctctgttcttcaaactttttttcatgtttagggtttgtctggttttagcttttcgagctattccttggtttctgtgctccattctaagacctgtatattgctcgtaactttgactatttgcaaataacagtgttgctattcctg

SEQ ID NO: 100253 - DNA, 584 bp, Zea mays
  Clone ID: MRT4577_22945C.1
gagctaacgtggtggagggtgcttgcctaattgggcttcccaagtttaaggatttctataagcgcgtccggccacgcgtccggcggtttacatactggtggagtcccgcaaataggacgcagtaaatgaaaaagctttctagcttcccgtccaaagaagctcacaacttcactcatttgcacgcgcaagcaaggtggtatgggggcaccgagaaactccgcagtaatctgtgttgaggccacggccagatgatgctatgtatcttcatggagagggtgatggactgggtgaaacgtagtcactgtacctttgtagcacgtcatgtctagtgtttcttagtagccatggctgaagagagtttgtagctattcccggcttcctgcagccaggaacatcagtgttaggcagagaaggaaaaggatcttatgttgctgctcagttttctatccgaatcgtcttcctttttatttccccctgcgcagaatcgactctttggttgactttactaagctcgttttgcctaaaaggccggtctatcatgacccatgtgcagaatcaactctctggtaaactttactaaactc

SEQ ID NO: 100254 - DNA, 133 bp, Zea mays
  unsure (1)..(133): unsure at all n locations
  Clone ID: MRT4577_22946C.1
gttttattgaaagacaaacaatgcttgtggctggcgtctgttgttacttttgtgtaagtgtacacaaactgnnaaagaagtatgataatagaaaatccagaaatcaacgcgctgtggaggggaagtgtttaca

SEQ ID NO: 100255 - DNA, 758 bp, Zea mays
  unsure (1)..(758): unsure at all n locations
  Clone ID: MRT4577_22947C.1
cnnngctttnccagagcgcgcaggagctaacgggggggagagagcatgcctcattgggcttcccaaatttaaggatttctataagctcaacgggaaaccggtttacatcctggtggagtcccgcaaataggacgcagtaaatggtcagacaagtaaatgctctcaagctccctttatagttgaagcttctctcaacattcatttcgaacatatcatgaaattacaaagctatgcatgctcgcagaatcgagctttgcacattgagtcaaatttgatttcctggtgaaacaggagcagtagcagcggtagcgtccagccttaaagcatgcatggctactgacactaatttctgcctcgtgaccatttcagaaaaagctttctagcttcccgtccaaagaagctcacaacttcactcatttgcacgcgcaagcaaggtggtatgggggcaccgagaaactccgcagtaatctgtgttgaggccacggccagatgatgctatgtatcttcatggagagggtgatggactgggtgaaacgtagtcactgtacctttgtagcacgtcatgtctagtgtttcttagtagccatggctgaagagagtttgtagctattcccggcttcctgcagccaggaacatcagtgttaggcagagaaggaaaaggatcttatgttgctgctcagtttttctaccagaaatcgttttcccttttttaaaaaaaaaaaaaaaaaaaaaaaaaaaaaacccccccacacacccac

SEQ ID NO: 100256 - DNA, 399 bp, Zea mays
  Clone ID: MRT4577_22948C.1
cgaagctcgaattcgctcgaggccacccgaccaaccctcgcctgcggaggaaggtggttcttcatcctgtgcggcgcctatctacccaaggccaccggcaccgactacgtagcaatggctgtcagagccgctgattgacggcagggccatggcccaagaagggctgctgggctcacgcgaccgagggctcattttttaccccaggcagttcaccgggaaggccgatgacaccattacatgcaagaacaaatccgctttgccgcacaacgtctgatttcaccaaaaccaagtgcccagcggtatcgaccccaccaaaatctctcaagagagtaccttaacctgccaagcaagacctacttaagaccctcaccgttccaactacctacggctactactgcg

SEQ ID NO: 100257 - DNA, 484 bp, Zea mays
  Clone ID: MRT4577_22949C.1
gcccccacgatcttgcgcgcgcgctggactcgcagcctcgcatcgcaagctagttctttgggggcggattccccgattgcctgccattattctggcttggttcttgcctctgtttgggtactccggcgaatcgtctgagttggggactggtcctcctcctcctcccgatggggggctggaaccggtcgcggcatgtgagatggcagcgtgaccgcccgcggcgccctccgctccctccgcctgattacggaccggagcactgctcagtcccattatgggaaagggaattctgcagctacgtcggcaacatttcttggcaaaggttctgtgaaaacaagcggtatgcttcagtagacaataccctcgagcactgggacgattcaggagctcttgagaatttccagaactcaaaggcgaggttctgggctcactaccatggccaaccttcggatattcctttgccggaccctgatatgtacatcga

SEQ ID NO: 100258 - DNA, 191 bp, Zea mays
  Clone ID: MRT4577_2294C.1
tggcaccgtgaggcggggcagcttgtgcggggagccggcgcgcaccgtcgggtggagggaccccggggttgatgcacaccgccttcctgagggacctctggcccaacagaggagtaccagtaccggatcgggccaacgttgtctggacagcgggatccttttcggggacagggggaaggcggaacggcacg

SEQ ID NO: 100259 - DNA, 438 bp, Zea mays
  Clone ID: MRT4577_22950C.1
gtaagctcggaattcggctcgaggaaccattgaagacgggtttttttgtagacctcgaaaatgaccactgcgaccgtgaaaaaatgcagccgaagttcgaggagaagttgcacatgtgggctttttgaacgactgcggatctggcttcctaccggaatgcccccatccacttcctccatttcgtctgatagaggaaagcatttgccttttgagcctttgattatggtgtgtgttcaaactaatgaatatattcatagctcactgggtggtagggaaatagaaagacattgggcttcgtaaaacctggattgttatggcatatcgaacaaccctgaacaacatgtactaggctggtaatatcacgatgactaacatggttacggtgattcaatgtccgtacatacaataaaatgcatgtgtgtgattgttggcctatga

SEQ ID NO: 100260 - DNA, 496 bp, Zea mays
  Clone ID: MRT4577_22951C.1
cttggaaaacaaaacacccccggggttttttttattgtttgtactatcgcgggaccatttgaaaaaaagactccggggggccccccgcgctgggcccccacacacacctgcaagcttataaaaaagagccccccctcttgcaccaggaagccacccttttttgggattcaggacaacaagggaaggtttttggggccggcaggaggcccccccaaacgggggtgtcctttcccccttgggcccgggggccttcaatttggggggccccccccccattgaaacggaggctagcccaggagcaaaataacccccggggggggagggtacctgggccccccccaatttttccccccccccccgaaagagaaaaaaagaggggtgcgattaccattattaacccgcaggcagaaccaccataagcgctagccaccgcggaaaagaatccccatgtcaacagcagacaggagcttcctgcaccttacccccaaggtttccc

SEQ ID NO: 100261 - DNA, 251 bp, Zea mays
  Clone ID: MRT4577_22952C.1
ccccgctatcgcatactcttccacggtcgcgcttctacgcatcaggatcccatagcggtacgagcaatgtgcaacgactcacaagaacacgcactacgtaaatagaaggaccgactgatttcacatcgattaacgaactgcctgcacgaccgagacgtagcacatattgaggacagcgacatgattctgacgcttcctgtcagagacatctcgcacgagctgatgacagatccgaatgcgtccatcgaccc

SEQ ID NO: 100262 - DNA, 470 bp, Zea mays
  Clone ID: MRT4577_22953C.1
cttgcgtgttggggggtggggtgagctccttttaaaactctacataaaaattccacataccgaaattccatttaaatcacccaggagcaaccagatgttaccacttacaaaagacagggaggatgtaatacttccatttacacagctgatgccaaatacaactggcataattccttagacaagcctcaatgacatcaccactttctgtcacaggatcaaaaatgacaagctaaaccattcaattcaggttactttgcaattcacaaagttactgccagcctcagaaaaaaattatattcccatcttcaaaccataaaaaaatgtttgaaggtcacattccccttatagtgacaagaaatttctaagggaactttgaacctacattatcaaaattttcacagttcttcaagctgaataggtgatataaacatgccttgaccataaagaatttacctttctacctttaaaaa

SEQ ID NO: 100263 - DNA, 675 bp, Zea mays
  Clone ID: MRT4577_22954C.1
tcgaaaagcggaagtccaaagcagttggtcgctcgctcgctcgctcgccaccgccgcgttggacttttccctcgccggagaaaccgccgcgaccacagccgcaaccgccgcagccgcctccggaggaggagggtagtaccaccagggaaggaggaggccatggcggggaggtacgaccgcaaccccttcgacgaggatgacgtcaaccccttcgcgggaggaggtgtacctccggcttctaattctcggatgccacctcttcctcacgagcctgctggattctataatgatcgtgctgctaccgtggacatacctcttggttcatcgaaggacttgaagcaaaaggagaaagaactgcagtcgaaggaggctgagcttaacaaacgggaaagagaacttaaaagaagggaagaagctgcagctagagctggtattgtcattgaaaccaaaaactggccaccatttatgcccatcattcatcatgacatttcaaatgagataccaatccacctacaaaggatgcagtaccttgcattttgttcattgttgggattgacgttatgcctcttttggaacatcattgcaactaccgcagcatggattaaaggggcaggtgttgtcatctggttgctagcaatcatctacttcatctctggtgtccctggggcgtatgtg

SEQ ID NO: 100264 - DNA, 309 bp, Zea mays
  Clone ID: MRT4577_22955C.1
gtcgtcgtcctgcggcaccgccggggccggggccggggcctcaaggtagtcggccttcccggaccaccccagtagtggcgcccaccacctgccaccctccaccgccgccgcagcggcgcggatcgcggcggcgcgcggccggacagcggaaggggcccgcactgggcgggcggggaaggaggagacggaggcgggtgcgcacggtgccatcgccattccggtcgggctgggacgcttcggtggggtcgctttggggcgctgggttttgcgatgagacggcgagattgatgctgattgctcccggccggc

SEQ ID NO: 100265 - DNA, 469 bp, Zea mays
  Clone ID: MRT4577_22956C.1
aaaaatatttaatatttagagtatgtgacatctttttacattttgatggacatacggaagtatacattcagtcgtttaaaaaaactcgatgataactgggcgcgacattcttagctgcggagtggtgctcaactcagcgatctgtagggcgaacctggttcaccacatatggatcacgagaccaatattcacctgattatacacgaacaaaaaagcacacagatcttgccacttccaaacaaaaaggaaaatgaaattttttggctactcgcgcgcgctcggcgtgaatcctaagcaacgacgtgcgacggtctatagcaccggccgatgtgaatatgacgcacgcgaaaggggtggagatggagtccgtgacggtggtgctcgtgcctgttccccgccgacgctgaggcctgcaccgaccgcatgaacacgtaaagggcgcacgggacaacgacggcgccctggtgcg

SEQ ID NO: 100266 - DNA, 383 bp, Zea mays
  Clone ID: MRT4577_22957C.1
cggctcgagcaacaaacaaagtcttacaatcttcaatctcaacagcctactatacacacacacacacttctacactacagtcatttacacaacaaccgcaatcatgtctgacaactccaacaacaagccctctactctccagtcctacatcgactccgccactggtgccgtccagaatgccgtgggcagcatgacggcaactcgggcgatcaggccaagggagagcttcgtcaggacaaggctcaaactgagtacgacgcttcacaggcagcagtcaagctccccggcggcaccatcttcagcacaggtgccttcgccaaggatgaccccaaccgaaccgagggttcatggaaccagaccgttggtgccgctaaggagacact

SEQ ID NO: 100267 - DNA, 552 bp, Zea mays
  unsure (1)..(552): unsure at all n locations
  Clone ID: MRT4577_22958C.1
tttttnnttttttttttattatttttttttttnttttttntttnnttttttttttttttttttttttttttttttttttttttttttttttttttttttttttttttttttaaacccggaaccgggaatttcaatccccaaagcctttccagggtccccagaccaaaccgggggaaacccaaataaagcaggggcccccgggggttcccagtcccccccccaaccccttaaataaaaccgcgggccatccctgaaaaacaaaaacccccccccagatcccccccctttttttcagtcccaaaggacccgcccccgggggggccccccctcccgggggggggggggcccaacacccccgaccaaaaaaatctaggaaagcggcccccggcccccccccctgccccccttggggggggacccctgggggggcccccccctttcgggggcctgggcaacccccatccccctgacaccctggccaaaaaaaatgttcttgccccctacccaggggggcccgacgggcccaaataaaaaaccgggaccccttggtgt

SEQ ID NO: 100268 - DNA, 318 bp, Zea mays
  Clone ID: MRT4577_22959C.1
agaatatgattaaagattatatataaccggaacagcatgtatcaaactccaatccattacaacaccgtattatgtcaatttgcttcaaacaaccattgtggtacaaccaaacaggagcatcttacgcgccagatcaaaccattcggcagtttacacccaggcaagctgcacaacccattaacgtttactaggtgttggattatcaagtaccacgctttatatacacagctcattgtacgcccatactattctgattagcagtaaggagacatcatgttcttgctggactcacggtcaaagatgcccttctggattcac

SEQ ID NO: 100269 - DNA, 374 bp, Zea mays
  Clone ID: MRT4577_2295C.1
acttaaacacaacaacatgctatggccatataaaattctttccgccaccacaacatcacacccacacccacacaaccatcacacaccaacacaaaaaaaaaaaaaccaacaccacacactcccacacacatacagatctatcaatacaaccaaaactcaacaaccaaaaaccatcaaccacacacgaaatagacatacacttctacacatttcatatctttatcacatatctcctccactccctcctcaagtcccttaccctctatacctccacataacatacaaagccataccacaacccactcctttaggcactcaaccatcctgtacaacacctaaccctttctgatccccacaaacacccctttccactc

SEQ ID NO: 100270 - DNA, 218 bp, Zea mays
  Clone ID: MRT4577_22960C.1
agggggggttccagtccgtggccgaaacacttgccagatgtgaactttgggagttacataaaagccaaaacaatttatggcgataaagatagaccgtgcgaaaatgccaaaagattacacattctcaaaacataggggccggaagaatctagtgggaagcctaaagctcggaactagtgtgggacaagacattaattgcgcggggcctattgtccttt

SEQ ID NO: 100271 - DNA, 1105 bp, Zea mays
  Clone ID: MRT4577_22961C.1
ggccgcttttttttttttttttttgcggagataatctgattatcgttgggattccatgcagagaaagatgaaggtatatatagagttcatgatttaaagtgacggatttctaccattacaacgactcgataaattatatctttattttgattttggatgatttttaacaaatcgatttttattgaagtcaaagctaaattttttttcctcggttgtagcgtagaaagcggagtgtaataacgaagaagtcgcagtcgcagcgccagcttcccggagccttccttcttcttccttccatcattgcccacctcgaggcggccgggccggccgggatctgctagactttttgatgcacccacatcacacccacacccaccagcgcgagactgccatggccccaacgccggaggatccagccgccgacgacgacgccgagcccttctcgccgtccatcttcctcgacctgcctccgacaccccaccctggtgacgatggcaaggactcgatgatagacctccatttcatcaggcgcttgctcatggaggacgacgacgtccagttccagtatgccgaccaccacgcgctccttcaggccgctgaggagcccttcgctcagatcctcgcgggctcggctggatcctctgtttccggctcggcaacagccgacacgacagcaatttactacccagacggtacgggattccatttccatcagcagactgcaggccctacgagtacgactggagatgacggggtagtaaccatggacatgctcaaccgggcgttcctcaagggtatggaagaggccaacaagttcttgcccgtcgtcgccagcagcacccacaccagcctgctgtgtcgtgactatgcctccaaacacagagtggtggatgggattgggatgccattattcttccaggagagtagtggtaataaccgtagaggcaggggctgccaccaccaccatgatgatgacggcgacgacgaggccgacactagaagcgccaagctgattgcaccagagctggaggaaagcggcgaggtgaccgacggcgtatttctcagaggctacgaggtggccctggagaaaatgaacggcttgagc

SEQ ID NO: 100272 - DNA, 533 bp, Zea mays
  Clone ID: MRT4577_22962C.1
ctcgaggccggccgggccggtttctaccatttgatcggtgtatataagaccccacaatcatctcgcagccgagcacaggtagctccaccgcctgatgatgatgagtttgctgagactgctgatgcactctattccggagtgccccatacccaccaagatgatgggacgactgcttcatctagaggtgctacttcttctagtgtacccgagagacagccgaaggcagcatccccacctggtccagtgtgaatgccaaacctttgaagtgactaaaagggtatggataatgctattgaccctggtgatgaaactgaagcaccatatggacctccacgacgtggctgactgacatcgaataaaaggcaaggtctgcatattagacgcacaactaacacgggattgatggccacatgatactatgatatatattatctagaatgacacctcacgcgacctacatggagttagtgactcaggtataacaataacacatttgactcgatgctgctggtgaaagcaattcacgatactcc

SEQ ID NO: 100273 - DNA, 133 bp, Zea mays
  Clone ID: MRT4577_22963C.1
ggcaggtgtcaaactgcatggcactccatgggacatgggcctggactgtgctgccaaagtgggggattctgaatctgtctggcacatcagtgagtctcagaggcaggtctgtcaaacattatttcactttgct

SEQ ID NO: 100274 - DNA, 814 bp, Zea mays
  unsure (1)..(814): unsure at all n locations
  Clone ID: MRT4577_22964C.1
tccggaattcccgcgtcgacccacgcgtccggtggcactttgaggcgccggtgagtaaaatgctgcagattctggaaagaattcccagttcgacccaaacgtccggcgattgggacctccccttttggattggtagctgagcggcggcggctgcgtgagagaggcgggcggcggagagcggtggcagagactgagcgcagtcttgcagggtaagccggaggcatcttcccgactggtcgggagcaggacgagcacgcagcggacccgaggcggaggcggaccgggccagccatgtcggtggttgggctagacgtaggctcacagagctgctacattgcggtggcgcgggccgggggcatcgagaccatcgccaacgagttcagcgaccgctgcaccccgtcagtcatatcatttggatcaaaaaacagaacaattggagttgcagccaaaaaccagcaaatcactcatgcaaacaatacggtctctagctttaagagatttcatggcagagcattcaatgaccccttcattcagaaggaaaaggagaacctgagctatgatttggtcccaatgaaaaatggtggcgtgggaataaaggtcatgtacatggatgaagaacatttcttcagtgtggagcagataacagccatgctgctgactaagttaaaggaaactgcagaaaacaacctcaagaagccagtgacagactgtgtcatctcagtcccatccttcttcacagatgctgagcgaaggtctgtgctggatgctgcgcanattgtgggcttgaactgcgtgcggctcatgaatgacatga

SEQ ID NO: 100275 - DNA, 278 bp, Zea mays
  Clone ID: MRT4577_22965C.1
ttttgtttttttttttttttttttttttttttttttttttttttttttgttgaatttttttttttttttttttttgtgttttgtgttgtatttcattgttgttttgttgtatctgtttacacactatccttttaatcaaattattggggggggggggggcataatcttgataataaaacattctaagttgataaaggaacacacactggttagaaagaggatttttaatgaccgatgcaacagcgggttaagcccgttttaggatttggcaggagatg

SEQ ID NO: 100276 - DNA, 398 bp, Zea mays
  Clone ID: MRT4577_22966C.1
gacatagcaagcacatagtgtaccaacagggcagccaaatattttgcttccttatgctccttggtctttctgcaagtgttggtaccgtgaccatatttccacaatgactcacaagctcctatagcttcacttttttcgctatacatgtcaccagcggtgtgtagaatgtgtgtaaagagcaattgttcaaccctacggggtgtcaatcagcaatagcaacagggatattaccattattacaattgttgctacaagaactgtgagcattattagggtagtatatattagatgcatttggtggaagagacatgatggcgcaactactaccacagcttgtgctatcaatctttgttgaatagtctaagttgaatgaggttcttgaattgaaccaattggtt

SEQ ID NO: 100277 - DNA, 325 bp, Zea mays
  Clone ID: MRT4577_22967C.1
tttctttttttagttaaattttgcactattgatttctaaatggcggtgactacactgagtgactgtgacatcgtacttaccgagtagctgttcttatcgatcactgtatagtttagttttatatggtgtaagagaactttggctccggtggtgcaaaaaacggctcattggtacatgcataggcctccggttgatgatgcaagacaaaacatcttgcactgctttgtcgcaattcggggcatgcatggccaacgtgccagcggatgcgtcgttttttttttagagaagttgcgccctgacaattgtccatgctcatttttctggg

SEQ ID NO: 100278 - DNA, 539 bp, Zea mays
  Clone ID: MRT4577_22968C.1
atcccgatctgacatcgaggccgctttctctcttttttttttccttttttttttttttttttttttttttttttttttttttttttttttttttttttttttttttttttttttttttttttttttcaaaaaaaaaaccggaggggggttttttttccagaacaaaccacacccactactttttcccgtacgggggcaccccagaaaaaagccttttttatccaccaaaattgttaacagcccccccccccccccccccctgggttggtcccaccccccccctgtttggggacccaaaggggaaccacacccgttatatcccccccaaaagttggggttccaccagcgccaaatcaaagggggtaaagaaggaaggacccacatgaacctgccacaccccccgggggtggtccaattggcttttccccgggacaacctttttagggttaatgaaggaatcctcgaccaagacgttgccaaaccagaggacgggggcgttactccccagagggtatactctgcccccaagcccctccggg

SEQ ID NO: 100279 - DNA, 235 bp, Zea mays
  unsure (1)..(235): unsure at all n locations
  Clone ID: MRT4577_22969C.1
caaacggnnngtattttattcctncnncaaaatttcattntnnttgcaagtnnnttcttactttgtttnngaagtacaacagnngttaacttggnaacagnaagnagtacggtacccgagcagcncnntcaaagcgactatacttcagnngggatggcagnnatttcaacatagggcatatatgctgtcaagcaaaaaaccctgacgaggnnaaaagnaactaaatnnattaaag

SEQ ID NO: 100280 - DNA, 331 bp, Zea mays
  Clone ID: MRT4577_2296C.1
gttaacagaagcaaacgggtcccgaattaacggttccaagctacttaacctgacggggatcactgctggtccaaggaaaatgaaactatgcgagcgggtccggcacacgggtggcctgagacagtctacaatgcatgcacgtccacgagaaaaactaaacggggttgaccgggccagggagagagagctgatttctacttgggcttctctaggcacccctgggtgggtgggtttcggtttttaacaacccggggaggggagcttctcatgggtgtggaacatgaacaacaccttctatataacccctgtgaggcccccccctattaggggg

SEQ ID NO: 100281 - DNA, 340 bp, Zea mays
  Clone ID: MRT4577_22970C.1
gatggccgccgccattcgcgagagccctacccgcgcctccgcgccgacccagccgcgcgcggtgctgcgggtggcgtagtccgcacgcgccagcacttctcctacttctcccgtccgcgcaggggctgccgttatacaggctgcaatgtaatacggtcaatggcggtcgccacgagatgcggactcgtccgctgggtgtctgtccatgccgtatcagctggagtggcgcgggtactgtttttttttttatccgccggagcacgatgaggactctgcctgacgacgttattgttgacgtgctgggtttttttgacgtccttatcgtgctgatgtcgttctt

SEQ ID NO: 100282 - DNA, 478 bp, Zea mays
  Clone ID: MRT4577_22971C.1
ggacagaaaaaaaaattttgggggaacggccataggggcagggaaacggcagttcttattaaacgggccaaaaaaaaaaaaagggttctaaaacatgggctcattattccacgggctattttagcaacctacatgcccccaggaaaaagaggccccaacaggaaaacctataaacttaaaaatggaagttttttaaagcccccgcataaaaagacattgaaaaaaatgggtatttaagctatccccggggcatcaaaaggcaaaaaaacctcaccagccaaacaacaaattccctttaaagcccacaaccaagggaagccccacatccacccttttatacgggtcaaaaaaaaaacctttggctctggaaagggtagcatcagcttcaaaaagggcctcacttggaaacctggtcaaaaaaccaactaaaaccatttgggccattcctggaaaaccaaaaagaaaacggcaggggttt

SEQ ID NO: 100283 - DNA, 267 bp, Zea mays
  Clone ID: MRT4577_22972C.1
aagaaactggtttatagaaattgatgtggttcacaacatatcagtttatgactcagtttatagaaattagattcttaattttttaaaaaccaagaagctaatctctactagctaaaagataaaaactgggttgattctaaacaggaccttaatcggtgacagttaacttcccagtgaccagaatctttgcctgaaccggggtccaagtgacacgcttctactcgggatgcagtgagatcttcttagggggttcaggtgtccaatata

SEQ ID NO: 100284 - DNA, 702 bp, Zea mays
  Clone ID: MRT4577_22973C.1
ttctcctcaccgaattgacgatgttgatcctctgctctgtccgcatcagagtccccttggacagccgcaccggaaccttggtctccgaacggcgcttgttggtataattacaatccggcatctctattggtcgggcttgacttcctactatctccacacactatatctataatgctttatgagaccacaacgacggcgccaatcatagggttgaagcacatagcccatatctacctcaatcgcgcgaaaggcctagacgcgtattgacccaaatagaaataggtgagatctccatggcttcctaccacctaaatatcagctattcggatatggatgtgtttatcctcaccaagactcataagatccactctacatcccgtgatataatggctcatggacgccatacaagacgcatcgcactcagaatatgcttatgatagcgggaacccactatcatatactacccacctctgatctgagctatatgaggatgcgatggctcacgcgccttctccgccattattatgatgccgcaaacactaacaagcacatgtatcatgacatgtacatctgtagtaagaggaacatctgctaacacaagatcgagcttatgtcgacgatccacagatgcaacgctgctaaagcctgacatagactctttctgaccaaattcaggcccattcttcaagagctggcgagacg

SEQ ID NO: 100285 - DNA, 276 bp, Zea mays
  Clone ID: MRT4577_22974C.1
tcgcggaccaccacgcggatgggctcttgcgacccttttccgacccccttgctttcttcctccgccaccctggcgcgttcttcttctccctttgcgtttccatggctcgcgacgccaccgccacattcttgccagcgctcctgttctggcttgttgaccttcttccgctcctcgttttacttctttttgacgtccacgtactctctctcttgtactggatttacatgttcgccacggactgtttcaggcagtccttgcttagcatgaattattaat

SEQ ID NO: 100286 - DNA, 391 bp, Zea mays
  unsure (1)..(391): unsure at all n locations
  Clone ID: MRT4577_22975C.1
catgggcgtgtttctacacttggtttagaaccaagttctaccacaaacaggggacggctacaataacatcngtttcgaactacaaccacnnnacaaacnccgaacacaccttccattacatcggccacctacgcccacagcacagtcgtacacctacacccatggaatcacatcaagcccctaacaaccaaacatcttacatactttatcacctatacaaaatatatatcctcggcctgacaaacaaaaaaaaccaaacttacacccccctacatgaaacaacactaactaacccatacatgcacctaaataaaattcactataccgacacctaacaacaaatcaactcccaaaaccntacaacgccccaacttaaaaaaacccacaccac

SEQ ID NO: 100287 - DNA, 363 bp, Zea mays
  Clone ID: MRT4577_22976C.1
ggccgctttttttttttttttttggttttttttttttgttttttttttgatttttcatgtggggttgtactataggatggttttttgaagatgtgcagggaactttgcctacaacaaaatgcactgacgacagtactggcggggcttaaaacgatccctacattcgtttcgaaaattcattgccaagggggggggtgaagccaatccatgcagcaagccttgcttctaggaactgttgctggtacaaccgcttcgagaatacgcaccgaactgcatcatggaacccttcaataaacccacctaaagccccacctaaagggcgcccaagagggcctataatgagccctattacgcgcgctaata

SEQ ID NO: 100288 - DNA, 720 bp, Zea mays
  Clone ID: MRT4577_22977C.1
agagagggccaacaggatccgaagatgatgatacaagttccacactaaccgtggaaacatttagcttctaagagctctctgctacaactaataatttcagtaagactcccaggataggctctcggggccaaggcacagtctatgaaggccacttaccccgcattgtatagttgggatccactgtgattaggttgaagacaaaggatggtgttgtcctcgttattgagaaacttgtgacctcaccactactggatacaatggaagcatttgtggctgaggctagaatacaagggaagaatctaagacctctattgaagcagattgtatagaagggaagagtcttcaagatattggtcttgtagttgcaacaaagagaagcgacaatggtggtgatgctatatctatagaagtagcaacgttggtatcgtagctccactagttattaactaagttataagagtattaattaagcattcacaaggcatgtggtacttgtatggaccataagaatattaacaaacatggcaaaacgagtcgaggaaccgagtcgcatcacaggtattaattaagcattcactagctattcaaggcattatgattatgtatgagatattctcttattatgactggatgagatgtgtcttattactactatggatgagacttttgtgatgtaattaatgagactatgtatttaaatattgttatgtgatctcgtgc

SEQ ID NO: 100289 - DNA, 702 bp, Zea mays
  Clone ID: MRT4577_22978C.1
aggcctgctgctccgaccaagcgtggagccggacgaagcaaccaatctggatccctcaggccggtttctcgcaggaggcagcgtagggcggtggcgcggcacccggcggggtcacgggagcacaggttggcaagttagagcgatttgggaagcacaggctttggatttggagtcgtgcgcgcccccgttgacattttttctagctccgccactgcggtgtactagtggaatgcttacgagcaaatgaggaagagctgtggcctcaactccggccccgggcggcccttcaacgaccgccggtggctgctccccttcctcgcgagcctcctcgtgtcggtcaccctcttcctggccgccgcctgcggcctcttctcaccgccctatttggccggcgacgacgccttcctcgtcgacgtcgtctcgttcaccgactgggacgatggaggctcaccgtcgcagcgagacagcggccagtcagtggaacccgaggccaaggacccgctgctggatgacaacgacaaccccgacaacgccgccgtgaactcggacgactccgacgccgagccgcccaggctggcgtatctcctggagggcaccaagggcgacggcctgcggatgcggagggtgctgcaggcgatataccacccgcgcaaccagtacatcctgcacttggatctggaggcgccgcccccggaagaggat

SEQ ID NO: 100290 - DNA, 213 bp, Zea mays
  Clone ID: MRT4577_22979C.1
agcgtgaacaacgcaaacgcgggtatttcctgttaaacataaggacggcttagtgtaaagagaccgcatgaactaattagcgctttaaattgcaaacttgcaggccataagccattatagtgccgagtgaacagagccagcggcttgttatgggtaagaatatttaggatgacgcatggaaccgtttgccacaactacacacgcggccaaaaa

SEQ ID NO: 100291 - DNA, 537 bp, Zea mays
  Clone ID: MRT4577_2297C.1
acgcaaactaagcgtcttatttcccgatcataaaatcaataataaaaatagtgaattggctcaccacatctcaattcaatctggtagttgcctgaacgacgacgacctttagttgaagtcctctatcgaacagctgacgagtatagaatggagcttttgtcgagcacttggtgaatatcacgctgctagcttcgtcttcacccgactcttgggttttcttgatgatgttcggaacgatggcaagatcgaatttggagcgagctggtgaggtggggtcgagcaggttagcgcgagctcaggcgacgacgaagtcacgagccagggaggacgggttcaatagctagggtaacaacgagcagtgacaacgagcaggcgcgagcgttaacgctagccagcggcaagcacaagtgctggatacaacagatgacacccagcgagcacgcagcgaggcacacaacaacgacgatagtcgaatcggcaacagagcgttggcgaattcgacgaacacgaccacggtcgcgtgctggcgcgggtagg

SEQ ID NO: 100292 - DNA, 231 bp, Zea mays
  unsure (1)..(231): unsure at all n locations
  Clone ID: MRT4577_22980C.1
tgggtacctcgnaggccggccgggccgggaataagactccagaaacaaaccccgccgcccctccgcttctctcccgagtcccgactcccgagtaccgtcttctgccccgttcgctccccctcatcgnaaaaaccctaacccctcgacctctcaagatggcgtcgacgacgccgtctcccgtcgaagtcgaagacccagccgacgcggcgttcggaccgtcgccgtcggcgc

SEQ ID NO: 100293 - DNA, 216 bp, Zea mays
  Clone ID: MRT4577_22981C.1
ggaattcgagggcacagacgccacagcatccgataagccttgacactcgtaatgaacagtgtgcccctgcgtcaacgatagtataggggcgaaaatcataacagttcattgccgccgcacggacacctaggccatgacgcggcccgtgggaggggcgcccggaaccagaccgacggatacacccatcaatccagagaaaggaggacaacacagacg

SEQ ID NO: 100294 - DNA, 2336 bp, Zea mays
  Clone ID: MRT4577_22982C.1
atgcaaacttcggcagtcccctcgtcggacgaactctcgccggacctcgcagtccatgcagccggcgagttagcctcgtcgttgcctccaggagaggtcgttggcagcgacacagggctggccctcaatccgtcgccgttggtcgatgctgctctgacgatcgccgacgttgacaactcttggttggaggcaccaccagattgtcgtgaagatcctgttgaaacgggcactgtcaattttcagttaatagtgtttgacccatcggaagtatttgattttgagggtattggacctgatcttcgatgggatgaagaagggcctcaacatgtgactgtgatgaatgatcatcacacttgcacttctagtggtcggaggaggacaagcacaccaaccagtgcttgggttgctgctaaagctttacctatccttgagaagaaaccacacacaggtgcaaaggatttacagactttccttcaagatacgtacaagtgcaccatttcttatgatacagtttggtatggaaaagagaaagccttgaaggagttgtttgggacttgggaagagagtttccaacttctattctcttggaaggaggctgtattgcagcggtcacctgatagtgtcattgaaattgatgtacgtgttgaggatggcagagtttattttagtaggttcttttgtgcacttggcccttgtattagtggtttcttacatggatgcagaccttacttgagtgttgattcgacagctttgaatggtagatggaatggtcacctaccatctgcaacagccgtcgacgaccacaactggatgttccctgttgcatatggattctttgagtccgaaacagaggacaactggcattggttccttctacagttacgcaaggccatcggggatttacctaacctagcattgtgttctgatgcttgcaaagggctaacaaatgcaatgaaggatgtttttccagaagcagagaaaagagagtgtttccggcacctaatgaacaattatgtcaagcaatatgctggatcagaatacatgtaccctgctgccagggcgtacaaaggcagaaataggttccattccttattgtggtaccgaagtgcattcaaccctactatcaaatgcgactatgtaacaaataacattgctgaggtgttcaataactggataaaggactacaaggacctccctgtttgtgacctgactaacaaaattaggataatgatcatgcaactattctacaagaggaggcggataggaaggaggttggagggaaagattttaccttctatcatagcacaactcaatgcaagaactagaggacttggacacttggaggtcataaaaggcgatgactatgttgcagaggtgagagacaatggtgattgtttttctagatatgtggtgaaggctcatcttagagaatgttcatgtaaggaatggcaacatacggggaagccctgccaccatgcattatgtctaattaccacacagcaatatagaaatgtaatgatggaggagtttgtcgacgattactactcagttgacatgtttaggaaagcttatgagagattggtggagccaattgaaagcaaattattttggccaaaggtggattttgcaaaggaggttggtgctccactaggcaagagaggcgtgggacgtcaaaggaaaaataggttcaagacttgtctagaaggtgggagtagtaagaaaaagcctgccaacgaaagtgagaaagctaagaagattattcgaggcaaattcaagtgccctaattgtggggagttagggcataggaagacaagctacaaatgcccactaaatggaatgaagaaaaggaaaaggaaaccaagaaagaactcaacaaagaaatggtttcctaaggagccagctgaagcttcttcatcacagccaaactaggggattctggtcaacaccaacttgtctccactaatgttccagaagaaatagttgatactaccccacagaggagagtgaggtgtgctgtcaaaaagaagattactccgaagaagaagatctgcttctgagtagctgcttaagtatggcagttgtgtctgtattttaagtatgaattatggcagttgtgtttgtattttaagtatgaattatggcagttgtttctggcagctgtcaacaatttctgtttgtgcctgctgtttctggcagctcttacaggctactgatgagatgaaaatgtagaaaaaaaaaaaacttacatacacaatacatgcaaaaaaataaactataatataaatgtaacctaaatcccaattcactgaaccgaagttttacaaccgtcgtgactg

SEQ ID NO: 100295 - DNA, 315 bp, Zea mays
  Clone ID: MRT4577_22983C.1
agtaaggcctctccagtctcgactgctcggccgcctcctgccgcaacccggcgtccactattcacgcctgcctgcgttcgctcaactactcgtggcgtcagctccattgggaccatcgtccggtgttctgctcatgtgcccggcctttgatgcgttgctagttgtagtgtccggtcacgtttcagctacggcagcaagcaacgattgacgatgcgtgcgttcccagtctcatcaccatgcgctacacagctgattgacatccactcctctgggagcggtaagctacgtgagggagtgacatactgccgactacgg

SEQ ID NO: 100296 - DNA, 992 bp, Zea mays
  unsure (1)..(992): unsure at all n locations
  Clone ID: MRT4577_22984C.1
ctctccggggtgtgccgcaatcctacccttccgccgccccgcagcccacgaatcgtcaggtttgattgttcatccatcgtctgacgggtggagctgcacgatggtccatttacggtctcaatccttccctgtnnnnnnnnnnnngcgattgggatcctcgaggccggccggggtgccgcaatcctacccttccgccgccccgcagccacacgaatcgtcaggtttgattgttcatccatcgtctgacgggtggagctgcacgatggtccatttacggtctccaatccattccctgttttctcgtcggattttgatttcgattctcacgttttctcccttggttttttttgtcgcttcatctgattgactgaaggctgtgatgaccaaaaacacctacctattttctgactcctgacgatagaaaccaatggatccttctgagcctttattaagatctcgcttttctgtttgattaatcttcgctttttctctggttcggttgtcatctgatatttttttacccctaaaaatgatgcgcgagggtaggatttgctttgttgatgggatgataagccttgacagaaacttcagtgttgacccaaatatcagactacaattatctgatcgactccaaattcttgccttttgaacttgttcgtagtatttattttgctcttgaagtcgaacgttgccgtttgttttttgtttcaacctggtatgtgtttgtgtgttgtccgtgcacaataagccgatgctctggatgatgaacacaggaaggaagcatggtagtgtgcacggagaaggaggaggtctgcatgtctgctcgctttgatgccctcgggctctgatctcgcgggcctggattcgacctacacgcgcgctagcttagattctcttgcgaactgtgacgtctttttgaatggattttaatgagcgacgattcaggcagcccctttgtccgatctcatggntcatggnagtgttgcgttgct

SEQ ID NO: 100297 - DNA, 537 bp, Zea mays
  Clone ID: MRT4577_22985C.1
ccgcgtcccgccgctcctagtggctagagccaccgccactcgctcccctccccctccgcgcggcgctcacggcgatggatgagtgggttcgccaggccgaggcgtgggcgggccaggccgagcgctggatccgccagcagcccccggagcagatttacgtcgccgtcgccgtgattgccgtcacaattctggtgctcctcgcagcttcttgtctgaaatcatcgaaatcaaataccattgtgctatccgggctaagtggaagtggtaaaactattcttttctaccagcttcgtgatgggtcatctcatcaaggaactgtgacatcgatggatcctaacaatgatacgtttgtgctacattcagagcttgaaaggaaaggcaaagttaaacctgtccatgttgttgatgttcctggtcatgcaaggctgaaacccaagctggatgaattcctgcctcgggcagctggagttgtttttgttgctgatgctcaggatttcttgtctagcatgcaagctgctgcagagcacttatatgaca

SEQ ID NO: 100298 - DNA, 239 bp, Zea mays
  Clone ID: MRT4577_22986C.1
ggatcaaactttatagtgtcggtttctttttttttgatggcattaacactctctttgtacagattctgctacaaaaaagaagccacagggccacctaacatacccctgttaaggggaacttaaataaaccccccactaacttatttcctcaaaaaaaacacccaaaagttacgaaactttattataaaaatttccattgttataaaaataccattttattaccaaaatgagaccccttt

SEQ ID NO: 100299 - DNA, 222 bp, Zea mays
  Clone ID: MRT4577_22987C.1
ggccgcgcctttttttttttttttttaccaaaagcaaggatctatatttcaaggaaacacaagcatcaacatcggcgggcgtattattgggccacggggggggtattctatcgctatattataacatggctacatcacgaaaggggacatcaaatctcatcgttgtccttataaccaccatgcttcacatttaactatctccctcacattccattatcttgc

SEQ ID NO: 100300 - DNA, 312 bp, Zea mays
  Clone ID: MRT4577_22988C.1
gtttgaagcctttatctagcgatgaggatgcagtcgaatcaatctggcgccatgggtaacattctctgctagcagttcagcctaagtgaccttccttagctcacatgacacgtcattaaaactagctgatctcacctacgaatgcgtccgcataatgtgcgcaagccaatgctacagacagtagacattaaatggtatgcatcgctagcctgctgagggcgctgataactcaagcagcaaggacacgtgccatgcgaaaatcagcccaagatcctgtatggtcacgaggcggatgaaatcatgatttatcag

SEQ ID NO: 100301 - DNA, 271 bp, Zea mays
  Clone ID: MRT4577_22989C.1
ttgaaacccgcccggggttgggccaccacccttaataaaattttggttgggggtggtggtgtcaacttgttaaaccttgtccggttccttttggaaccttccgaagccgttgccgaatttgattccgttgccgaacccgaatttgcttccgaagaacaacttcttttttcttggcaatccaattttacttagttaacccaaaaagaaaaaacctggaagcttacaccaccccacccagaacctgaaacccaccccttgccttgaacccaat

SEQ ID NO: 100302 - DNA, 135 bp, Zea mays
  unsure (1)..(135): unsure at all n locations
  Clone ID: MRT4577_2298C.1
cccctttgtttagggttccagaaaaaacatccccttagggagggacacaaccccggcagggctcaaacggggggggcgactgtggccangcccacccaactntaactctaaccgatcgagacgtagnccggaaaa

SEQ ID NO: 100303 - DNA, 466 bp, Zea mays
  unsure (1)..(466): unsure at all n locations
  Clone ID: MRT4577_22990C.1
aattcggcacgaggccgagccgcacgccacgcagacgggacactgaccccattcaaagttccaagtccgcaatacccctgttntcgtgccgcttttcttgtgatcgacgccgcggaccctagcccgacgcaacctctacggcgcaaagctaaaacactccagacctggaaccttcaggatcgcaaagctgacatcacctacacgctgggcctcactaattcccaaatgcatatcacagcgccgtggcccggtccgccctgcacagatcgggctgcgaatggatgctgtccgcgcgcgtcactgcccacgccacacagttgtaaccgatcgacctccatagatgccaacacgagggccacgatctctacaagacctctacttcaccgccacgagcgcaacatcctgcctgacctgtgtgtgatggggcacaaggacgggatccgcactctcactacaatattcatgg

SEQ ID NO: 100304 - DNA, 275 bp, Zea mays
  Clone ID: MRT4577_22991C.1
ataccctctccaaacttcacctgtgtctgcccgaaacgtgtgccatgcgctcctcgcacaagaagagatcgatctcgccgtgctgctcctgattaccgcctttatgagaggctctcccaatgccccctacgcactcgcttgcggcacactatcggagagacatgttcacgacgatacagcgtcgtggtctcccacgccgacgtgctcctgtacctgtcacacttcgggaccctgcggcgactagatcatccacaacctgttctttgtatagtcaa

SEQ ID NO: 100305 - DNA, 1102 bp, Zea mays
  Clone ID: MRT4577_22992C.1
cattgggtacctcgaggccggccgggcttctccctttccgctccaatttgacgagtcgtcggcgctagcaagatcattcgctccgccgctctccgccgacccatttctaacaagcaacagctgctgcgtaacatatatacacagtgtatgcacacctgcaggcagcatggccgggtgcaagcaggacgacgacgccgtcggccgttctccttcgtcgtcgtccatggacagcagcagcagcacccacccgccggcgctatccgccgcgtcgtcgtcgggcttccggccgacgacgacggagaggagggacgaccttagcaccgaccttcagctagggctctgcagcctgtcgccggcggcgtcctccgccctcctggtggtagcggagagcaagagcgtcctttccacgccaaggggcagcaggaccacccaagactggcccccgatcaaaccattcctcagaagcgccttgacagcctcggcacgccgacgacggcggacactgttcgtgaaggtgtacatggaaggcgttgcgatcggccggaagctggacttgctcttgctggatgggtacgacagcctcctagcgaagctccgccacatgttcaaggcctccatcacctttgctgatgctatggagtaccaccaacgagttcctcacgagaagcctgcacatgttctcacctatgaagaccgggatggagactggatgatggttggggatgtaccgtgggagctcttccttggaagtgtgaagaaacttaggatttgcaagaacagataaatgctagttagcaaagcttattattcgtgcgctgcatggactctatttctttcttctttttatttatatcggttcatacagaaagattttgctggccacagagtggacatgcatgtgataccgaggctatatatactgaccgtgtacagtatactgaagaaaagtcaatcttgataccttccctagaaaattaatttttggtattttttatgtttccttttctgttttctctgagtgccttgtaaataccatggctgtttgttaaagaagaggcgatttgcgtgaagaaaaaaaaaaaaaaaaaaggcccctagggcc

SEQ ID NO: 100306 - DNA, 850 bp, Zea mays
  Clone ID: MRT4577_22993C.1
ctacttcgaactttgacgccattcagatatatctacttcattggattttgcagccccctgaatctggccctcgccggacatttccataggcagaaagttcaacaagatccatgtcccgtcctgaaaccctacagtatgcactcttctgtatgagctcagatttggatatctcagtcttgttgcctttagatcgatccaccgtagccgaccggagatgggctgggctaggccggcgaggacgcgggagagggcgacgcggaagtgggcgacgacgtcgtgggagtaggggccgcagtcgcggcagacgacctccatggcctccacgaagaggatgaggctgcgcaccggcggcacgtacagcgtcagcggggccgccgagaaggccgccgccatcagcagctgcagcatcttggacgaacgcacgcctcctggttcttcctcccccttccccttcgcccccgcgacgagagccaacccaatcagatctaggcggctcggtcttgggcgtatggcgtgggagacgggagtgttatgaggcggcggtggacaccgagattgccgctggggagagcgagcgccgagattgccgcgggggagggcgaggcgggcgggatgcggggtgcgccagcggcaagcggcagaacatgcacctgtgcacgcctacaataggcacttcaatagtagtagatatatatatatatatattctggcatcgagctattttgccgcaggacctcccctacagtatcgtcaccgcagtagagtttaaccaccaaattcgggatggattggtgtggttcctctacgcctaggaggtgagaatacccggccggcctcgaggtacccaatg

SEQ ID NO: 100307 - DNA, 918 bp, Zea mays
  Clone ID: MRT4577_22994C.1
atggcgcaccggacagtccgctcccgtgcatgttcatccctacaggcgggttatcctgttgcatacttgagcaaggccttgggacccaaactacaagaggtggtttcatcatatgatggggacaatgaggcttcgacgatggtagccaaattggcactcgatcctcaagctatacctcataaagcttggcaatatggtcttctgagatacatgaatcgtatttggctcgaagataatgtgcagttgcagcaacgcttggtctcaacatttcattgctcgacagtagtgggctattcagggttccctgtaacctttgcttggctcaagcacctatttccatggaaggtggataccttcaccaaatatccaaatttccttcccctctggcatccatttacagctttcacggtagctcgtgtatttcttgaccacatctataaacaccatggtcttcctcaatccattgtatccgatcaggataaggtgttccttagccgtttgtggcaagaacaatttcacctggcagatgttcagcttcatatgagttcgacgtaccatctgcaatatgatgggcaaattgagaaggttaatgagtgcctagaaacgtttctgcgtagctttgtgcacgcgtgtccaaatcgttggagtaagtggctttctgttgctcagttttggtataactcttctactcactttgctacaggcctctcgccatttgaagccttgtatggctgtcagcccagacaacttgggatcaccgatcagcctatcatcagttcgtcacagctagcggattggttacaacaacgtttgttgaattctgatctgttgaagcaacatcttgagcgggccaagcttcgcatgaagcgaaaagctggtaaaggacgttcagagtgcgagtttgctgttggtgaatga

SEQ ID NO: 100308 - DNA, 1215 bp, Zea mays
  Clone ID: MRT4577_22995C.1
ctcgaggccggccggggctatatctattctatctttttgcctatacttgaaaccctaactctgcttttgctgcaacccctgcctcaaaaattcacttgtcaatcgtgactttgcgctcgactccgcacttgtgaggatatggcacccaggaaaaaaagcagggggcctcggtagctgccattcttccccttgaccctaacagctagcttctgtttctacgggagcaacgaccgagtcgttgaggttgaggggtcctcctcctcctcctccatggcggacgtgtacaaaggcgagctcacgccgctgcagaggcacgtcgccttcttcgaccgcaacaaggacggcgtcatctacccctccgagacataccaagggttccgagctatcgggtgtggcgtcgccctgtctgctgctgctgccgtcttcgtcaacggtggacttggacccaagaccgtactggagaacgagaagcctgcgcctttcaagttccccatctacgtgaagaacatccacaggggccagcacggcagcgattcgggcgtctacgattccaacggaagatttgttcctgaaaagtttgaggagattttcaagaagtatgcccaaacgaggcctgatgcccttacaggcaaagagctacaggagatgatgaaagcaaacagagaacccaaggacttgaaaggatggctgggtggcttcacagagtggaaggtgctgtactccctgtgcaaagacaaggacgggtttctccacaaagacactgtcagggcggtctacgatggcagcctgtttgaaaggttggagcaagagaggaactcaaagaaagagtcgagtaagaagaaatgatgagaaatccagacgctcttatgtggacgagtttgcaagtcacgctgtgcgtgtggttgggtactatcataatttgatttattctatatgtttgtcgattcatataacgatattgcaagtatttgtcgaacgtgtttgaattagcaagacatatagctgtgagctttgatagcctcccatatttttttcagttcatattttacattaacgtttttgtgcggtgcttgaaaatatttcgagcgtgttgttgttttttttcagttgtcttagtcatggactcatggtagattgctaccgcttttaaggctattgtttgtctaatttaagcctctttcatctatataatcagatgctcttgctcggttggtt

SEQ ID NO: 100309 - DNA, 2223 bp, Zea mays
  Clone ID: MRT4577_22996C.1
ccggccgggccggggtcgctcccgagcactgatggcccttttctgtgacctacaagataggggtgaaatgggcttgctggctgggccagaggtcagtctgcaccttctcaagaagccagtgtagtacccctagccttacttcgtgacgatgataccgctggagcaatagctcaaatattcttcagaatatagaagcgttagtaacacgtacctgtcttaacaacctcgatcgccaacaacaagtttggaccggctggagcagcacggccgcgacccgcgagacacgaaaccgggcgtcgactggtttcttttcgcgttgcgcgcaggcagagactgggcggtgcaagcgcaacgcaacacggctggagcggcggcattcatgcagataactcccacctcctcacgccacgccaccaacgcatccgcagacagcgtcagtttccaccgatcgaaatcgaaactgccctcgattcctttccaccccgtcctctctgtcgcccgctacgtcgctgacacaccacaccgctttgagggggcttggagctggagcatctctgttccgagttccttcctctttcctctaaggcaaggctcctccaacttccgctccctgtttctctacagatccttctctcctcctctcgtccttcgtcgtcgtcgtcgtcgtcgcgtgatctcggcctcctgcgacctccatggctggcaaagctgctgcagacactgggagcaacgaccgagtcgttgaggttgaggggtcctcctcctcctccatggcggacgtgtacaaaggcgagctcacgccgctgcagaggcacgtctccttcttcgaccgcaacaaggacggcgtcatctacccctccgagacataccaagggttccgagctatcgggtgtggcgtcgccctgtctgctgctgctgccgtcttcgtcaacggtggacttggacccaagaccgtactggtaccagagcttgagtcactttgatttctgcattgaaaaaaaaaaatctgaatcatccttagagcatgcctgcctgcctgcttggttcggtttggtttggtttcgccggccagcgtctgcagtagacggaagacgtaaccgtattctcaaaacctcagaagatcgaatgaagtgatattaacagcatcatctagaattctagagtcgtaaacaatataatggcaccctgatcagataaccaacccataacacaccttgaaagttgaaagagagatgccactacaccacctttgtcttcggaaaagaaaaaaaaggcaggcgtaaaagctacctgccgtgtcgtatggcgtatagcagtatagctacgtgcattcatccacgcgagattctttttttttggtggggcatcttttcaataattaatgtcacatttgatatttctctatcgtctccccctgatggagctgactctggctcgttcgtgtccgtgcatgccttctctggcgtcgcgcgctgaaggagaacgagaagcctgcgcctttcaagttccccatctacgtgaagaacatccacaggggcaagcacggcagcgattcgggcgtctacgattccaacggaagatttgtacctgaaaagtttgaggagattttcaagaagtatgcccacacgaggcctgatgcccttacaggcaaagagctacaggagatgatgaaagcaaacagagaacccaaggacttgaaaggatggctgggtggcttcacagagtggaaggtgctgtactccctgtgcaaagacaaggacgggtttctccacaaagacactgtcagggcggtctacgatggcagcctgtttgaaaggttggagcaagagaggaactcaaagaaagagtcgagtaagaagaaatgatgagaaatccagacgctcttatgtggacgagtttgcaagtcacgctgtgcgtgtggttgggtactatcataatttgatttattctatatgtttgtcgattcatataacgatattgcaagtatttgtcgaacgtgtttgaattagcaagacatatagctgtgagctttgatagcctcccatattttttcagttcatattttacattaaaaaaaaaaaaaaaaaagcggccgtttttgtgcggtgcttgaaaatatttcgagcgtgctgttgtttttttcagttgtcttagtcatggactcatggtagattgctaccgcttttaaggctattgtttgtctaatttaagcctctttcatct

SEQ ID NO: 100310 - DNA, 1853 bp, Zea mays
  unsure (1)..(1853): unsure at all n locations
  Clone ID: MRT4577_22997C.1
aggccggccgggatttcgttcgcgctgccgccgccgcttcttcttcttcctccctgctgctgcggcggcggaattgtgcgttggagggctgtgggctggcgactggtctctgcccctcctccctcttctccggcttgttcgccgaattgaatctgcgggggttgcgttgcagcgatgcgggcgcgggagccccggatgtggatggggtggtgctgggtggcgctcgctgctctgctcgccttgatcctgccgccgtccaacgccacgctctcccctgccggcatcaactacgaagtggtggctctgatggccatcaagacggagctggaggacccctacaacgtgctcgacaactgggacatcaactccgtcgacccctgcagctggaggatggtcacgtgctcctccgacggctacgtctccgctacagagagtcctaggttacgcttgtcccgatacatgtcacatggaatcggtaacctcaccaggctgcaatctgtgctgttgcagaacaacgtgatttctggacctattcccagtacgataggaaggctggggatgctaaagactcttgacatgtcagataaccagctcacggggagtatcccaggctcgcttggaaatctgaagaacctcaattatttgaagttgaacaataatagcttgtctggangtctgcctgattcaattgccagcattgatggtttctgttatagagatctttcgtttaacaatctcagtggcccattacccaagatttctgcaagaacctttatcatagctggaaatccaatgatttgtggtaataaatctggagatagctgctcttctgtgtcacttgacccactctcttacccaccagatgatctgaaaactcagccacaacaaggtattggaaggagccatcatattgctacaatatgtggagcaactgttggttcggtagcttttgtcactgttgtagttggtatgcttctttggtggcgtcataggcgaaatcagcagatcttttttgatgttaacgatcaatatgatccagaagtttgtttgggtcatctaaagcggtatgctttcaaggagctccgtgcagctactaataattttaactcaaagaacatcttaggtgaaggtggatatggcatagtatacaagggttatttgcgtgatggctccgttgttgctgttaaaaggctgaaggattataatgccgtcggtggggaagttcaattccaaactgaagttgaagtcataagcttggctgtgcatcggaatctcctccgtcttattgggttctgcactacggagagcgagaggttacttgtttatccatatatgccaaatggaagtgttgcttctcaattgcgggaacatataaacggcaagccagctctagactggccaaggagaaagaggatagcgctaggcacggcacggggcctgctctaccttcacgagcaatgcgacccgaagataatccaccgggacgtaaaggcttccaacgtgcttctcgacgagtacttcgaagcgatcgtgggagacttcgggctggcgaaactcctggaccacagggagtcccacgtcacgaccgcggtgcgcgggaccgtcgggcacatcgcgccggagtacctgtcgacgggccagtcgtcggagaagaccgacgtgtttgggttcggggttctgttagtcgagctgatcactgggcagaaggcgctggatttcggaagggtggcgaaccagaagggtggagtgctcgactgggtaagcatgcacgcatgcagcttgtgtttactttacttgtccgatttcaggtttgctttgaaacttcaaaatgaagaacgtctgtctgtctgtct

SEQ ID NO: 100311 - DNA, 857 bp, Zea mays
  Clone ID: MRT4577_22998C.1
gtctgctgagtcttattcagttccaaagggcctcaagatactcgagaatttggccgatgcatctagtctaatcactgggcttgagcatgaattgccagttccttgggcaaaacttaagcgagttttctggttcgatggctttggtaacgatgagtcagccaccgagcaggctctcttgcagaagttcttcgcgagtattgccatcaagattttgtcggaacagctgtccggcctgcaggtcatcctgatcatgaaaaacacgagatacattcagttgcaggtggaaagattggcgcgggagtgcttctttttcctcagcgaatcgtttctgtctgatgaagcaaatctaggatggttctcagatacctccacgcacacaagaaggatgcaagtggcagcaccggtgacctacgtcttcaacctgcaccctccctcctctactcagtttggggattatccggcggaacttcgggaggctttacgcagggattagttaggccaggttatccacgtgaatagctagtgtcatctggatttcgtagcagtgaaccttgttcgtggtattggcactgaagccctttctgtctgtgagttgtgagcttgcttactcgttcttagtaagacgctgaggaatattgcataactccattcaggtgtcaactgtcggtcgtctcatggacagcttattaggccgctgcttgcaaatatcatttgtgggtgggcgtaaatatgcttgacctggtaagttaacgtacgtttgagtgcttttgttgactgcgaaattgtaccttcacgatgtcatctattgtatgcagacgaaagcattctgaaatatcatttatagtgtgcaggccgcc

SEQ ID NO: 100312 - DNA, 154 bp, Zea mays
  Clone ID: MRT4577_22999C.1
ccggccgggactgaggagcgcctggccgtgctcgtctacagcctcggcgacgtgaccgccaccggcgtgcagacgccgaccgacgacaggatcgaggaggcgtacgtcaatgtcgtctacctcagcgataaccagtattactgcgcgacaggag

SEQ ID NO: 100313 - DNA, 974 bp, Zea mays
  Clone ID: MRT4577_2299C.1
gtcgggaaaaccccatgcttctcctctcccccagtgcagtccctgcgcctgctctgcgggggaggcctcggcgcagtcggcggctggtgccgcctcccctcgcctccgcgcccgcttccatcgtcgtcagctccgacgaggacgcattcaacgtctgctccgggtacctgttcgaggagggcgcggccaccgagtcggagctccccaccgcgtacaggacgcattcaccaggtgctctgggtacctgttcgaggaggcccgtgctcccgagtcgcagctccccagcgcgtacgacctccccgtggtcgcggctgcggtacctcgatcgcgtcaacgagcgcgccgacgacatgttcgagcttcgggcggctccgctcaggaggatactcttggagcttggcccggcatttgtgaagatcgcacaagcagtttcgtcacccacgcgtgttgttccacctgcataccttgatgagctctcactacttcaggaccgcatagcaccattttcaaacgatgttgcttttaatattatagagaaagagcttgggcttccactggatatggttttctctgagataacaccagagcctgttgctgctgcatctcttgggcaggtttaccaggctaggctccgctccagtgggaagattgttgctgtcaaagtacaaagacctggagttcaagcagcaatttcattagacatatatatcttgaggttcctagctaatcttgcaaggaaggctgccaagttgaacacagaccttccagctgtgcttgacgaatgggcatcaagcctattccgggagatggattatagagaagaagcaagaaatggacttaagttcagagaattgtttgggaaatttagagatgtgtcggttcctgaaatgtatctggaccagacaagaaggcgagtccttatcatggaatggatcgagggggaaaagttatcagaagtcagagatcaatatttg

SEQ ID NO: 100314 - DNA, 181 bp, Zea mays
  Clone ID: MRT4577_229C.1
ctttgataatcatgagctgctacatatgttgtcctactttaagctacgaaggcactttgataattaattagaaaatgcttctggttacatttattgttggagaaactggatcagtctacctttgattggaacagttatcaagctaattatattgtacatacttactaaattttattcaata

SEQ ID NO: 100315 - DNA, 713 bp, Zea mays
  Clone ID: MRT4577_22C.1
attgggtacctcgaggccggccgggccaccacaagcgcagtcaccccagccgcaaactgcagctctgcaagctacagaggccaccacgagtccacgacgccacgccctccgagagaaagagaaagagaaaaccaaagcacgataatgcccccgacccccacagccgccgcagccggcgccgccgtggcggcggcatcagcagcggagcaggcggcgttccgcctcgtgggccaccgcaacttcgtccgcttcaacccgcgctccgaccgcttccacacgctcgcgttccaccacgtggagctctggtgcgccgacgcggcctccgccgcgggccgcttctccttcggcctgggcgcgccgctcgccgcgcgctccgacctctccacgggcaactccgcgcacgcgtccctgctgctccgctccggctccctctccttcctcttcacggcgccctacgcgcacggcgccgacgccgccaccgctgcgctgccctccttctccgccgccgccgcgcggcgcttcgcggccgaccacggcctcgcggtgcgcgccgtcgcgctccgcgtcgccgacgccgaggaggccttccgcaccagcgtcgcggccggggcgcgcccggctttcggccccgtcgacctcggccgcggcttccgcctcgccgaggtcgagctctacggcgacgtcgtgctccggtacgtgagctacccggacga

SEQ ID NO: 100316 - DNA, 217 bp, Zea mays
  Clone ID: MRT4577_23000C.1
gctacctcatctatcacacatgatacctcaggaatcctgctgtatgttgacaactccatcttgtagctgcacaatcgctttgctggatacgcgttcagacttgtatataatgacagttttacggaaaccctatcgtcgagcataaggaatcactgtgtacaaactggccaagtgcttctgaagataacgtcagtggtgtaaatattcgacaggccat

SEQ ID NO: 100317 - DNA, 652 bp, Zea mays
  Clone ID: MRT4577_23001C.1
cccccttcgagtttttttttttttttttttttttttttttttttttttttttttttttttttttttttttttttttttttttttttttttggcccacccgcggccttttttggtggggctaaaaaataccggggttttgttggttggcccccttcccaaaaaagggggttggggtttaaaaaacagctttgccaatttaacctggggggaccggtccccccaaccaagggatattttcctttaaaacaataaccggcccccataaaaaaacttaaaaattcactttttcccctgggggggggccctccagggaaggaaaaagggctccggtttttttatccccaaccccccccggcccggaaaaacttattgaccagaaccttactttaaaggcaaacccttcctcccctacaaaaaaaaaaatttccttttaccctcctagggttttaccccgggggggcaaattttgttgggcccttttaaaaaaaaagccagggtttcaatcagaagtggccccccctttgccccagggcagaatttttttgtgtgggggaaataaaaggttcgtttttcccccccaccagggaaaaaatagttccaaaagggtgggcccaaacaatgccaattgtgggggggcggttttcccttccca

SEQ ID NO: 100318 - DNA, 1041 bp, Zea mays
  unsure (1)..(1041): unsure at all n locations
  Clone ID: MRT4577_23002C.1
tcggcgcagttggcnggtgggcaccgacggcggcagtccaaagaggtcgacgaagcggtgcccctgaagctggagagccgagctgcgtgcgccacgaaccctggctgcagaatataacgagttattatcgaagaagcgaggagagacacaatgggatgagtggcggcactgtcattgtcgccgcttccttcaccatgtaccatgtcactttgtcgaacactgagaaggaggttgttttttctcaacgtagagaaggcgatgcctaggttctagaataatatagtaacatataggaccgagtcgttcattcctgttataggaaagaaaatgtgaagcatctttggccattggaacgtgatcgtgcggccaggaaaaagatccaagcgccgcctctccctcccacagctattgatccaaacgcgctcggcctctgggagcatcgcgacgtcgacgtgcggagtggccgggagtgtgtccgagtccgagctcctgttcccgcggtgtccgtgtccgtgttcgtgtccgagtccgagctcctgttcaagcggtttttggccgttgagcagagcactcgccgttgagccatcgcatctgtcatgctgcggcggtcgccaaactcgtcgtgcctgcagtcggatttgactccacggactgatacaggaggcttcgacttcgagatgaaagcatgcgtgatatggaacaagatgaacgggtgccgaagctgtggcctaaaaagcatcggcttagcacaacgacgaaggtggaagatggaaccgagctaaatgagaaaagactacttaaccttgacagcttgtcttattgttagcagtaaaagtcaggggcatgaatgtaatcttgtccggactgcgtcccgtgcctataaatagatgaacagtaacactatactgttcaggctacactgtaatagctcttgcattactctcacattcatgccttccaacgagtcgaaggtatcaataaaatatgaatattatgagtatttattcatggttatgatatgagaatgtaaacaatttatcg

SEQ ID NO: 100319 - DNA, 480 bp, Zea mays
  Clone ID: MRT4577_23003C.1
aagctttttttttttttttttttttttttttttttttttttttttttttttttctttcccccgcccgcgggggcgcgggcaagggcaaaggccggcgcaccgggggccggcacaagcgggcccaagcccggggccaacatgggcaaaaacaaggccagagccagtgcgtgagggaaataggtttccccccacaacaccacccaaaaaaagaaacggaaaaaaaaagggggaaaacggggggggcaaaaaaaaaaaaaaaccaaggggaataggggcggggccccagcccgcaaaccaaaggggaaaacggcggtaccaaaagggaaaaaaaacaggcaaaggcggggggggaagggggttgggaaaagggcccccttccactgacacggaaaccaaaggcgtgcgcctggggggaggggtggcgggacccgcataagcgcacccaagggtgggcacaccgccagggcccagccgcagggg

SEQ ID NO: 100320 - DNA, 293 bp, Zea mays
  Clone ID: MRT4577_23004C.1
ccgtattcgtgctcacacacacaaaccgtagacgcgatcaggctcaaacgtctcaagctgcgatcgaaggacaggtacaccacaggcgactcaaggctctcggtgatgaagcccaacgctgagtaggacccatacaagcgcaagatgcctcagagcgcgttcttcgtcttcatggaggagttctggaaagactacgaggataagcaccctcatgagaagcaagtctccctggttggcacggctggtggtgccaagtggaagtcactgtctgatgacgctgatgctccctaagt

SEQ ID NO: 100321 - DNA, 678 bp, Zea mays
  Clone ID: MRT4577_23005C.1
ttttttttttttttttttttttttttttttttttttttttttttttttttttttttaaagcatgattagggggaaccggagcaacggacgggcatccaactaggaatccttataattattattcaaccattcgatacaaaactttagttaggaaaaccaactaaacccctaaaaaaactccccttggaaaaggccccgaaactggacgggttgacaggaattatagcagctttgatttgaacagccacaggcgccgttgaagcggactgggcctgtagcccggttttcctacaaaaccaggggggaggcataatgcatccctttttcaggcacatgaataagggaacagataaacaatgaataaaactaacagataaacaaggaataaaattacctttaattggggggcgatatctccacaggacatatccaggcttaaataatgagtatgtcttaaaaagggagaaggcggacaacactacgaatcaagcaacagggtggaatcctttaaaaacaaaaccttggaaaggggggtgatatctcaagcatcttgggacataaaaaaaaggggctacagcttcttcgggggttttctgaagaacaccgtggcccaagttaagtatatgaccttttggaccagctgttttcacaaccctgcaaagcaggcagtaagagacc

SEQ ID NO: 100322 - DNA, 245 bp, Zea mays
  Clone ID: MRT4577_23006C.1
cccacgcgtccggtcagggtcttcatgtaccccagtagcatctaaagataatttgaaggtttggaggatcatgcttttcttctagattttatctaaagctgtccttgtaagggttgtgttcaggttgagagttagcaggttgagctgtctatttgagaaccctttaaagttctccaagttttggtgttatgaatcacttgaaacattattatatggagttgaagttagaactgagttaatttgcc

SEQ ID NO: 100323 - DNA, 290 bp, Zea mays
  Clone ID: MRT4577_23007C.1
tctctctcctcgcgaccaccccgtcgaaccctaacccgcaccctgatccgccgccgtcgccacctccaccaccagcccaccgaagcctcccaccgttccattcgcttcccccccaccgcttcctcctcctcataaagcctgcgccgttcgaaaatctttgcctccagatcgggatcctgcggcagttcttgtatcgccagatcgatcggatggctgcagcggcggtggacccgatggtgcttgggctgggaacgagcggaggtgcgagcgggagcggagtggtaggaggt

SEQ ID NO: 100324 - DNA, 293 bp, Zea mays
  Clone ID: MRT4577_23008C.1
ccccccacggactttacggtcccatgggcccattcatattttttaacctgagcctaacacaaatcgcattcccccagatggaaagctaaagtcatagttgtttgtttaaacacctggctaccaccattaagttttccaaactaggcctattatggggttacgggggacaaccccttgggatgtttgtaaccaagggggcacgcaacatgcacctgtccaaatacatacagtccaagggcagggggcactttttttccttggccaaacaaacaaactaattttttgccttcaaa

SEQ ID NO: 100325 - DNA, 427 bp, Zea mays
  unsure (1)..(427): unsure at all n locations
  Clone ID: MRT4577_23009C.1
cggncgcgtgggcggacgcgtgggatttcgcgaggggcggggtgttcctgtttgttagatgaggacaacaggtttgagtagaaagaggtgtagggatttttatgcagcggcgaggcgtggattgcggcgaggggatgcatttccttccatggccgagacgtggatcggcgaggggattgcggcgagggccatggtgcaggccacaagggcagagggtgtggaaggggagagcaaagcgctgcacgcacggggaagaagggagagataggggtagacactgacatgtgggtcgtacgcgccgtggggaggcagaaccacggtgcacgaatggtctacattagagtcttatagagtagtagagattcggtgtctttctaattttcccctggttcctgcttttttacttggagtgttntaatttgggtga

SEQ ID NO: 100326 - DNA, 308 bp, Zea mays
  Clone ID: MRT4577_2300C.1
aagctgtgccgcctgccggtgccgggacgctctacaccggtcgaccctaggcgttcggttttgaaccagacttaagaaggaacaggacgatattagctgtcgatatcaacaagtatcacaagaagctactcccttacccagagatcgttgtttatccagttgacaccattatgctaaagctgggtggtttatatgtacttgcgctggagctgtctgaaaatgaaaccagtgcctcttatgctctgagagcattattagatgggctgctggcacctggatctttaactgctcaaaagaaaaagatataa

SEQ ID NO: 100327 - DNA, 319 bp, Zea mays
  Clone ID: MRT4577_23010C.1
gagctcactagtcggtggccgccctttgtttatatttttttttttttttgtttatatagaacgtgtgaattttatttgcacgcctaatcgcaccatttttttgtcaaaggggaaacaaaacgcgctagattcaaggaccttttgttttattacaaccaccccacaaaacagggcggggctcaaagaacccaaaaaaggggcgggaaccccagctaattccataggctacatagagccggagaacggggaagaccaatttgaattcctggggtccgggctccctcttcaaaaaaaaacacccgaagtttttgacaaaagg

SEQ ID NO: 100328 - DNA, 631 bp, Zea mays
  Clone ID: MRT4577_23011C.1
cctcgaagccggccgggaattttatagtgtaaaatttatggcacattaccatccctaatggtagctgaattcaggcttctaggacatgtgttgccaggaatgccttttcagtatctatgtctgcagtaatcttgattgtgggaagtgacatattgctaaaaaaaaaaaaaaaaaacaaaaaaaaaaaaaaaaaaaaaaaaaaaaaaaaaaaaaaaaaaaaaaaaaaaaaaaaaaactccgggcttacaaaaaagaggaaaagaaataaaccaccccctccggggcgttttaaaaaggggggaggttctcccccccccccccttcgggggtaagggaaccaaaagggcccccggggaatgttaataacgggtgcttcgaaaaaaacctcgcctgggcaaggaaaaacaactccctcaaaaaggccttcagcacgtacgggaaggaccccaaccccaaaaaaatcctcaaacggaaaaggaaaaggccccggggataaaaaattccccaccttctcaaaaaagaaaggccggggaaacgccattgaggccatgaacggaaaggaaggtggagggccaaaacatcaccgggaaaaaagccaaaaaccctggaggccgaaaaaaacccccgaaaa

SEQ ID NO: 100329 - DNA, 302 bp, Zea mays
  Clone ID: MRT4577_23012C.1
gcctggaggctttcctggtggtggagctcctccctctggtggtgcctcctctgggcctaccattgaagaggttgattaagccaacctgatgacaggtctagcattgttccacacatttgaaggacccaaatttgtagcaaattccatggcagttttaaagtcgaagctgctatagtaaatatactgggcattcttgatacttgaatatggaatatgtgcacagggaaaggaaataaacattgcactttataagcactgtattgttaagtggaaaatgcaatgtcttaaataaaactgtattt

SEQ ID NO: 100330 - DNA, 430 bp, Zea mays
  Clone ID: MRT4577_23013C.1
cttaggagggcaacgaccgaaggaatttgggtcgcggtatgcaagaatcctaacgttgttgtgtgggatatagaaggagccgatggtcaagaacatcaagatgatgcatgatttgagaatcaagctgcattgtttgccttgtcgatatccgatgtaatattttttaacatgtaagtgtcgaatctagcttgcaaataactgctttcgttccttgatcattcatatatgttacgtacgctccgatatcgaaccgcttaattaattcagcacaacacaggacacatatatatatatatatatatatagtcttcttttttcagtaatgtgcaggacatcggtcgactgcatggcgcgagtattcctcttcttcgtacaacatttctggagagacataatcacgatatgcatatgacgaaagtggtgatcgctg

SEQ ID NO: 100331 - DNA, 259 bp, Zea mays
  Clone ID: MRT4577_23015C.1
ttttttttttttttttttttccataatttaactctgtctatttaatgtcccttttttgttaagacccaccagatttcccgcacccagaaatgggaggtgaggaaaaccacataatccttatgggaggtccccccctccgataaatttttatggaggggggaaaataaaaccggctttttatgctgttggggccccacaccccaaaattactcgtaattgctcttgaggacaccccatcttaccttttattggggcctgg

SEQ ID NO: 100332 - DNA, 400 bp, Zea mays
  Clone ID: MRT4577_23016C.1
gagcagtgagggccgccgctttggggacttcttcaacaacgccatatgggctcgggaatcaggccggtgaccttcgcggggtcgccgtggattcgtctgggaccgcgacgggtgagtccgagaactggggcaccgctaatcgctcgccggacgtctggcgcgctcaccaaatcactgttcgccgtggtccggtctctgcgccacccgattgccgacgagcaagccaccgtggaatctgaggttcagcaagtagagatagctgagcaggagctcattgaaggagaagaacaggtggtcgaagaggagtcgcctaacactgaggagttcgatctgatctaggtggcgtttctcagttgactttggcgccgacgatccttagttcggtttatatttatcttta

SEQ ID NO: 100333 - DNA, 1639 bp, Zea mays
  Clone ID: MRT4577_23017C.1
aaaccaagcgccatgccgggccggtgttcatcccacgcgtccgccacgcagttaaccaacgccagagaaggagtgcgttgggagagagagcagagcgcagcgatgaggagagcagtgagggccgccgctttggggacttcttcaacaacgccatatgggctcgggaatcaggccggtgaccttcgcggggtcgccgtggattcgtctgggaccgcgacgggtgagtccgagaactggggcaccgctaatcgctcgccggacgtctggcgcgctcaccaaatcactgttcgccgtggtccggtctctgcgccacccgattgccgacgagcaagccaccgtggaatctgaggttcagcaagtagagatagctgagcagcaaatcgtgccctgccccgaaccattaccgtgctgcgcgcctaggcttcacaaccgaactctccatatggcgtgctaccgagcttcgctgatggatttgcacaggcccataatttccgcagcacaaccacaacttttccggaatctcaagtgccgcggttccatccgcctctgttcttgagtgcctcggccgtgttgctcgccaccgtcgtagcactgacctctggcggcacctaaaaggggttgccgagtcctcccttccccctcccttctggatcacgccgcctcagcccttgcacgtcccagccacgctcgcccactgtgtgccgtcgtggtgagaaagaaagcaacgccgccgccctgtacctgtgcgctggcgggcagggaaattatcgcctgcacgttgagcggacctgggcaccgtcgttcagccggatcgtgcagactcagacggtctttatgcggtgggcgccatggtgcgctgtgcatgctcgatgcgtaatcgctcgctcgggtagcgactggagctcgggtgctcgacgtcatggttccccgccgccggggaccagcaggtattcagtcgccggggcccaatccggtgtcctaggagtggtgcctccactcgatggtgtatttcggagtctcgggtcgggcgcagaagcttcacggtctgggaaattgctcatcgaagtcgatatctgcagtggggtcgagctcttccgtggtcgggtgtcgctgctccaaaatcgccgaagagcccgtgaccgaggatcctggtgagcagcaggttgaagtagctgagcaggagctcattgaaggagatgatcaggtggttcaggaggagccgcctaacactgaggagttcgatctgatctaggtggcgtttccccagttgacattggcgccaaggatgatccttagttcgttttatctttattatgttattttataataagtcttccgctatgtaataaatactgtaatgttattgtgacatttatctctacgcactctgttattataaaaaaaaaaaaaaaaaagcgggaaaaaatttgcggcctgttgtcttcttggcgcatgtatgagatgcacctggctttgttccttaaagccgggtgtgacaaacgccatacttgccttatggctaaggagaagaaggtacgtattcggaacactcccaagtatacttcttctagtgatgaagagtcatctgatgatgaagtagactatactgaattgtttaaaggattagatagaaataaag

SEQ ID NO: 100334 - DNA, 2095 bp, Zea mays
  unsure (1)..(2095): unsure at all n locations
  Clone ID: MRT4577_23018C.1
ccggccggggaatggaagtgatgagtcatcgttcgaggactttgagatactccatggtgacatgcaaggcttaactgatactatgtcctttttgaagagtttatcagggcttgttggaaatgacttaagaagccctgagaagcaaactcgagagagggctgctgcttctgtgctctttgactgggaggaggaaatatatgttgcaagagcacctgggcgattagacgttatgggtggtatcgcagattactctggaagtcttgtattgcagatgcccatccgagaggcatgccatgttgctgttcagagaagtgaccctaccaaacagaagcaatggaagcatacacaggctagacaactagcaaatggaggagcagtaccagtgttacaaattgtatcctttggttctgaattaagtaatcgtgcacctacgtttgacatggacctttctgattttatggatggcgacaaaccaatatcttatgataatgtgaaggaatacttttctcgggatccatcccaaaaatgggctgcctatgttgctggaactatttttgtattgatggctgaactaggggtgcgctttaaagacagcatgagcattttggtttcttcatctgtccctgaaggcaaaggtgtctcctcttctgcatctgtggaggttgcttctatgtctgctatcgccgctgcctatggtttaaacattgctccaagggatcttgctttgctctgtcaaaaggttgagaatcgtgtcgtcggagctccttgtggagtaatggaccaaatgacatctgcttgtggagaagctaacaaactcctagcaatggtttgccagcctgcagaagtgaaggagttggttaacattccaactcatataagattttggggtcttgactctgggatacgtcatagtgttggtgggactgattatgggtctgtaagagtaggcacttacatgggccgcaagatgatcaagtgtgctgcatccaacctactttcagaattgttgctctcgtgtacgtctacgcaaccaggcgactcaagtcccgacgaatatgaaggacatggcgtcgacctcctgaaatctgaagcgtcaatggagtatctatgcaacttaccaccacatagggtatgaagctgttttcgcgaaagaaattccggagacgatcactggcgatgcgtttttagagaagtatggagaccacaacgatgcggtaacagaagttgacccaaagcggtcttactgtgtcaaggctcctactagacatcccatatacgagaacttccgagtcgaggccttcaaagcgttgctaacagctgccaaaacagacgagcagctctcagcccttggagagctgatgttccagtgccactacagctacaacgcttgcgggctcggctctgacggcacagacaggctagtgaatctagttcaagaaatccggcacaggaagagctcgcgcgccggagggcccagcctgttcggcgcgaagatcaccggcggagggtccggcggctcggtctgcgtgatggggaagaactgcctgaaaagcagcgaggagatcctcgagatccagaagaggtacaaagcggcgactgggtacctcccgactgttttcgacggctcgtctcccggcgccggcaagtttgggtacctgaagattcggcgccggtccacgtcgccgtctgattgaagaagaagaagaaggaagagctctgctcggtcggccgtaccctcacggtcgtattgatcgtatcgtatcccacgcactacgcccaagatgccaataaatgggacagattgatcggcaataataatactagtagccatagaaaactctagtgataagctgcgaaacaacttgtatgtcgaagaaaatatttgaaaccatggtatctttgtggtcgatatctgaagtgagatgatgtgaatggctattggcgtatgttcaaaacagaaaagaaaaggccgtatctatgcaacttaccaccacataggtatgaagctgttttcgcgaaagaaattccggagacgatcacnggcgatgcgtttttagagaagtatggagaccacaacgatgcggtaacagaagtt

SEQ ID NO: 100335 - DNA, 666 bp, Zea mays
  Clone ID: MRT4577_23019C.1
cactatgactatgaccttgacgcaccgtgcacgcatcgccgccgagctttaggtgctgagcacctcgcctcattccatcccacgtcaagctagatctgccggctctaggcttagaacacatccggataatggtggatgcatcgttctttctgttcgtcgtaagcagttctttgtatcaagtgagatggcagtgacgactcggtaaaattcaagctcaacagaccaaatcacaggtctctctctacatgagatcgatctgtatgccgattttcccgctgaactgagccatctaatttttctctgcttatttgctattcggaatattttctctctacataaaatccccgtttgctttttttccccatcggagggtggaacataatgttgcgatgaggataccaagctctctcttctgaaagcagtgaggacacttgccggcagaatcgaaccaataaccctattgccaccactgagtaacagcagatcccctccaatcttgtcttgtttgtttttcttggtccgtattttggttttggatggtgaagatctactgatgcataatccaacacttgatccgatgccggcttctgccgagcgtgtgatgcaccgacatctctgcatctgaatccttgacatcttttactggaagggttttcattatttttt

SEQ ID NO: 100336 - DNA, 349 bp, Zea mays
  Clone ID: MRT4577_2301C.1
gaggatgtttcttcaatcaccggtcggggtttattttccattggccgattcaagcgtggaaccgcgaaaattgttgccacagtggttatctttggaatccgggacacccggaactgaaccgtgactggcgttgagatgttccaaaaaaccatggacaatgccttggttggggacaatgtcggactgttgttcctgggtttgcaaaaggatgccatttgaaagaggcttggtgctggtaaagcccggtttttataaaccgaacaccaagtttggggctgttgggtttgtcctaaaaaaggaaaagggtggccgggactaacctttttttcctggttaccgcccgcagttt

SEQ ID NO: 100337 - DNA, 465 bp, Zea mays
  unsure (1)..(465): unsure at all n locations
  Clone ID: MRT4577_23020C.1
gnnggacgatgggggggtggcgtgggaggtcgngggcacaagggcaagggtggcgaatagtggcagtgtcagtgtgagcaatgacctgaatgaacaattgaaatgaaaagaaaaaagtattgttccaaattaaacgttttaacccttttaattaggtttataccnncnnnnnnnnnnnnnnnnnnnnnnnnnnnnaannaaaaaaaaaaaaaaaaaaaaaaaaaaaaaaaaaaaaaaaaaaaaaaaaaaaaaaaaaaaaaaaaaaaaaaaaggggggggcctttttaaaggatccaagtttacttccccgggcttgcaacgtaatagtttttttttagggccccctaaattaaattcatgggccggggtttaacaacgtgggaattggaaaaaccttgggtttaccaaattaaatcgctttgaaaaaaatccccttttccccagttgggttaaaagcaaaaaggc

SEQ ID NO: 100338 - DNA, 225 bp, Zea mays
  Clone ID: MRT4577_23021C.1
aaccggagggcggataatgcatcggctaaggaccctacatttacacacttgtcctttgatcgacactcagttttcaagcattttccctgactcacacagaatgaacccaacaccttcactccacctgtagctcatttcaaaatattttcatagacgcgttacaatagaattgggctccggggccttattacaaaattccaacattttacatggtgtattttgggc

SEQ ID NO: 100339 - DNA, 846 bp, Zea mays
  unsure (1)..(846): unsure at all n locations
  Clone ID: MRT4577_23022C.1
gaactgccgccccaagccaagggaagggaaaaggctattgttctcgtcagtcgtcacgagagccgcgacggcgcgcatggcggcgacggcggcggcgctccggtgctgcttccccggatcctccggtgtcggtagtggcttcgtcaagcccaactcctccaggcgaggctggtgcgcagcggccgtggcggcgccgtcgcgggaggcggagccggtttcgtcgctggggcaccgcacccgcgtcgacttccccatccttcaccaggaatttgatgatgccaaattagtttacttcgacaatggtgcaacatcgcagaaaccatgtagtgtgatgaaaacattagatgagtactaccgatcgtacaattcgaatgttcatcgtggtatccatgcactcaggtagtatattcaattttatgttaatgctaacttggaatgcacatttactgagcagggcatgctctgttttttcacttcattttgtcaaggctttgttgttgttaattttgataagctgttccatgtgcatttctaaatgtttattctatataagtaaaattatatagtgtttatgattttgatccttgactcttcagtaatatctgcagaataaccaactcatgcactatccacagaaacatagatctgttgatggtgttctttggctaatgtgcatgaattccttcatttgtttgagtttttgggtgtttatgcagccaccaatatatgtgtcggtacacatgttataacttaactgacatgcctatttctttggcacaagtgcgaaggctactcatgcatatgaggatgcaagaagaanaagtgcaaattttatcaacgcagctg

SEQ ID NO: 100340 - DNA, 670 bp, Zea mays
  Clone ID: MRT4577_23023C.1
ggccgcttttttttttttttttttttttttttttttttagcgaaccatcttttaaccacaagtttgtttaaaaagaaaagcgcccttgaggcgccggtgagcacaggtgttcacaagaagctggatgaggcgctagcagaaaggaatgacatctccttctctcgtagtcatcatgaaggggtgggtccaccttgactccccctaggtgggatgttaccgagaagagaggttcctagcttttaggtgaagtgctccacggccttcaccatgccggcaaagtctaaaatgctccaagcgtcagtagcctttgcttaggtcttccagcttgatcccccttcatagtgagagaacacggcggcaaaggcctcatagatcccttgctgaaaggattccttctcaagctctcagaaccgttcagcgaggccttgaaggcaggagacgagcgactcagacccgagtgaaggaggtgctccgaagggcccatgaatggcgctcatcaccttcgacagaagatgcttctccttctccaactcctctaggtggctttgcacctcgacgaagttcccctcgacaacatcgaatctcccctgaatggctggtcgaatgaaacataggccatgagagggggtagcgggaaagtggacgcctagctctattgaaaattattgaa

SEQ ID NO: 100341 - DNA, 390 bp, Zea mays
  Clone ID: MRT4577_23024C.1
gccagcgtttttttacagatggggtttcacaggcctacgggtgcggctccatgaagacactgacggcggcagcaccctccgtggagctccaaccttgcaacgactgtagagagaccctgcggggactaacgaattgggaagactgccgctgaggagattcaggagccggagcctgtgccggaaccgagtagaggggcagggggcaagggcccctgatgtacggatactcggcgcgtggcagcttggtgctatccaagaacaccgtgttgaccggtcccgtcacaagcatcgccacccagtgcctgcagaagctagccgtggcagcaacatggtcagcctcagttgacgcgggcacacgttgaactacctggccggggacagactcacgta

SEQ ID NO: 100342 - DNA, 231 bp, Zea mays
  unsure (1)..(231): unsure at all n locations
  Clone ID: MRT4577_23025C.1
gacagtacgaaaacgaccataccatcatcgctccaacgccgccgctatggctaagtacacgcaggaancgggcaacacaaccnnntcaggcangaccatgggaanganccagaggatccacatcaagaacacaaggaagacagcttttacgcatcgcaagcagcctttgaccaaagctaagcgatacaatgaggatgttataactcacaagcaggcaatacccaaccggag

SEQ ID NO: 100343 - DNA, 473 bp, Zea mays
  Clone ID: MRT4577_23026C.1
aaaccggcccacattagccgaaaatatttattagcccaaaacacccggaggaccaagggttaaaaagcgacaaaatcggggggggggggaaaaaatttagggggtctaaaacctttcaaaccccccaaaaatatatgggaacccgccaaggccctctaaacccagggggaattaaacccgggcatccccaaccggggacatttgggggacccgcccccctctaggaagggcaacgccctttgggaaccccaaagcatttgccaaacaaacgggggaggcaacccccttgttgctggaaaggaaaacgggggccccttaacgaccagccacaaaatgggccccccccttggccgggctggtcacaagggcgggcccgcaaagcccaagcccaggcccaaaaaagacaaggatgttgaaggggccggggcgggcagtatgccccccgaagctgcatgtatttgccccggggggct

SEQ ID NO: 100344 - DNA, 1765 bp, Zea mays
  Clone ID: MRT4577_23027C.1
ccggccgggctgatttatagttaatgagagtaaaaaaaaaaaaaaaaaaaactctccccaacccgtcgagagtcgagaccatccttcccttcttccctcctcgccagaggagagtctcgctagctagggtttccaccaatggcggcgcccaccacctcccgccgcggccccggcggcgcgcgcaacatggacgacgagaacctaaccttcgagacctccccgggggtcgaggtcgtcagcagcttcgaccagatgggcatcaaggacgacctcctccgcggcatctacggctacggtttcgagaagccctccgccatccagcagcgcgccgtgctccccatcatcaacggccgcgacgtcatcgcgcaggcccagtccggtaccggcaagacgtccatgatctccctcaccgtctgccagatcgtcgacaccgccgtgcgcgaggtgcaggctttgattctctcgcctactagggagcttgcttcccaaacagagagagttatgctggctattggggaccacctcaacgtccaagtgcacgcttgcattggtggaaagagtattggtgaggacatcaggaggctcgagaatggggtgcatgtcgtctctggaactccaggcagagtctgtgatatgatcaagaggaggacactgcggaccagagccatcaagcttctagttctggatgaagctgatgagatgttgagtagaggctttaaggatcagatttacgatgtctacagatatctccctccagaacttcaggtggttttgatctctgcaactcttcctcatgagatcttggagatgactagtaagttcatgaccgaaccggttaggatccttgtgaagcgtgatgagctgaccctggagggcatcaaacaattctttgttgctgttgagaaagaggagtggaagtttgatacactttgtgatctttatgatacactcaccatcacccaagctgttattttctgcaatactaagagaaaggtggattggctcactgaaaaaatgcgtacaaataacttcaccgtatcagctatgcacggtgacatgccccaacaagaaagggatgccattatgggtgagttcaggtctggcgcaactcgtgtgctaataactacagatgtttgggctcgaggactggacgttcagcaggtttcacttgtcataaattatgatctcccaaataatcgtgagctttacatccatcgcattggtcgttctggtcgttttgggcgcaagggtgtggcgatcaatttcgtgcgcaaggatgacatccgtatactgagagatatagagcagtactacagcacacaaattgacgagatgccaatgaatgttgctgatcttatttgagcagcaagaggatcgggaggggagcttcttgtgttggcttgaggcccttggcgctagtgtggctgtggactggagcagatgggctttgtagttgggggtggagcagagattatttccgtttttgccatggcatgaactgtatatattttagctcgctccagctcatgtaacactttgttgctgcgtttgtgcttgggacacgaagacctgtgttgatggcttcgttagtgtgacactgatttggcgtcggatttttgtttgtcatctgtcattcctgtgctgatctgaattgctgtttgtttattattattattattacaattactatcaattattatggttgactggtattacaattactatcaaaaaaaaaaaaaaagaaaaaaaaaaaaaaagtgagctc

SEQ ID NO: 100345 - DNA, 262 bp, Zea mays
  Clone ID: MRT4577_23028C.1
cttctctcgctctccaaattgaaaagggccaagacgggcatatcttattaccccattcagggttttggggcctagccccgtaaccgaataacactttttttcttttgggttccaggcgggaaaaacccactggaattgctgacagggccccctggttgaggctttaaaaatgggggcacccgaaagaaggggacccaagccctttttttcagagactttttgggggggtttttttgggggtttaacttttcagatttcgagg

SEQ ID NO: 100346 - DNA, 200 bp, Zea mays
  Clone ID: MRT4577_23029C.1
gtgggggtaaaaaaatgaactgtttggaaaaaaagatttacggtggctcgtcaaactgccaaaggtttagccttttacggttaacgaaactactggattcacccaacaaagctttagaaaaattccagtgaaaaaataccattctaaggaagccaatttatgtcccgggggggtaataaaacaactggctggtatcacca

SEQ ID NO: 100347 - DNA, 1707 bp, Zea mays
  Clone ID: MRT4577_2302C.1
caattcctgacctcagtggctcctccaacctatccatcattcatcttgagaacaaccaactgaccggaaatgttccttcctactttggcagcttgccaaaactgagcgagctgtaccttgagaacaaccggttgtctggacccattcccaaggctctgctaagtcgaagcattattttcaactactctgggaacgtgtaccttggaacagcagggaagcaaaagaagaagcatgtcatcatcattatatctgctctgcttggagcatccttgctacttgcagccgccctctgttgctatatgctgacacgcaaggccatgaattcatcatcctcaccacaagcacaagagaaggcgcttcctgcagagcagaacaagttgcagaaatacccaagcacgcagcagctgcagtcgatcgccaccgagacggctcatccatacagcctgtgtgagctggaagaggcgaccaacaagttcgcgagcaggatcggctcagggggtttcgggatagtgtactacgggaagctgagcgatggaaaggagatcgctgtgaaggtgcctagcaacgattcgtaccaggggaagaagcagttctcgaacgaggtggtcttgctctcgaggatacaccataggaacctagtggcgtttctaggctactgccatgaggatgggagaaacattctggtctacgagttcatgcacaatggaacgctcaaagagcagctgcataggcgcgacaagcacatcagttggatcaagcggcttgagattgccgaggatgctgcgaaaggcattgagtatctccacactggatgcacgccatcgatcatccacagagacatcaagacgagcaacatccttctggacaagcatatgagagccaaggtgtccgactttgggctctccaagttgctggcagcggagggcaaggactcgcacgcgtcaaccaacgtgagagggacaatgggctacctggacccgcagtactacgtctctcagcagctgaccgagaagagcgacatgtacagcttcggcatcatcctgctggagctcatatccggttgccctcccatctccaccatcgccttcggggacaacttccgcaacatcgggccgtgggccaagttctactacgagagcggcgacatcgaggccataatcgacccctccatctccacggcggccgagtaccaggacgtgcagtccgtctggaagatcgccgaggcggcggtccggtgcatcgacgcagagcctcggaagcggccctgcatgcctgaggtggttaaggagatccaggatgcattggcgctggagcgggcggcggcggagacgaccaccagcgacagggcgctcgcctgccctttctcccccgcggctgcgagcgtcaggtccggcgggacaatgaggtcgcacgacatggtcatggacaacctgctgctcttggacgatgacgacgactccaccttctccggttcgaccgtcaccaagctcaagtacccggagctacgatagctgtgatggaaccaagctcaagcaggattgcaattaattagtatagtagtagtcagcaattcatttgagttagactgttagagcagtggtgagatagcagattttaatttgcagttgttgttacgttacattacattacgaatgtgtttggttggctggcctaactcaggaccaggcccatttgatacatgcacat

SEQ ID NO: 100348 - DNA, 685 bp, Zea mays
  Clone ID: MRT4577_23030C.1
ttccctcctcctgcttcgcatcgtatcccaaagaaccaagaaacagagcaagagatatcttaggacggagcagagtacagagagagaaagagggattagcgcttgcttgctgggagggagagacatggaccagatcatgaacaagatgggctcctactggctggggcagagggccaacaaagagatgtcgtcggccggtgacgatatcgagtcgctctcgaccagcgtcggggacggagcaaaatggctggtgaacaagctcaagggtaagatgcagaagccgctggcggagctgctccaggagcacgacctgccggtggggctgttcccgcgggaggccaccaactacgagttcgagccggagacgcggcggctgacggtgcacatcccggcagtctgcgaggtcggctacagggacggctccgagctgcgcttcgacaccacggtggccggcacgctggacaagggcagcctgacgggggtggagggcctcaaagccaaggtgctcgtctgggccagggtcaccgccgtcaaggccgacgccgcaaaggtctacttcgccgtaggcatcaagaagtcgcgcagccgcgaggcatacgagatcatcagaggcgccatcaccgtcgacgagttctagattctagtcgcgcgctcgtcgagatgattgttctaccgaaataattga

SEQ ID NO: 100349 - DNA, 323 bp, Zea mays
  Clone ID: MRT4577_23031C.1
aattaccgactcgacccacgcatcctagcgcgattgcggaactgcttaaacttcatttgtgaagaggcatctcactgcagagggtgagatgaaatatgaaccaaccattggtgttgaagttcatccgttggatttcaccactaactgttgtaagatcacgttctactgctgggataccgcatggcaagagaagtttggtggcctcatggatggatactatatccatggccagtgtgcgatcatcatgtttgatgtaacctcaaggcttacttacaagaatgttcctacgtggcataaggacctgtgcaatgtctgtgaaaaca

SEQ ID NO: 100350 - DNA, 278 bp, Zea mays
  Clone ID: MRT4577_23032C.1
cccactcgttcgaatacgcgtcagtctgcatgccgggggcaacaatacctgagcagggggccagaacgacccaatcaccttcacacgttaacccctacgtactacaggctccacaccactgcttccagctgacatagtgcagatattttgacgcaagagctatcaccatttgacaaactgcctagagactaaccgagactgtgggcctcaagccagagtacgaagcacagattgggacgacctcttcccgagctgtaacaggaaggccaacacaggaa

SEQ ID NO: 100351 - DNA, 966 bp, Zea mays
  Clone ID: MRT4577_23033C.1
cctcgaggcgccggccgggcgtctcaactcacaagcgccttcaaactttcagaacacgcacttctgctagctagtagccatggcttccgcagtctcgtctctcttcttcgccacggcgctcgtgatgatgacgctcatgatcatgctcgagggcagcaccacatgccacgccgcgcggcatcttgccgacacgacgaccgccccgaccgctgctcctaccgccatcccggccattcctgccatgccgaagccgccggtcgtgcccaccgtgcccgcggccacccttccaccgatacccgccgtgccgacgtcgacggtgcctgcgctgggcgtgccaccgatccccgcgttgcccaagatccccgcggtgccccctatgccggctgtacccgcattgccaaaggtgacggtgacgctgccgccgccgatgcccgccgtcgtcgtccctaaggttggcgccttgccgccgatgcccgccgtgcctaagttgacactgccgccgatgccctcgatcccgggcgtgcccatgccgtttgtggcgccgcctccttcggcataattcaattcaccaatgtctgatagattgtccatatatctgagtattcgagttgatctcactctcgatcaatccatgtgtacgatcttcgctgggcacgcatgctgcagatttacttaattggtgtatgtatgtgattctatatacttctatatattgttgtattcagtctttttcaaagttataatgttgtgtcaagctttgtcagttcattttctttcatttttttggttggaggtcgtcatttgttgtaatctgtaagtggatacgtatgtacagagtgctcgactaaaaaaaaaaagcaggccccttcccccccccccccccccttggacaaatttgttagctgcaaaatggcagtgtttacgtcttactggcagttttttgaagtgaactttggcacgcgcctg

SEQ ID NO: 100352 - DNA, 493 bp, Zea mays
  Clone ID: MRT4577_23034C.1
tcactggggtaaacacatcgattggtcgatccgaattggacgcacaaaagaagactagagcacgcaaaatttgacagctactaccccatgttgcatgaagactgctttgagtacagcattgaggacctcttatctgccaccaagcggaacaattgcaggaccatgcttacttcaactaccccaacaacccacactacactcccttgtgcgtcgctaagtctagttacacaatatacaactactgaccctatcgttatcactaatgtgtctgcgctgctgcttactgatcacgcaacagctacccatgattattatttgtactgctggctagtacattttcatgaatgtatggtaaggcaccggctccaatgactgttctttctgctggtgatgctagacacagtataaactatcatcctttgagggctatgtacaagcgccttgcacatcacatacctacaaggcacctgtgtacggggaccttgattgtcct

SEQ ID NO: 100353 - DNA, 826 bp, Zea mays
  Clone ID: MRT4577_23035C.1
cggctcgagttcacaagcgccttcaaactttcagaacacgcacttctgctagctagctagtagtagccatggcttccgcagtctcgtctctcttcctcgccacggcgctcgtgatgatggctctcatgatcatgctcgagggcagcaccacatgccacgccgcgcggcatcttgccgacacgacgaccgccccgaccgctgctcctaccgccatcccggccattcctgccatgccgaagccgccggtcgtgcctaccaggcccgcggccacccttccaccgatacccgccgtgccgacgtcgacggtgcctgcgctgggcgtgccaccgatccccgcggtgccccctatgccggctgtacccgcagttccaaaggtgacggtaacgctgccgccgccgatgcccgccgtcgtcgtccccaaggttggcgccttgccgccgatacccgccgtgcctaagctgacactgccgccgatgccctcgatcccgggcgtgcccatgccgtttctggcgccgcctccttcggcataattcaattcaccaatgtctgatgatagattgtccatatatctgagtattcgagttgatctcactctcgatcaataatccatgtgtacgatcgtcgctgggcacgcatgctgcagatttacttaattggtgtatgtatctgattctatatacttctatatattgttgtatccagtctttttcaaagttataatgttgtgtcaagctttgtcagttcattttctttcattttttttttggttggaggtcgtcatttgttgtaatctgtaagtggatacgtatgtacagagtgctcgact

SEQ ID NO: 100354 - DNA, 450 bp, Zea mays
  unsure (1)..(450): unsure at all n locations
  Clone ID: MRT4577_23036C.1
gtacccttgctgganccggccgggnaacgcacatctctcaccgtcgttcgtcgccgtcgaaggacggataggagaagcaggtacggccgtctccttgcccccatggcccacgagaagaagctgaccaacccgatgcgggagatcaaggtgcagaagctcgtcctcatatctgcgcccggggagagcggagaccgtgtcacccgcgccgtacaggtgctcgagcaccttagcggggaggccggcgtgttctccaaggcgaggtacacggggcggacgatcggcatacctactaacgagacgatcgcctgctgcttcacggtgaggggcgagaatgccatgcatcctgcttgggagcggccttaatgtcactgagtacttagactgtttatgaggaactttagcgacaccgggcgctctggctctcggcgctctggcagcacatcctacctt

SEQ ID NO: 100355 - DNA, 264 bp, Zea mays
  unsure (1)..(264): unsure at all n locations
  Clone ID: MRT4577_23037C.1
nnnnnnnnnnnnnnnngaacaagaaaaaggcgagcnnnagaggaacaaagggaacgaanccccgacncanaccaaaaacaagaacccggggcccggcnacaaaaacaccaggcnanacagnggcggagccggccngaaaacgacaccgcagccngacccagccaaacgaccgngngcnaggccgaacgagagcccacccaagnnggccacggccgaagcccggacacgngccggancaggccgggccaaggcgcccggcggagg

SEQ ID NO: 100356 - DNA, 297 bp, Zea mays
  Clone ID: MRT4577_23038C.1
ggggggtggaaccaaaaactttactatccgaccgggttttccttgtccgttttttaacagcccggaaaattttcccaaaccctttttccaatttttgccattgttcccacagttccaagaggggcaaattcagcaatcagtttgggctacaatcctgtttacatgccccccacccctaccaaaatatttttttttatgggctagctttgctttccaaactaagcaaacccctcccctgttaggggccgtttttctcgacccggcgaaaaaaaacccaacccatgctttgttgcttgg

SEQ ID NO: 100357 - DNA, 382 bp, Zea mays
  Clone ID: MRT4577_23039C.1
attcggctcgagcgaaatcccgatctttattttaggacaagcgcatccggggtctttgccgtggcgactatgggtactctggaaggggcaggacgctccatcaagtatctggagcgcactgtacttggaggtcgactggtcactgtcgaaacggctaaatgaactccggaaaggacatttactattggaaaactctgtggtggctgaggaggatctcaagggagcccttcactttacgcccctcgcacaagggagcgttcggactcaaaggaacggagcacggacctcttgcgttgaagggaacctcgggcgcggcctacctcagggagtcactagccgcagttctgctcatgggaactctcggagcagcggtctatttcaa

SEQ ID NO: 100358 - DNA, 507 bp, Zea mays
  Clone ID: MRT4577_2303C.1
ccgccgctgcggccactgggagcgcggctgcgtcgagcgtcagcggccatgttagcggggacgatttggacgaggacgacgaaggcttcggctgcgggtactgtaaatatgtcggcaacatacaattccaggagtcaagacatcgagagttctgttgttgcacatggagacctctggaggctagaggcatcgcgtggtggatcaacttctggaaatggcacttcgcctctgtaccttgttcagttggggcctctactttttgttcgagactctacacttctgttgcctgttcatctatcaaagcaacacctgctttggtacggttatgatcgcaagaatggtgtccattcactctgtccagctatatggtcaaaacataggagatggttgatgatgtcaatgatgtgtctcaatccaatagcttgttcgtttatggatttgcaattccctaatgggcaactaacatatgttgctggtgaggggatatcagccagtggttttcttccg

SEQ ID NO: 100359 - DNA, 1148 bp, Zea mays
  Clone ID: MRT4577_23040C.1
attgggaccctcgaggccggccggaaagcgtttcgcggtcgcagttttgcacaaagatcctctgtcttttcgcgatttagctcgtgctcctccctcgacgtggtctccggaatccagatctgtatcacgggaagcacatctgctggcctacaccagattcttccatggttgtattatcacaatgtcattggtgtttcacatttctttctattagttgaaggagaggctgcaaagccagctgtcacctctgttcttgaatctattcaggatgctagaatggattggatcattcacctcgatactgatgagttgattcatccagctggtgcccgagagtactccctgaggcgattgcttttagatgttcctgacaacgttgacatggttatcttccccaattatgaaagcagcattgactgtatgacattaaggatccttttactgaggcctttataattgcatcgacagcaactgaggaggagatggggaactggtaacacccttagccctccgtgtaccaagcatcgagacacccattcctccctatcctacctgaattttaagggaggatgtattaacacatatatatgtgcccatggcattcatcggtggcctcaaggaatccgacgtctatcaatgcaataacatcagcgaaagcacaataaaaaacaaagtcatcaaacatgggtctcggaaacaaggaccacatccggctaaactgaactgctggtcagtccaaattggaaggcggtcacgggaaggtgcaggtaagcgtcagaaagatcctagaaatggttgatgcctaggaaggagcagcgatgccgccaatgtcgcccccaggttttcttgagctggctgaaagcaccactgccttttcatgacattatgtgaggcattgtttgagtattgactgaggttggtttaaccatgcgtgatacatgcagccttgagcatacagataatataggcttgtttgttcttcctgtggttgtttatgatgtatccagtgagtcactcaacaactttggcgaaagcccagatgttttcttgcaatttttgaaaaatattccgcgccctgatttccatgattgtgtgccatcgcaacacacgggcaactggctattatatatataagctatcatggcatt

SEQ ID NO: 100360 - DNA, 511 bp, Zea mays
  Clone ID: MRT4577_23041C.1
ttttttttttttttttttttttttttttttttttgcaaaaggtttgttccaaaataaataatataggggttctttagtgaatacaacatggagacaacttcaacaatgagaaaggcaaagcaaaacacctaccaccatcagcttgaagaacttggacatgatatcaatcgaggcattcccactccgttttatatctgtctgtcgaaaatacgacctagatttgtgatgatgccccatttgcctttgcaccgttaccagacatggtatgagcagttgcagtacccgccgaagaacttgcgatatacctgggttgtagcgactcgctgacgctccgacgaactcacgtcccggcggtggcgcgccggcggccacgggttgtctcagaaccatgacatgagctgtgatgtaaaaaattttgtttacttcagatgagaaaaagacccccaagggaggcctttgccaaaagcccacaaaaaccccagttttccaattttaaagaggccagccaagc

SEQ ID NO: 100361 - DNA, 2400 bp, Zea mays
  Clone ID: MRT4577_23042C.1
atacttacctggacggggtcgaccggggataagaagcctcgtggccaggccgtggcccgcattgcacatggtgggtgcgctggcttaccatctccccaagtgggagagtggacgtcataatttgtggtagagggggtacgcgttcgcgcggcccctgctttaaaaagaaaaaaaaaaaaaaaaaacacaagtgcacacatcaagccgtgcagggacgccaacgactccgagctctcctccatccaactcccatggcgggctaccgcgggagctcctccgtctccgcctccaccggcggcgggggcagcgcggtggccgcagccttctccacccggctgctgctactcctcacgctgctgccgctcgcgctcgccgccttcgccttcgcgctccagtggcgcggcggtatgcgggacccggcaggtgcagcctggcccgccgacgcgcagcgcttcccgggcatggagaacagccccctctcctcctcccacggaggcgcaggctcctacttcgccgtctcctcctcctcctcctccccgggagccgactgcgccgagatccttggccggagcgccgcgtcctccaatggaatctcgctctaccgcgggtggagcttcgactccgaatctgctataacccccaagatctgtatcacgggaagcacatctgctagcctacaccagattcttccatggttgtattatcacaaggtcattggcgtttcccatttctttctttttgttgaaggagaggctgcaaagccagctgtcacctctgttcttgaatctattcggggtgtaaaaattatttacagaactaaagaactgaaagagaaacaggagaaaagccgcatttggaatgagacgtggctagcaggtttcttttacaagccgtgtaattacgaactatttgtcaagcaatcactaaacatggaaatggctattattatggcaagggatgctggaatggattggatcattcacctcgatactgatgagttgattcatccagctggtgcccgagagtactccctgaggcgattgcttttagatgttcctgacaatgttgacatggttatcttccccaattatgagagcagcattgaacgtgatgacattaaggatccttttactgaggtttccatgtttaagaaaaattatgaccatcttccaaaggatacatactttggcctgtacaaagaagcaacacgtggtaatccaaactacttccttacttatggtaatgggaaatcagctgcaagggttcaggagcatttgcgaccgaacggtgctcatagatggcataattacatgaaatccccaaatgaaatcaaattggaggaggctgctattctgcattacacctacacaaagttctcagacctaacctcaaggagggatagatgcggctgcaaaccaactaaagaagatgtgaagcgatgttttatcttggaatttgaccgtttggcctttataattgcatcaacagctactgaggaggagatgaggaactggtacaaggaacatgttgtatggaccgatagagacaccaatttgaaacttttaaggaagagtgtcttgacacgcatatatgcgcccatggctattatccgtggcctcaaggaatctggcgtctttaccaatgcagtaacatcagcgaaagcacagtcaaaaacgaagtcatcaaacatgggtctcggaaacaaggatcctatccagccaaacggaactgctggtcagtccacactggaaggcagtcatggaaagttgcaggcaaccgtgagaaagatcctggaaatggttgacacacaggaagaagcagcgatgccaccaatgtcgcccccgggttttcttgagctgactgaaagtgtcactgccttttcatgacgctttggtttaaccatgcgtgatgcatgcagccttgagcatacgaatagcattggcttgtttggtcgtcgtcgtatcttgcaaccccagaatgaccagatgtatcgtgctgatgtaaaattgctagttatcaccatgcaaagagctttaaatcaacttcagaaggtattataaagttggtgcaaattataacaaatccaccacagtagagctcctagaattaggccaggggcatgttaacttgttgggggtgattagttgttttttcgttggtcttcgtagggtggccaaccattccctctaaaaaaaaaaaaaaaaaaaaaaaaaaaaaggaaaaaaaaaaaaaaaaaagcggcctgcagccttgagcatacagataatataggcttgtttgttcttcctgtggttgtttatgatgtatccagtgagtccctcaacaactttggcgaaagcccagaggttttcttgcaatttttgaaaaaaattccgcgccctgctccccccccaaaccccc

SEQ ID NO: 100362 - DNA, 1160 bp, Zea mays
  Clone ID: MRT4577_23043C.1
caatagtccaagagcagagatctttggatagctccaaaaccgagagctatgtaaagagcatgcagatggaaggcaggtacctccgtgatgtatggtgacacatcacctcaaataagccatagctctagcgtgtggaagtaaagctggctttgcgtgtatgacatgtctaatgccaacctaatcgtcagctttggaatgaagcatgccattgataatatactaaaatgagttgatcagtgaaattctttgacatctagccgagaatttttgtttggttatcgataattcactctcattcatgtgagatattgtgctctgcttatttattgatagctgacactggtcacccaggagcacgagattagcgcgttgatgtacttagtactgcgaaatcaaactggaggaggctgcaattctgcattacacctacaaaaaattctcaaacctaacctcaagaagggatagatgtggctgcaaaccaactaaagaagatgtgaagcaatgttttatcttggaatttgaccgtttggtaccgggaacatgttgcatggaccgatagagacaccaacttgaaacttttaaggaaggatgtattaacacatatatatgtgcccatggcattcatcggtggcctcaaggaatccgacgtctatcaatgcaataacatcagcgaaagcacaataaaaaacaaagtcatcaaacatgggtctcggaaacaaggaccacatccggctaaactgaactgctggtcagtccaaattggaaggcggtcacgggaaggtgcaggtaagcgtcagaaagatcctagaaatggttgatgcctaggaaggagcagcgatgccgccaatgtcgcccccaggttttcttgagctggctgaaagcaccactgccttttcatgacattatgtgaggcattgtttgagtattgactgaggttggtttaaccatgcgtgatacatgcagccttgagcatacagataatataggcttgtttgttcttcctgtggttgtttatgatgtatccagtgagtcactcaacaactttggcgaaagcccagatgttttcttgcaattttggaaaaatattccgcgccctgaaaaaaaaaaaaaaaaaaaaaaaaaaaaaaaaaaaaagggcagacgatctaaaagatccaaac

SEQ ID NO: 100363 - DNA, 402 bp, Zea mays
  Clone ID: MRT4577_23044C.1
gaccctcgggctcgccgggatcagagcccaggctccaggcacgacaggcaggaggatcggacgagtcggcgagggagatgcatgctttcacacggaggattaagagggcggagattcacctggtggacctgatctccatggtctttgtagtggacactaatgccatgcacatcgcccacgatgcctgctcgcaagaagtgaaggatgtccagcaccctgaacatcactctaggggctcgacctagctctgcaccacccaccctgcccctgctccccggcgcctctgcccgccgacctgcacttctgctggtgcatcgctaacgacggcacgcgcatagcgtcgctggccgagcgcctggccaagacgccgtactctagctctaccttgcttgacgagagccg

SEQ ID NO: 100364 - DNA, 658 bp, Zea mays
  Clone ID: MRT4577_23045C.1
cccacgcgtccgtaagagaccattggaatatgtttcactgaccaatctgaataagccttagtgtttaatatttctgtattgagcatgcatgttttgcttcaaggtattatttatcagggaatcaaattaaatgttattaccaaaaatatgtaattgcatactgtttgttttcccaactattttggtactaatctgagaagatattgcagagattagctcttgaatttactataattttgtctaggtgactcaatcccctatgcaataaatcaatattttgttctgtttgtaacatatgcatactgatatagtaatgttttcaggaaccaaagacattgtttacagttttgattgagagaagtctattataagacaatctgctgctcgttttgatcttttgctacagcagatagttcgtttgttggtcggctcttgctgcccatctagagtactgtaggagtatgccaattgaccaactatgtagtggcatacatcagccatgtattagtagttgggggctgagccaagccatgtactagcgaactatatagtcggtactagacttgaatatatactagacaatgcaatagaggaagtagttcagtttgctatacacattcagtgcctacatgtgtgctgagtgtatgccctgttctcg

SEQ ID NO: 100365 - DNA, 277 bp, Zea mays
  unsure (1)..(277): unsure at all n locations
  Clone ID: MRT4577_23046C.1
cgcgtagaggccgccgccaccgccgggctgccacgacgtcggcgacgagagcggcgtgtccgcggcgccggtcttgtgctggtgcggagtccccgcggcggcggcgttctggatgcgctcgacaggcggggcatccagaggtngcgcntgncgttcttgnactgttggctggtgtctctcctcttgcgctgtttggcgtgcttctgctcgcgcgtgcgcccggttttcttgatcttgttgtctgtgctgccggggcggtgctgctctatcttgggcc

SEQ ID NO: 100366 - DNA, 374 bp, Zea mays
  Clone ID: MRT4577_23047C.1
atcagtagacagcttgctgttcggattcttaacagaactttgtatgcaggcatacgaagttttgttaagaaactaaatagcaggaagcacacacctatgccagacactcctcgttccacaagacagcatttgcatcatgcagtgcttaacatagccatatctcattcgcagtgtttgtttatcttgtaatactatgtggaaaaacagtggcatagctcaggaatctaggccacaatcaaatccttttcaggaaccaggtgatatccaatgctttgatgaacaatagatgtttatgtgtggtgtgctgcggttgtatcagtcctcagaaaagaacttcccttttttaggaccaactggactcttatctctgtctg

SEQ ID NO: 100367 - DNA, 270 bp, Zea mays
  Clone ID: MRT4577_23048C.1
cccactcgttcggacacacgcgtgctatcgctcggttactcaaggccgccaagtactccgagctgatgatctcctgcgtccctggctacatcgccgctttcctcgagtacctcatcgctgaggtcctggagcttgctggaaactcaactagggataacaacaatacccgcatcgtgccgcgtcacatacagctctccgtgcgcaacgactacgagctgaccaagctgctttgaggtgccaccatcactagacgctgcattatgcccaaca

SEQ ID NO: 100368 - DNA, 225 bp, Zea mays
  Clone ID: MRT4577_23049C.1
tccacggtggtgaggacgtcatggcaagaataagctggcgatatgcctgcattgtggggagccttctgcatagggagacagtcaaaccaagccgtaggtccgctacaagataaaaaaataagggaccggttgtgaaaggaggaacaactaccgatacaagggacaaaacaaagtgtggccctgcgggttgacattaaaatagtgcaaaccgatgtgggtgatcag

SEQ ID NO: 100369 - DNA, 1549 bp, Zea mays
  Clone ID: MRT4577_2304C.1
ccgccgccgccgctgcagccactgggagcgcggctgcgtcgagcgtcagcggccatgttagcggggacgatttggacgaggaggacgaaggcttcggctgcggtattgggactcttggaaactttaagaaggccaacggtactgtaaatatgtcggcaacatacaattccaggagtcaagacatcgagagttctgttgttgcacatggagacctctggaggctagaggcatcgcgtggtggatcaacttctggaaatggcacttcgcctctgtaccttgttcagttggggcctctactatttgttcgagactctacacttctcttgcctgttcatctatcaaagcaacacctgctttggtacggttatgatcgcaagaatggtgtccattcactctgtccagctatatggtcaaaacataggagatggttgatgatgtcaatgatgtgtctcaatccaatagcttgttcgtttatggatttgcaattccctaatgggcaactaacatatgttgctggtgaggggatatcagccagtggttttcttccgttatttggtgggttgcttcaagctcaaggaaaatatcctggagaaacaagagtgagcttttcttgcaagaataagcgtggcacaaggtttactcctatgtttcaatggcctgacaagtctgtttcgttaggagttactcaagccttggcatggaaaagatctggtcttatggtgagacccagtatacaagtcagtgtgtgccctacgtttggaggaagtgatcctggggtacgggcagaagttgtccattcattgaaagaggaattgaatctgatgtgtggcctctcttgctcgcggcatccatcagcttatactgctctatctattggacgatcaaagtggaatggtcaagtgggcagttctggagtggtaatcaccttggaaacacctcttaataacattggaaggccgtcgttatctgttcaactgaatggtggttttgagttgtgattcttcagactccagcgctgaagctgtacataccagtgtgtatatattgccatcaccaatgttcgtgctccatagtttgtggaagtgggctgcagcctgccggcttgcaggtcgtttttgttactgtagtctataggtagtctcaactcagcaaatcagctgccatggtacccaacccatgtgggcacagaagtcaactgctttgttgttcaatcattatgataatccttaggtcttatttggatactctcttattcacattaatctcacgtttattgaagtggaatttacagaagttcatgaaagcggagggctcgctgccatggaatatgttcgtccagaatcacattttcttggagagacaacctgtcgcaaactcgcagttggacattgttaacaattgtctgtttagtttgctttgttggatgttgagacaaacaagctaaaaaaaaaaaaaacggacgcgtgggggatttttgtatttctccacatgcattgatcaatgaaccaaagactagcgatccctgttttactgttcccctgacatgccc

SEQ ID NO: 100370 - DNA, 475 bp, Zea mays
  unsure (1)..(475): unsure at all n locations
  Clone ID: MRT4577_23050C.1
ggtttagacgcggggaatgtactcattggcgacttgggagaganaattccctggcggagggtacaagaaaacactaggctagccgtagtggcgcccgaacccgagctgcgcgcactgtctcatatgacagtcttaggcattgcgccatcagtccacttaggcatctatctagatgatgagtcctcctacaacggtgtttaccggccctgcacagaaaacaaacactagagcggcggctggatacaggactcaccatacaagctggaaccaacattaataagaactgcacctggtgaagtgattacagaaaaagagcatataagaggcggccatgaccactgcagctattctgtgacctataagacgtgtacactggcgcttgcaactattatgttgataccttgtgccagtgctagatatatagacgttaacaagctcatgaacatacgaacctggactatagtttatagcttat

SEQ ID NO: 100371 - DNA, 884 bp, Zea mays
  Clone ID: MRT4577_23051C.1
cacgggcccatcgccgacgacacggcctcgctcgtcgtcgcgcagctgctcttcctcgagtccgagaacccgctcaagcccgtccacctctacatcaacagccccgggggcgtcgtcaccgcggggctcgccatctacgacaccatgcagtacatccgctgccccgtcaccacgctctgcatcggccaggccgcctccatgggctcgctcctcctcgcggccggggcgcccggtgagaggcgcgcgctgcccaacgccagggtcatgatccaccagccctcgggcggcgcgcagggccaggccaccgacatcgccatccaggccaaggagatcctcaagatgcgcgaccgcctcaacaagatctaccagaagcacacgcgccagcccatcgataagatcgagcagtgcatggagagggacctcttcatggaccccgaggaggcgcgcgactggggcctcatcgacgaggtcatcgagaaccggcctgcctcgctcatgcccgacggaatcggtggaggcctcgatgtgcccagcctcggtgtcggtcccggcggacggggaagggacgccgtggagccctcggcggtgtgaggattggcctcaaaggtgaaatccctttcgcatccggtggctctgttgtttgttgttagatctaaaaaagcttcaattcttactgtacaaggttaaccttgttattatggttatggaggtgtccggctccccattctccttgttgcttaaattgcctgaattgagctattggcgatataattattgcaactccaaggaaattctgttctgttgatactgataaattaacacagtattgtgtatgttgtactatattagtatcaattccatgccaggacattgaaatttctctc

SEQ ID NO: 100372 - DNA, 222 bp, Zea mays
  Clone ID: MRT4577_23052C.1
aaaacaaagccccaacccaggaaagattatgtttgatttctacaatacccaagcaaaacagaccccgttttcctgggatgaaatcaggttatagaaaaaccccggccctttgcgaaaaccggggtaaaacccaaacagggaatttggccctaaaaaaaacccaggccccatccttggggggggattcctccgggccctggtttgtaaaggctcacccccttt

SEQ ID NO: 100373 - DNA, 1353 bp, Zea mays
  Clone ID: MRT4577_23053C.1
accgcagcctcgtcctatccgtttgacgctcatccctggtatcccactcccctccctccccagccaacgacctccgccgccggccaccgcctgcctcagatcccccgccccgcccttccgttactcccagcgcgacgcggctgcgtccatgacgccctcctccgctctagccctcgcgctccaggccgcggcgtccccgctcccggcctccacgccgcggtcctcgcccaggtccagctcgctgagcctgggccgggggaccgccgggaacggcccgcgccgtcttgccgcagcagcgcccccacgggcgttcttctcatcgtccccctaccagccgccccaaccggaggggttctcgccacaccgggagtacggcctggtccccatggtgatcgaaaccacctcccgcggggagcgcgcctacgacatcttctcgcgcctgctgaaggagcgcatcgtctgcatcaacgggcccatcgccgacgacacggcctcgcttgtcgtcgcacagctgctcttcctcgagtccgagaacccactcaagcccgtccacctctatatcaactcccccgggggtgtcgtcaccgcggggctcgccatctacgacaccatgcagtacatccgctgccccgtcaccacgctctgcatcggccaggcggcctccatgggctcgctcctcctcgcggctggggcgccgggtgagaggcgcgcgctgcccaacgccagggtcatgatccaccagccctcgggcggcgcgcaggggcaggccactgacatcgccatccaggccaaggagatcctcaagctgcgcgaccgcctcaacaagatctaccagaagcacacgcgccagcccatcgacaagatcgagcagtgcatggagagggacctcttcatggatcccgacgaggcgcgcgactggggcctcatcgacgaggtcatcgagaaccgacctgcctcgctcatgcccgacggaatcgttggaggcctcgatgtgcccagcctcggtggcggtgggggcgggggcggacggggaagcgacgtcgaggagccttcggcggtgtgagaattggcctcaaaggtgaaatcccgttcgcatccggtggctttgttgtttgttgttagatctgaaggttcgattcttaccgtacaaggttaaccttgttattctggttacggaggcatccggctccccattctccttgttgcttcaattgcctgaattgagctattggtgatataattattacaactccaaggaaattctgttctgctggtactgataaattgacaaagtattgtgtatgttgtactatactactatattagtatcaattccatgccaaaaaaaaaaaa

SEQ ID NO: 100374 - DNA, 2274 bp, Zea mays
  Clone ID: MRT4577_23054C.1
gccggccgggccgggatccccagcccacgaccctccgccaccagccatcgtctgcatcagatctcccgcccgtccgttacatcccagggcgacgcggccgcggccatgacgccatcctcagctctcgccctcgcgcaccacgccgcggtatccccgctcccgtcctccacgccgcggccctcccccaggtccagctctctgagcctgggcccgggctccgccgggctcgggccgcgccggctcgtcgcggcggcgcccccacgggcgttcttctcctcgtccccctaccagccgccccagccggaggggttctcgcagcaccgcgagtacggtctggtccccatggtcatcgagaccacctcccgcggggagcgcgcctacgacatcttctcgcgcctgctcaaggagcgcatcgtctgcatccacgggcccatcgccgacgacacggcctcgcttgtcgtcgcgcagctgctcttcctcgagtccgagaacccgctcaagcccgtccacctctacatcaactcccccgggggcgtcgtcaccgcggggctcgccatctacgacaccatgcagtacatccgctgccccgtcaccaccctctgcatcggccaggcggcctccatgggctcgctcctcctcgcggctggggcgccgggtgagaggcgcgcgcttcccaacgccagggtcatgatccaccagccctcgggcggcgcgcaggggcaagccaccgacatcgccatccaggccaaggagatcctcaaaatgcgcgaccgcctcaacaagatctaccagaagcacacgcgccagcccatcgataagattgagcagtgcatggagagggacctcttcatggaccctgaagaggcgcgcgactggggcctcatcgacgaggtcatcgagaatcgacctgcctcgttcatgcccgacggaatcggtggaggcctcgatgtgcccaggctcggtggcgttggcggcggacgggggagggacgtcgaggaaccttccgcggtgtgaggattggcctcaaaggtgaaatccttcctcatccggtggatgtgttgtttgttgttagatccaaaggttcaattcttactatacaaggttaaccttgttattatggttatggaaacgtccggctccccattgtccttgttgcttaaattgcttcaattgagctattggggatataattattgcaactctaaggaaattctgcactgttgatactgataaattgacacagtattgtgtatgttgtactatatttgtatcaattccatgccaggacattcaaactttttcctctaaaaaaaaacaacacatccaccggatgaggaaggatttcacctttgaggccaatcctcacaccgcggaaggttcctcgacgtccctcccccgtccgccgccaacgccaccgagcctgggcacatcgaggcctccaccgattccgtcgggcatgaacgaggcaggtcgattctcgatgacctcgtcgatgaggccccagtcgcgcgcctcttcagggtccatgaagaggtccctctccatgcactgctcaatcttatcgatgggctggcgcgtgtgcttctggtagatcttgttgaggcggtcgcgcattttgaggatctccttggcctggatggcgatgtcggtggcttgcccctgcgcgccgcccgagggctggtggatcatgaccctggcgttgggaagcgcgcgcctctcacccggcgccccagccgcgaggaggagcgagcccatggaggccgcctggccgatgcagagggtggtgacggggcagcggatgtactgcatggtgtcgtagatggcgagccccgcggtgacgacgcccccgggggagttgatgtagaggtggacgggcttgagcgggttctcggactcgaggaagagcagctgcgcgacgacgagcgaggccgtgtcgtcggcgatgggcccgtggatgcagacgatgcgctccttaagcaggcgcgagaagatgtcgtaggcgcgctccccccgggaggtggtctcgatgaccatggggaccaggccgtactcgcggtgctgcgagaacccctccggctggggcggctggtagggggacgaggagaagaacgcccgtgggggcgccgccgcgacgagccggcgcggcccgagcccggcggagcccgggcccaggctcagagagctggacctgggggagggccgcggcgtggaggacgggagcggggataccgcggcgtggtgcgcgagggcgagagctgaggatggcgtcatggc

SEQ ID NO: 100375 - DNA, 1726 bp, Zea mays
  Clone ID: MRT4577_23055C.1
ccggccgggcagccccccaaataaaactgaaatatcgaggaagggacgggctcggcctctctgcccgaattcccgattgcgcctcctccgactccgagatcccgtcagccatggacgggctcctgtcgaagctccgcagcctggacgcgtaccccaaggtgaacgaggacttctacagccgcaccctctccggcggcatcatcacgctcgtctcctctgctgtcatgctcctcctcttcgtctccgagctccgattatatctccatgcagttactgagacaacactaagggttgatacttcaaggggagaaacacttcgcataaattttgatgtcacctttccagcccttcaatgttctataattagcctggatgcaatggacatcagtggacaggagcacctagatgtgaaacatgatgtattcaagcagcgaattgatgcccatggcaatgttattgcgactaggcaagatgtagttggtgggatgaagatggaggcacctctacaacatcatggtggaaggcttgaacacaatgaaacctattgtggctcttgttatggtgcacaagaatctgatgatcaatgttgtaacacatgtgaagatgttcgtgaagcctacaggaaaaaagggtggggtgtatcgaatccagatttgcttgaccagtgcaaaagggagggctttcttcaaagtataaaggacgaagaaggcgaaggatgcaatatttatggttttattgaagttaataaggttgctgggaatttccattttgctccagggaaaagtttccagcagtcaaatgtgcacgttcatgacttgctcccgttccagaaggacagcttcaatgtcagtcataagataaacagactaagttttggagaatactttccaggtgttgttaatccacttgatggggcaaattgggtgcagcattcatcatatggaatgtatcaatacttcatcaaggttgttcctacagtctacacggacataaatgaacacattattctctctaatcagttctctgtaacggaacattttagaagtggtgagagtggtcggatgcaggcccttcctggtgtgttcttcttttatgacctttctccaatcaaggtcacattcacggaacaacatgtgtcatttttacactttttaactaatgtttgcgctattgttggaggtgtgttcaccgtttctggaatcatagattcgtttgtataccatagtcaaagagcaatcaagaagaagatggaaataggcaaattcaactgatgttgccttactattgctgcaattaagtagctcctgttgcagctccaagatccagaaatgcaatgtggcttttcctcgaactcttggcacagttgcgtagttgacaaacaattgctcatcagataactcttgatgtgcttgccaacttgcttccggcaaagataccagcgagcaagatggtcatcttgtatacttcgatgttacatttttgtacgcttagtctgacaagaaaacattttacttcctcgagctgcaggtgttcgtgtactgttgtaaatttgtggtagagggagcctatctgtagtttttttttacaattatgtgtttgtaccagttttttctgagacatttgtagcttagacaggtaaagattgtttgaaatacatataaaccatttttgaaggaaagcaagcttatcgttgtgaaaaagaaaaaaaaagaaaaaaaaaaaaaaa

SEQ ID NO: 100376 - DNA, 493 bp, Zea mays
  Clone ID: MRT4577_23056C.1
tagttctagtacgcgggcggccgcccttttttttttttttttttttttttttttttttttttttttttttttttttttttttttttggaaaggggaagcggacccgggggaagaccccccccttcggggacgggaaacaaagtgccgggaaccacaactgggacccccgaatgggccccttcacgcttggcgaaaaccgggtcgcgcgccccaccgtcctcaggggaggggaagcaagacccccctccggggggcccgggggcccccccctggggaatcccctggggctggggcccttggttttctttgggaaaaaattggcgaaaccaacggaaaaccgaaaaaaagggcccagttaaaaattccaaaaagggcgctttcttggaaaaaaaataggggaaggggagttataaaaaggctgtaactggaacccaaaattgaaaagctgtctgcaagcagcaatgccaatgccaatgccattgggttttcgagc

SEQ ID NO: 100377 - DNA, 585 bp, Zea mays
  Clone ID: MRT4577_23057C.1
tctgcgaaagtgatagaacgatttgtttcattgattcttgaagagatcgagcttcttttagaccacaaggtcgaggatgtcttgctgctgcgcttctagatgcgggtgttgctcaagctgcaagtgctgcaagaagtaccctgacctgtaggatactagcaccgccgcgcaggccaccgtcgtcctcggagtggccccggagtagaatgccgcgcccgaattctttcaggccgcgtgggtctgcggtgagggcttcctcggttgcagctgcggtggcatctgcaagtgcgacccctgctactgctgatcacatcgatcgacgaccatggatatgattattatctatctagattgtggaggtggatgatcaataataagctagggcgagatgcgtgccatacatacgcattgcgcggcgtgtgtgacacatagagaacacaggtcttcggtttgatatctactctctagatgtttctgctctgcgtttgcgatcatgtgccgcacctcatcttcatggatgaccagcgatactgttgcgagttctgcaccccgatactgctcttcctctacatcgacgagtggatc

SEQ ID NO: 100378 - DNA, 1090 bp, Zea mays
  Clone ID: MRT4577_23058C.1
gtagaagggcgtggatggcgtccgggtactccgcccacggtgactcctcgggagcacacggcgcggagcgcatccgcgtacgccctctgcctgtcctgatgcacgtcccacccgccgacgcacaccagcgtgggcgggaacgcccgccaccggtccgcgcccgcgcccgcgtcgcgcctgatcgcggcgggcacgttggcggcctcgtggtcccgcgtggcgccgggcggcaggaacgcgcgccacagccacgccagccgctcgggggcgaggcggtagtcgacggaggcgatgacggccgggatggccgacgccaggcggcggcacagcacgtcgtactgcgccgacgccgcggagtggaagacgaagccgccgccgtggaagtacacgaccaccgggagctcgttgccgccgccggggatctccgggacgaagaggcgggcgcgcaggtggtcggagacggcgtggtccgtggatgccacgccgccgaggggggccgtcggggtgggcggcgcggcgcggtcgaagagggagagcaggaagcggctgacggtgccgtcgcggcggagcgaggcggcgtgcagcgcggaggcggcgcccacaagcagcctcgcgcgccacggcagcgggggcttctctggcctcggctgttggtctgacgcggccatggatctccctgtcctgtccctcggtatctcgtgcaggcaggccgctgatgaatgatgataagggcagtggcagtggagcagatgacgagtccttgtcattgaggggcgtttataatcgctcgtcttcgtctcccacgcccgtgggccgccggatccaccgtcgcagcgcttgtctcccagactcccacgcatcggagatgcgggccgcgagagcgagccgttccttcttgcctgagggctgtcgccagactcctgttgtgtcacctcgcagcgcatgggaacagagaagcgccgccatgcgcgaggtggacgctgctgttagaaaacctttcatgtgatctaattccgaggggtgcgatgtgtctcctcactatgtatatatatatgtacacacttcatgagatcaatacaacagttcggtc

SEQ ID NO: 100379 - DNA, 1871 bp, Zea mays
  Clone ID: MRT4577_23059C.1
actctgtgcgaattaggcccggtcctgtgtcctctacggccatgctcaaaacacgatacgccctcgaggccggccgggacacagcgaatcaacgctgaattcaccatccaacggactgcacccaacatgcttgcgaacgtctgccggcggcggctcaccatccccctctccccaatcctcgccgccgccgccgccgccgccagcggcaagaatcccatccactccaaccacgcgcgcgccctcctctctcaaagctactactcgtccgccgttcaggcggcgcccgaccgcgagccctgccccactacggtctcctacctggtttcctgcggtgtctcccccgccgtcgccgccgctcgcaaggtccgcatccgggacacggaccgggccgacgcagttcgggccctcctgcgcaagtacggcttctccgaggcggatatcacccgcacggtgcgtttagacccgctgctgctcaccttcgatccagaccgcaccattcgccccaagctcgacttcttcgtctcgctcgggatccagccccgcttgctcgccaccgagccccacatcctcgcccgcagcctggaaaaacacatcataccctgcatcgagtttttccgcaccatccttcgtaccgatgacaacatccgcatcgccgtctcccgcgtgccccgcgcgctcatgaccgatatcgagagcaccatgcgccccgccgtcgaggcgttcctcagccacggtctctccatggaagccatcgccaagcttctcatgattcacatgggaatgatcaagacaccgccggagcgcatccgcgaggccttccatgacctcaaggcgctcggcctccgcgtcacggatacgggcttcctctacggcttccgcgtcatttgcagccttaggagggagactatggtgcgcaaggtggcggttttcaagagcttcggggtgtccgaatctgaccttttcagggcgttcaagacgcagcccaccatactgctcgtcggagatgagaccataaagaagaagttcaggtttttcttggatgtgatgaagcttgagatagctgatgtgatggcgcagccactgactctggcgttgagcttggagaagaatatcatgccaaggtgcgccgtgctgagcatattgatgaaggagggtaagcttaagcggacacagaagttgattccaccactgctttccaattctagggtcttctcggagaggtatgtgttgaggcatgctaaggatgtgcctgatgttgttaaggcatttgagggcaagattaaatttcaagggtttggggaatcagaggttaggacttctgtgccactgaatgactgaagcccaaaccccaggattctgaaatcatgcttatttgttagaggtaaggcagatcaatgcatgtttgcaattgtaatcttgttccattcatactcatagtgaaatgtctatttctggggccatgtcgaatgtcatggttttgcatttttatgatacccatgcatccaggaacatgtacgttgtgacgttctcagctgtggtcgatctggcatgtgtggcctgccagttcttaaatcatgctgtggttcatatgcttatgacccggatggatttgttcattttgaaactctgattatttgtactgctctgctgagtggaaatgctcatgttactggaagttctgtgattttcttctctccccaaatgtaatattcaccctatcgattttgttttggttagtgagagaactatgctgatgatgtgccagtcctccggatatgttatggtattttagtgtagttaaatctgatcacgtatggggaatctgaatatttgtgactggagtcaaaaaaaaaaaaaaaaaaaccccaacc

SEQ ID NO: 100380 - DNA, 1168 bp, Zea mays
  Clone ID: MRT4577_2305C.1
attcacgggtccacgcacgcgtccgaggacgcgtgggcaaagcaacacctgctttggtacggttatgatcgcaagaatggtgtccattcactctgtccagctatatggtcaaaacataggagatggttgatgatgtcaatgatgtgtctcaatccaatagcttgttcgtttatggatttgcaattccctaatgggcaactaacatatgttgctggtgaggggatatcagccagtggttttcttccgttatttggtgggttgcttcaagctcaaggaaaatatcctggagaaacaagaattagcttttcttgcaagccttggcatggaaaagatctggccttatggtgagacccagcatacaagtcagtgtgtgccctacgtttggaggaagtgatcctggggtacgtgcagaagttgtccattcattgaaagaggaattgaatctgatgtgtggcctctcttgctcacagcgcccatcagcttatactgctctctctgtaagctctagttaacatttctgattggttttttctaggattttagtgtggatgtaacatactctctacatggcagattggacgatcaaagtggaatggtcaagtgggcagttctggagtggtaatcaccttggaaacacctcttaataacattggaaggccgtcgttatctgttcaactgaatggtggttttgagttgtgatccttatgactcctgcactgaagctgtacatactattgtatatattgccatcactaatgttcgtgctccattgtcatggagacggctacttgatctagtttgtggaagtgggatgcagcctgccggcttgcaggttgtttttgttactgtagtctataggtagtctcaactcagcaaatcagctgccatggtacccaacccatgcgggcacagaagtcaactactttgttgttcaatcattatgacaatccttaggtcttatttggatactctcgtattcacattaatctcacatttattgaagtgaaatttaaattaatttacactccaatcaacttcaatacatatggattgaagtcaatacgagagtatcgaaatacggccttaagggattgtgacgcttgcagcaggtgagctcatattagaagttcgtcaaagtggaggaccacgtaatctaaaaagagaaaaa

SEQ ID NO: 100381 - DNA, 535 bp, Zea mays
  unsure (1)..(535): unsure at all n locations
  Clone ID: MRT4577_23060C.1
gcacgaggtgtgacaccccagtgtcacctagggttcttccctaagctaatccaacctattaacacatgtaaattcagtaaaagggggaacatcaaaagaaaattcagaacaaaggtttataatgaatcttcttaaagtctccttaatcttgttatgaactttgagagagaaagaccctcaaccccaaataaaccctaagtaagccaagttaagcataaagggtaattgggagaagtcatgggggaaaatgcaaaattatagatatgatcaaattacaaagttttagttcatcaaatagctaacaaatcatagtaagagagtttggccatttggtctttttaaaattcccaaatcagcccttgaaccatgaacccttggagaaattcagatttctgaatttctgaaatttaaacctnctttcaaagatcaactgcgttctctggttttcgaaactcaaaactaggagatccaaatatcaaagntgggccaaattcccttgaacacgccctggaaaaggttgaactcaaaccaaatt

SEQ ID NO: 100382 - DNA, 1125 bp, Zea mays
  Clone ID: MRT4577_23061C.1
ggatggagcaagtacaggttgttggagttacttgcttgggaatgtatcatcctttattagcacataagaagtttgacacatgtatcatggatgaagctggacaaattacattgccggtttcactgggacctttgatgcttgcaacaaagtttgttctagtaggagaccattatcaacttcctccactggttcagagctctgaagcgcgagaaaatgggatgggcatcagcttattttggagattgtcagaagcacattcccaggcaatttcagcactgcgatgccagtaccgtatgtcatctggtatcatggagctctcaaattcgttgatttacggtaataggttgtgctgtggttcattggaaattgcaaatgccaaactcaagttttctggtagagaaccaatgcagttgaagttaaaagagatcttgaatcccgatagggctgtgatctttgccaacacagatcaaatacctgcacttgaggcaaaggaacacagaactgtgaacaatcctacagaagcacacattatttcatggatcatcaaagaattactaagaaggggtgtagctcaagatgctattggtatcataaccccatataacgctcaagtgaatatcattcagcaatgcactgatggtttggttgaggttcatacgatcgataaataccagggtagagataaggagtgtataatagtatctttcgtgcgctccactgcaaactcaagggctagtggttcttctctgcttggtgattggcacaggatcaatgttctgttgacacgtgcaaagaagaagctcatcatggtgggatcacgtggaacgctttcaacaatacctttgctcaggcttcttgtcgacaaagtagctgagattggtggcctgttggatttgacaaataaggatgcgcattctttttcgagaacttgaagttcttgtttgaatgcacaataggatgcacggtagatgaatctggaaggtttttataaggccaagctgtaaataagaatatgctgtaaattttgtttttggaaatgtatagtaaacctagccaagagccacacagctagaggttaggttttgtatattccttccgttagttataacttatttcaatttcatt

SEQ ID NO: 100383 - DNA, 1258 bp, Zea mays
  Clone ID: MRT4577_23062C.1
ctcgaggtctggccgaaaaaaaaaaaaaaaaacaaaaaaaaaaccccacgcgtcctctccactcctccacacctagacttcccaatcctccattgggcaaccctgtcacacagtacgccgtcgcctgtggtttggtttgtggagtgagagagaaagagagagagagacatagactcggactcggagagaaggagatgatgtcgagggagcgcaagaaggcggctgctcttcaggagaagctgaagatcctccgctccatcactcactcccacgctctgagcaacacgtcgataatcatggacgcgtcggcgtacatcaaggagctgaagcagaaggtggtgaggctgaaccaggagattgcgtgcgcgcaggacgcgctgagacacaagtcatcatcctatcccacggtgaccgtggaagccctaggagtgcaggggtcgtcgttcctggtgaacgtgttctccgacaagagctgcccggggctgctcgtcgccgtgctggaggccttcgacgagctggggctcagcgtgctccaggccaccgcgtcctgcgccgactccttccgcctcgaggccgtgggcggagagaacgtggcggacaacgtggacgagcacgtcgtgaagcaggcagtcctgcaggccgtcaggagctgctccgagggcggcagcgagcacgacgacgaggagtagtagctagctatagcaagaggctgagcgcgcgtaagcacacacgccttctgctacttgcatcggtcgatgtcgtccctgctgctggtgcatagctctggctggacaaccgcgcatgtactcgatcgatcgtcgaccggccggcgccctctctgtgtatggtagtagcagtagctccgtttctcagctagctccccctctcgatctttaattcgattttttttactcttctctgtttcctctatctatctatctatctatcggtggcaaagatgaaacagagccgctgctcctagctgctgatggtccggtgaattcgttcgtagcagcgccaccgtttcctgtgtaatagtattggccggagggcacgccgtgatttacatatttagtatatatgtctatgatgcatgcgtgataataagatcgatcatgcctgcacgcacgcacgcatgcatgatgtaagaatgccgacgacaacgacgacgatgatgatcatgcagttacccttcatacattaatgctgcggtggacatttggtcagctgttaaaaagaaaaaaaaagggcggccgct

SEQ ID NO: 100384 - DNA, 334 bp, Zea mays
  unsure (1)..(334): unsure at all n locations
  Clone ID: MRT4577_23063C.1
cgggcatccccgggtggcgacgtctatgctggggtgcctaagatacactgtgcgacgaggtcaacgtcaacatatttcttcactgctctgctggagagcacaactgatgtacacaggagtgcgatcggcaagggtggcgctaacactgcccccctnattaccccctacaagatgggaaaactcgatggttcccacagggcttgtcctcgcaccactgacgggggaggggggctacggtttctttcctcancctcatgccatactgtgctatcagcacagggcgactaaaggaggtcttctgatagctggggccacgggggttttctacactggc

SEQ ID NO: 100385 - DNA, 467 bp, Zea mays
  Clone ID: MRT4577_23064C.1
ggttcaacggggtaacattcaaacatcattcacaatgcaaaacacaggaagaggaggcaacatgatttttgtttcttaacagaaaaccgtaagatgaaacgcatattgctgcaaacataaaaacgccccgagacagggcgaactgagaatagacgggtaccgtaaaaactggacaaacgtgtggaaaacatagacctaacaccgtcattaatggaacacacagaacctcccacagcaggcctaggatccacatcttccatgtttaaccttctcctaaggattgatgcaagacccccactatcattatagtatatatgtgacaggtcacatgctgtttcgacaaggtattctaaacatccaaaaacatagacaagcggatccttatttccacttggaaccagaaaacatttgacccataaacggaagacgaacaactatggctgataaatgtcctcacacagacacac

SEQ ID NO: 100386 - DNA, 152 bp, Zea mays
  Clone ID: MRT4577_23065C.1
tacggaagcttcgactttgggatgaaagttctctcatgataaaggcgtgtgataagaatatgcaacccgaaggtgacgtggatggacgccgaagctgggctcaaggacttcggcttggatggaagacgaaaccgacctaagggggaaaagac

SEQ ID NO: 100387 - DNA, 421 bp, Zea mays
  Clone ID: MRT4577_23066C.1
agcggcaggcctgctgcacgccctgcaccaggagattccgcatttatgcgggcatcgcactgcaagatgcttgccgattcgcaatgtctgcgtaagcctcttcccctccaccacttgtacgacacagcagagaagctccgagagactgcatacgctaggcccgggaacgagcgcgacgttggcaggcagggccacgaagatacggtccaatacatcaaaggcgaactggaagagcgcgcagactattaccacgtatatacccgataggggccagtctccattgagaataatgccaccctcagcgcggacaacaagactatcgacggtttggctgggacgcttgctccgcttggcattgcgaccggccctgttggagctatgccgagtattagatgtaatgcggaggacttccctgggaccc

SEQ ID NO: 100388 - DNA, 310 bp, Zea mays
  unsure (1)..(310): unsure at all n locations
  Clone ID: MRT4577_23067C.1
tacctctctattttatcctatcttacatacacacacatccaacatcatgtatcttctataaggtcacctatattcaattcactatccaactcaatacaacttcattactaacaaaaccattacattacccaacttaatccccttccaacacatctttctttctacaactctcttaataactaacatacccacacctatcacccttcccaacantttcacaaacttaatcacaaattntactctcactataacatcccattaatcaccacatttatcacaactactctcatctttacctctacacttacca

SEQ ID NO: 100389 - DNA, 325 bp, Zea mays
  Clone ID: MRT4577_23068C.1
gctgttcccaccggacggaggcaggttttgtatcgagcactcgtaatggttgccgacatcacagcgcagctgtgctctcgacggggtaaaggactagggggtgacgaactccatgcgcaatgtcgcattaaacggactactacacctttcgctcatgctcggttgctaaggactcctcattcccccacagatgtgatcagtcctacagaggagcaaacgggacattaagacctgcttgaactgctatggctagctctgcctgggggagttgacctgtcgtaggtagaactacctggagagcaaaaagctgtgggcacatcatcta

SEQ ID NO: 100390 - DNA, 511 bp, Zea mays
  Clone ID: MRT4577_23069C.1
atcacgactacttagcagtagcaggcgggtgaatacccaaacatgaataattggccaggaggggcttgaacaaactttgaaaacacccatgcatacaagattggcacatcaaacaattggtagcttaattaggtgacagagatcttgccgaccattacggtttcttgaaacgggtggcaggagaagccgttggttcccgccgcggtgagggggacggactaggtgttccctggcgcgccgaggtccttctccagccagatgttggaggaaccgacgccggtcagcacctcgagcttgccgaaaacgatcttctgcggcaagaccgcattcatcttcaatttgatggtgccgacgcccttcacggtgaacagggtggcctcgaagaagaaccggtcgtcggatgcgcccaggaacacctcctgggccatggaaccctccttgaccatggagcccggattcattcacacctggggggggccggggtccttgaagacaaaggcccccacggtga

SEQ ID NO: 100391 - DNA, 1218 bp, Zea mays
  unsure (1)..(1218): unsure at all n locations
  Clone ID: MRT4577_2306C.1
acactgccaaaatagcggtccagtatctcttctggattgatgaatattttgaagggctaccggttttttccccttcgcttttatgccaactggggaaaagaggatgtttttcaaggcctttaaatttggtaaaacccaggtttttccaggcccgaattttttaaatttctgacagtgcaccacatttaggtttccctataaaaaagctatttctttgcaagctcgcgtatttantcttggtttctttatatcttcctccctttttttttttttttttttttttttttttttttttttttttttttttttttttttttttttttttttttttttttttttttttttttttttttacagggatcgctagtctttggttcattgatcaatgcatgtagagaaatacaaaaatacaccagcttgtttgtctcaacatccaacaaagcaaactaaacagacaattgttaacaatgtccaactgcgagtttgcgacaggtagtcagtcttgctccaagaaaatgtgattctggacgaacatattccatggcagcgagccctccgctttcatgaacttctgaaaatatgagctgaactgctgcaagtatcgcaatcccttcaaggattgttataattcttcgagtggaaaacaaagcagttgagttctgtgcccgcatgagtataccatagcagctgatttgctgagttgagactttagacctatagactacagtaacaaaaacaacctgcaagcctgcagcccacttccacaaacttttctaggttgatcagctgagtagccgtctccatgacaatggagcacgaacattagtgatggcaatatatacaatagtatgtacagcttcagtgcaggagtcataaggatcacaactcaaaaccaccattcagttgaacagataacgacggccttccaatgttattaagaggtgtttccaaggtgattaccactccagaactgcccacttgaccattccactttgatcgtccaatagagagagcagtataagctgatgggcgctgtgagcaagagaggccacacatcagattcaattcctctttcaatgaatggacaacttctgcacgtaccccaggatcacttcctccaaacgtagggcacacactgacttgtatgctgggtctcaccataaggccagtttttttttttctctctacacttaactccgaagcccggccggcctcgag

SEQ ID NO: 100392 - DNA, 1023 bp, Zea mays
  Clone ID: MRT4577_23070C.1
ggccctaggggccttttttttttttttttttcagaagcatcccactttaactgaacagcgagcgacacggtatacattgtatgtattctttcaccagtacatgttcttcagtgttacatacaacaactatacacacgtgtgatgtaaaggttacagattccacaatttacacggtatggacagagaaacgcagccccaaaaaaatgttctcaaaagagttcagcgcagcagaaagggtaataccctgcttctcctgccgactctgagacgactaccagctccctctgaactttcctccgttcatagaagactgggcatgcaagggaaatacacttgactccactttcaacaatccagtctgcaccgccacaatggccacatatagcagcaagatgttggatttctcgctccaactttgaagttctgccagcgactactgtggcaacaacagcttcgcttttcaagcaattgttgcagaaggactctgatccttgaatcatatcaccacaaattgagcagtggcttgacatgtagtatgtatctattctgcctcctttggctgaggttttattattcaatcctaatcggatgaaactgccatcacgagagaatgaaccatgagcagcagcaaattggcgtttcgcaagagttgatcgtatggggcgaggcatctcattaaaccacttgttcaggtcagcaccaagaagtccaaaaacacgctgcaatgcaggaataatctgcttggttatgtaatattgttcatttaatctataaggggagccaacttctagcagaccataaggatcaataaccatgtcggcaagacgagctcctggttccccatggattacaacatatggcactctctctgcataccgaggctctgcccttgggtcagacaacatagcttttgttgcaacaattgctgcagggggcagcgtggaagcccttgcactataagtgcctaaacgcacctcctccgcccaacccacgcgtccgcccacgcgtccgcccacgcgtccg

SEQ ID NO: 100393 - DNA, 331 bp, Zea mays
  unsure (1)..(331): unsure at all n locations
  Clone ID: MRT4577_23071C.1
cagcatacatactactaccattcatgccagctatgtttggtgtgtagccctgcatatccttcttgacacgaaccacatgtngttgccgttctaccagcaccgttgcagcctaactgctggcactcctcttacaacatgcaacaatttgctgccattcaaccaactntgctttgacaaacccagcagtgttctaccaacaacccatcattggtggtgccctcttttagatttcttatgagttatagttcaataataaagttctttatctgatgtttgtggcttcccagaaataagaaaagacgtccctaacgaaagaacttaccagcagtgg

SEQ ID NO: 100394 - DNA, 452 bp, Zea mays
  Clone ID: MRT4577_23072C.1
ggggggggggccccattcaacacccatgttttatttccgccaataaaaccccaacggggatagcccctttaaagaagctgggttttgggggggggctaaacaaagggtttggggaggaaggcatgtttttattttaaaaaaaggccatgttttggtggtggtggtgggggagcggagaaccatttaaaccagggggaaaacccccagggttggatcgccgaaactgcacaggccactttttaactttattgccaccaaaaaagaaaattgccttctgcccttcttggatttaaagcccaaggaaacccccgataccagttattaaaaaatctcgggggctcaaattgctagccccaggggaaaacaaaattttttgacacccttgctgtaaaaattggaaaaaaaggctttggaaaactttaggggcttggggggttctaatccccccaaaa

SEQ ID NO: 100395 - DNA, 331 bp, Zea mays
  Clone ID: MRT4577_23073C.1
gcgcatttattaagtacctgctgattggcgcactgggtccgctggtcataacgtctaaagaggatgtatgtcaaacttcatggccatctatatttttctcttattttgcaacatcacatatctatgtcttttttgcttttaatatataccgttctgtttcttccactatcaaacatttttaattctttattacttcttgtactccttccttatattcttattttcattttttattaacattcctattttttgttttatttttttccatctctctttattttatccacttttctctgttttctttttctaatcaaataactaatatattttt

SEQ ID NO: 100396 - DNA, 324 bp, Zea mays
  Clone ID: MRT4577_23074C.1
cactccctctctttgccgttctctaccgttcgctacgccacgctccccaccgccggggtgaacctgaatcgaggcggctgcccaccaataccaaccaagaagaagacacataaactgacgaaccctctgttccataaaaggccgaaacagttcggcatttgcctcgcattacctaccaagaacgacctgcaccgattcgtaaagtggcccacattcatgcgcatccatcgctagcttagcatcctcaaacaatgcctcagggtgtcatcgactctaaaccagttcacccgaacaatctacatgaacctctgtaccaaactcttc

SEQ ID NO: 100397 - DNA, 351 bp, Zea mays
  Clone ID: MRT4577_23075C.1
aggagttccaacaattcagcataacacgaatagcaaaacctgacaacgcttaacataaaacgtcataccaagtcctaaagttcattatttcaaatatcttggttgataatgcacctaataggatcctgcccccctcaagcatcatagctttggctgccaccaccatagccaccaccttcgtagccatgttgacacgtacctgccgcccatcaatttccttgccatccattgcagaaatagcttccttggcagcatcactgtcggagtagttcacaaagccaaagcctcttgacctcccagtctccctgtctgtgatcaccctcgcttcaataacctcttcaaagctgctaa

SEQ ID NO: 100398 - DNA, 482 bp, Zea mays
  Clone ID: MRT4577_23076C.1
cccacgcgtccgcccacgcgtccgaggtaatctggtggtccgatgcgcggaagttttgatctgctgctatggcctatatgagaataggcctacatgtatggcaagtacctttactttctgaagttttcaatggatggcaaggaaattgatgggcggcaggtacgtgtcaacatggctaatgagagacctgctgggaaccgtggtggtggtggctatggcggcggcggctatggaggtggtggctacggaggtggcggcggctacggaggttttggctatggtggtggcagccaaagctatgatgcttgaggggggcaggatcctattaggtgcattatcaaccaagatatttgaaataatgaactttaggacttggtatgacgttttatgttaagcgttgtcaggttttgctattcgtgttatgctgaattgttggaactcctagatgcagaatcttacgtattggttttggttccttcgag

SEQ ID NO: 100399 - DNA, 385 bp, Zea mays
  unsure (1)..(385): unsure at all n locations
  Clone ID: MRT4577_23078C.1
caagaacgcagaaccgtgacccacgtgctcgcagcgtaccagcagccgtcgtcgccctcgcaactagctccctgctgaacacgctgctgcatcgtaagctcgctccgttcgctgggaagagctcacggccgtccgtggcgcacgtggcgcaccgggcgccgacggctcgtgtgtggcggccagggggtacattgttcagagtcaagtggacgataacgatcggggaggagtccatcttccgtacgttcaggcgggacgtgatgcgcgccggtgtgctgcaggatatcaagcgcgatccgaagtacgagagctagtcggaacgagaagtacgcactgctcgctacgcctgacgcagtanacgtcgcaggggtatgatgggcagagc

SEQ ID NO: 100400 - DNA, 1308 bp, Zea mays
  Clone ID: MRT4577_23079C.1
gcctggagaggcggcgccggccacaacggcagggagccgccaccgctgtccgtcttcgggatcccaaaataccattacaaggatctgcagaaggctaccagcaactttaccacaattcttgggcaaggatcgttcggccctgtgtacaaagctgtaatggccactggtgaagtggtagctgtaaaggtgctcgcgagtgattcaagacaaggggaaagagagttccagactgaggtagcattgcttagcaggttgcatcataggaatcttgttaatttggttgggtattgtgtagaaaaaggtcagcgcattctgatttatgagtacatgagcaatgggagtttggcaagacttttatatggcgccaataaacgaagtttgagctggcaagaaaggctgcaaattgctcacgatgtttctcatgggattgagtacctgcagctgcaaattgctcacgatgtttctcatgggattgagtacctgcatgaaggggtacgttaacatttgataactattaaggttgcagactttggtctatcaaaggaggaagtgtatgatggaaggaagtctggccttaagggcacctatggctatatggatcctgattacatgtccacaaataagctaacaaagaagagcgacgtgtatagctttggcataatactttttgaactgataactgccataaatccacaacaaggtctgatggagtacattaatctggcagcgattggaggggaggggagggttgattgggacgagatactggacaaggacctcctagtagggaacatccctgaagaggttcggatgcttgctgatgttgcctaccgatgcgttaacaagaatccgaggaagcgcccctggatatcagaggtcacacaggccatctcaagactcagacagcaccagctgataaagcatgatgcgataactctgccgaggagtgagaccaggaccgtccttaggaggatagactaccagcacgtggagcttagtgacctcactagcatcaaagaacttacgccgataagggcatcatgaactcgtgagcttgttctagtatgtaggttgctttatagagttagatttggacttggttcggcgatgttgtagctgtttgatgaaagcatcaggtagctagatcgttgaaagatgtcttggctgcaatgagagctctccttaattggagttctgtactgacctgaggtttgaaatcgttgtaaaaaaatcaacagtagtagctgtagcatttgataaaaaaagactttataaactgcatttttaccaactagttctagatcgcga

SEQ ID NO: 100401 - DNA, 289 bp, Zea mays
  Clone ID: MRT4577_2307C.1
cataataatgcaaaacgaaccgtgaaaaaagaactaagtcggtagaacatgaaagaagcggaacacaaagaagtcggaaacaacaggacataaggctaggcctgcggtgaaagtttacaggtggagcaatcgcaccgttcagtcatcgcgggaacaacagggggggcccccatgagggtgttcgcttttagctcgtggggatgagccgccaggaccgccacaagcggcgccacggattcatttttcgggggagtcttttttaaaacgttccggtggggaaacatcgggg

SEQ ID NO: 100402 - DNA, 429 bp, Zea mays
  Clone ID: MRT4577_23080C.1
cggcccggggagccacccaactttccccaaagggaggtaaaatcaaaccttggcgaaccaaggacatagttttttcctggggaaaaatttttttccctggggggtcccccaaaaaaacggggcgcaaaaaaaaaaaggaaaaccttggggggccaatgaggtaactaacataaattgagtggggttcactgactgctcttttttcaggaaggaaaacttggcagcccccttaattaatgaatcaacccacccccagagaaaaggcgttaaacctttgccccccaggggggtttttttttcccccagagggaccggaaataatttattttccttcaccggcttggcctgaaaaaatttaaacaagccaaactggtttgttttaccaagccagaaaaaattctgattgagggtggccaaccgggggaaaaa

SEQ ID NO: 100403 - DNA, 370 bp, Zea mays
  Clone ID: MRT4577_23081C.1
ctagagattcattgaccacctcgaaacttcattaatttctatgcaaatttacacaatacgggtaccagggtatcactaaaacgggtgcaaaaaaaatgccccaccatatttttcctttaaggcaacatgatttcataaccaaatttggagggggaaaaatgaactttattggtcacaaaaaccgtttttccatggctcggtggaaaaagggaccatttcctctcactatcataaccatatttacactgtacaaagttacctcccactttaaactgagatattcattggtctcttctattaagccaccaccttattttcgtaaaatatacaggccacaccattttggaaagacgatttgtgtttgaaacaa

SEQ ID NO: 100404 - DNA, 227 bp, Zea mays
  Clone ID: MRT4577_23082C.1
acccgtgcccacacatattttttttttcttgacaaaagggtctcacaggggcgtcaataactcatgtagctaaaccaaaaaaaaacagtaatcacatgaacatcaacctatatcatcgatcaggtaaaaacaaatccacacggcacagcccaatctgcatcctgcctacccaagaagaattacatccttgcacaaaccggatacctagaccacgtcaaaaacaccat

SEQ ID NO: 100405 - DNA, 253 bp, Zea mays
  Clone ID: MRT4577_23083C.1
cgtcctcgacgaccggatggtcggcgggcgggagggcggtgcggcgagggttttggccttttgggtacgttgtggataagcacgaaggcagcaggccagcagcagcaggggcggcgtggcgggcgggcaggcaggggcagggcaggcggagacggagggaggcggccacaagcggcggtctttccaaaatgtcaaaaaggacagctgtaacagcgataagaaaaacaagtcatcatcaccctctctcactact

SEQ ID NO: 100406 - DNA, 494 bp, Zea mays
  unsure (1)..(494): unsure at all n locations
  Clone ID: MRT4577_23084C.1
ttacttctgctctattttctcctcccttcactttgattctcttcccttcacctgatccacgcgcgtcaccatccaaagaagtactgtcctgtcaggaaaatcaaataagaatcgaataatggtaggtatgcccgaagttttgaggtcctgtgttatttggcagctgagggagaggttatttgtgtgtgcttgtagttgtagctagtggcgatgaagtattctaaggaaaatcaaataagaatcgaagttttgagagttcttgtttgttcatgttggctgtcaattatgtagacagtagaaagcgaatcagtttaatcccagcaagaatctgggaattttctgttgttgctttgtgctcgcacgagcagcagagctagcactggcatgcatggcactgttgtgaattggaattctacgcacgagcaacaagaatcatgttttggttcttaagctttaattcttaaatgntgtctcatgttactctctgcttggca

SEQ ID NO: 100407 - DNA, 640 bp, Zea mays
  Clone ID: MRT4577_23085C.1
cattggtacctcgagccggccgggaagccatacctgcaatcaggacgtgtgccgttattgctcctgctcctcctcctcttgcttcgcgcgagccgagggagcttgacgcgctagagtcgctgcttcgcttacacctgctatacgagccatcatcgtgcgcgacgatgatactgacgacctcttgtctctatgccatgagaagctggcgttggagcgaacagaagagtgctctcccacatggaaggatgacaaacctgctacatagacctcaaggaatacaagtggacagcaaaagctgtggcacgcctgaggacaacttccagactgctgccccgtaccaagaagcaggacctcctactgctaggtggaatgcaccgtcccccacgatgatgcggcttctggatcccatctatctcacgacacatggtgagaagattctcctgctgctgctccggagacttcaaatatcacaccatccagagatggcgtctgatcatcacgctattatccactcacatgtacaaggtgcatatgctactcctaaacctgaaatctagaagtagatgtaatataggatatgcctggcatcgtgatcgtgacgaactagcagtgattatagtaccaatgcgatagactgtga

SEQ ID NO: 100408 - DNA, 224 bp, Zea mays
  Clone ID: MRT4577_23086C.1
acccttcttatggggggggcccatctcgtcgcccccaaccccccggtgagcttctctgttcaccgtctccgagtccacagaactcccctttacactcgccgccgagaatcacgaagcgacataagcgcacatgggaggccgccaccacatgtgctcggcagctgggcggtccgcggcacacgcacgccccgacgagccgcgcaaccgcgggcaccgccggggca

SEQ ID NO: 100409 - DNA, 497 bp, Zea mays
  Clone ID: MRT4577_23087C.1
gccggccgggatcgggaacggagaaaaaaaaaaaaaaaaaattccaaaaaaaaaaaataaaaaaaaaaaaaaaaaaaaacaaaaatcggccccacatggatcttaagctcctattaactttcatataccccaaataacccgaataacccagatgaacaccatggaggcgggtggcccagtggcccttggctctccggggtgatcgctgggagggccacttccacggatagaaggggggtgtgacggatggcagccacggccatttaggtcatctaccgcctctggggcatctggcaccccgggtacacctgggacctctggggcatctgcgcacccctgggccacctggggcaccgggaccacctggcaacgggggcccaggggcggcctctggttcctctgccatcgccacaatgtacttaacctactcaaccgccccggcttcagcctaaaccccagtgacctcgatgccagggaaaacaacggcattgaaacct

SEQ ID NO: 100410 - DNA, 469 bp, Zea mays
  Clone ID: MRT4577_23088C.1
atcaagaagaacaatattgagtcacctaatttgtctgatcaaccactacaacgtgaccttatagtggcgccggtgaaacgaaggctagttgatgaatttaaatcttgtgacttgtctcaccgacagaagagaaaagttaagttgcagggaaactcactgcaaactcagacaccaagaagatcaccacgattggtaaacgtgaacaatacttgtaataagaacaaaaaagtgtcgaaaggaagagccaaagtgctgaaaacaccaccagatgcaacagatcaggtgaaggatagagcacataaatcatgtttgcttgatgagaaactagataatgccttgaaagctgttcatgaagaagcgacaggttccttatctcaggatctcaggaaactggattccccacggtgtgaggttggcttaagtaaagagcatggacatgatcaaggagatactggaaaaatgttggatg

SEQ ID NO: 100411 - DNA, 776 bp, Zea mays
  Clone ID: MRT4577_23089C.1
gacacacacagaatattcatttcagacaaactgcaccacatcacatggtagatcgatcttactgaggagaccatgccttagcaaccaaatacaggggcgccttgcgccgtaccgacagcccgttcacctcgtccatctccagcttcgccgccacgccggccggcagctcccagtcgaagtggtacaacaagctcgccagcgccagctccatggtcggcacggcgagaaccccaccccggggcatcctcgcctcccggcgccgaacggcacgaacctgaagtcctgcccgggcatcaagtagtccgccgttgaggtcgtcgccggcaaaccgctccggcacgaactcgtcggcgcgctcccacgcggcggggtcccgcgcgatggcccaggcgttgacgatgacgcgggtgcccgctgggacgtggtagccgagcagctccgtgtccaccgtcgtctcccgtggtatgaggagcggcagcggcatgtgcagccggagcgtctccttgatcacgcacctgaggtagcgcagctcctcgaggtggtcctcggtgacgtggtcgtcgtcgatgccgacggcggcgcggatctcgtcctggaccctgcgcatctcgtgtgtgtggttgatgagctccgccatggcccataccagcgtcgtgtaggtcgtgtccgtggcggcggcaaacattttctgtggatgtatgtatataagttgcaaagatcgaggcagatgatatttacatgcaattcatagcaaaaaaaaaaaaaaaaaagcggcc

SEQ ID NO: 100412 - DNA, 691 bp, Zea mays
  unsure (1)..(691): unsure at all n locations
  Clone ID: MRT4577_2308C.1
ttgggtaccccctcgagggccggcnccgggaaaaaaaaaaaaaaaaaaaaaaaaaaaaaaaaaaaaaaaaaaaaaaaaaaaaaaaaaaaaggaaaaaaaaaaaaaaaaaaaaaaaaaaaaaaaaaaaaaaaaaaaaaaaaaccgcctccaaacctcttttgtttccgagatttttccccacctccgggcccgttaggggatgggggggcccaaaaagatcgaaatccggaggcgctagcgccacccataagggtttggggaaaggggggccacggggacggccccggggtcgtaaaaaccctccacgccgttgttaaaggacgagctcaacatggggatcccgacaatccgaaacctgaatttcttggaaaggggggggccttttttccagccttaccacctaataatggggcaggaggggaacccgaccaaaaccataagggccccggggggtttgaattacaagctttaaaaccgaaacaacataaaccgattcttgggcccaagggcctcctgaatatccttaaaggactccgcctgccgttgtttgggttacatggtctccaaaaaaaagtacatttacaccatggacgacaattgtttggttgccaaggacccataaggcagggatttcaatgcttttgagcagaaaataaaaaacctcttaagcccgccaacaccgtttttttta

SEQ ID NO: 100413 - DNA, 3744 bp, Zea mays
  Clone ID: MRT4577_23090C.1
aattcggcacgagcgtcggtgccgcgtcccttttcccctctccccctccgtcgccgcctcgagcgagctccaccacttgctcctgcgcgaggtgaaacactgggttagggccactgccaccgctgggctgcctctgcctctgcctctcccgccagcgcgcgagcccgggggcgattcggcgccggcacgcgggaggggaagccgaggaatgcggtgagtcggcgggggtccggcgtttgtgaactcgtggagggctcggattggtgcgccatggacggcggcgacgccacgaattcggggaagcatgtggccgggcaggtgtgccagatctgcggcgacggcgtgggcaccgcggcggacggcgacctcttcaccgcctgcgacgtctgcggcttccccgtgtgccgcccatgctacgagtacgagcgcaaggacggcacccaggcgtgcccgcagtgcaagactaagtacaagcgccacaaagggagcccaccagtacacggtgaggaaaatgaggatgtggatgctgacgatgtgagtgactacaactaccaagcatctggcaaccaggatcagaagcaaaagattgctgagagaatgctcacctggcggacaaactcacgtggcagtgatattggcctggctaagtatgacagcggtgaaattgggcatgggaagtatgacagtggtgagatccctcgtggatatatcccgtcactaactcatagccagatctcaggagagattcctggagcttcccctgatcatatgatgtctcctgttgggaacattggcaggcgtggacatcaatttccttatgtaaatcattctccaaacccatcgagggagttctccggtagccttggcaatgttgcatggaaagagagggtggatggatggaaaatgaaggataaaggtgcaattcctatgaccaatggaacaagcattgctccatcagaagggcgtggagttgctgatattgatgcttctactgattataacatggaagatgccttactgaatgatgaaactcggcaacctctatctagaaaagtgccaattccttcatccagaataaatccgtacagaatggtcattgtgctacgtttggctgttctatgcatattcttgcgctaccgtatcacacatcctgtgaacaatgcatatccactgtggcttttatccgtcatatgtgagatctggtttgctttgtcctggattttggatcagttcccaaagtggtccccaatcaaccgtgaaacataccttgatagactggctttaaggtatgaccgagaaggtgaaccatctcaattagctcctgttgatatttttgtcagtactgtggatccaatgaaggagcctcctcttgtcactgcaaatactgtgctttccatccttgctgtcgattatccggttgacaaggtatcttgctatgtttcggatgatggagctgctatgctgacttttgatgctctctctgaaacttcagagtttgctagaaaatgggttccgttctgtaagaagtacaacatagagcctagggccccggaatggtactttgctcagaaaattgattacttgaaagacaaagttcaaacctcatttgtgaaagaacgccgggccatgaagagagaatatgaagaattcaaagttcgtatcaatggtcttgtagccaaggcacaaaaagttcccgaggagggatggatcatgcaagatggtacaccttggcctgggaacaatactagggaccatcctggaatgattcaggttttcctgggtcacagtggagggcttgacgttgaaggcaatgaacttcctcgtttggtttatgtgtctcgtgaaaaacgtcctggattccaacatcacaagaaggctggtgccatgaatgcacttgttcgtgtatcagctgtccttactaatgggcaatacatgttgaatcttgattgtgaccactacatcaataatagcaaggctcttcgagaagctatgtgcttccttatggacccaaacctaggaaggaatgtctgttatgtccaatttcctcagaggtttgatggtattgataggaatgaccgatatgcaaacaggaacactgtgtttttcgatattaacttgagaggtcttgacggcattcaagggccagtttatgtgggaactggttgtgtgtttaacagaacggccttatatggttatgagcctccagtcaagaaaaaaaagccaggcttcttctcttcgctttgtgggggaaggaaaaagacgtcaaaatctaagaagagctcggaaaagaagaagtcacatagacacgcagacagttctgtaccagtatttaatctcgaagatatagaggaagggattgaaggttctcagtttgatgatgagaaatcgctgattatgtctcaaatgagcttggagaagagatttggccagtccagtgtttttgtagcctctactctgatggaatatggcggtgttccacaatctgcaactccagagtctcttctgaaagaagctattcatgtcatcagctgtggctatgaggacaaaactgactggggaactgagattgggtggatctatggttctgttacagaagacattctcaccggattcaagatgcatgctcgaggctggcgatcaatctactgcatgcctaagcgaccagctttcaagggatctgctcctatcaacctttcggatcgtttgaatcaagtgcttcggtgggctcttggttccattgaaatccttttcagcaggcattgtcccatatggtatggctatggaggtcggcttaaattcctggagagatttgcttatatcaacacaacaatttatccactcacatcaatcccgctcctcctgtactgcatattgccagcagtttgtcttctcactgggaagttcatcatcccaaagattagtaacctagagagtgtttggtttatatcgctctttatctcaatctttgccactggtatccttgagatgaggtggagtggtgttggcattgatgaatggtggaggaacgagcagttctgggtcattggtggtatttctgcgcatttatttgccgtcttccagggtctcctgaaggtgcttgctggtatcgacacgagcttcactgtcacctctaaggccactgacgaagaaggtgattttgccgagctctacatgttcaagtggacaacgcttctgatcccaccaaccactattttgatcatcaacctggtcggcgtggtcgctggcatttcctacgcaatcaatagcggttaccagtcatggggacctcttttcgggaagctcttctttgcgttctgggtgattgtccacctgtaccccttcctcaagggcctcatggggaagcagaaccgcacgccgaccattgtcgttgtctgggctatcctccttgcgtcgatcttttccctgatgtgggttcgtatcgatccattcaccacccgggtcactggccctgatatcgcgaaatgtggcatcaactgctaggatgagctgaatatagttaaagagtggaactagacgcattgtgcatcgtaagttatcagtgggtggctctttttatagtatggtaggaacttggtcgggagacgttaattacatatgctatatgtacctccgctggtctttatccgtaagttaatatatatactgctttgagaattatgtatgggcaacaggttgattacttgattttgtgtgtacatatttaaaaaaaaaaaaaaaaaaaaa

SEQ ID NO: 100414 - DNA, 1435 bp, Zea mays
  Clone ID: MRT4577_23091C.1
cagtatttaatctcgaagatatagaggaagggattgaaggttctcagtttgatgatgagaaatcgctgattatgtctcaaatgagcttggagaagagatttggccagtccagcgtttttgtagcctctactctgatggaatatggtggtgttccacaatctgcaactccagagtctcttctgaaagaagctattcatgtcatcagctgtggctatgaggacaaaactgactggggaactgagattgggtggatctatggttctgttacagaagacattctcaccggattcaagatgcatgctcgaggctggcgatcaatctactgcatgcctaagcgaccagctttcaagggatctgctcctatcaacctttcggatcgtttggatcaagtgcttcggtgggctcttggttccattgaaattcttttcagcaggcattgtcccatatggtatggctatggaggccggcttaaattcctggagagatttgcttatatcaacacaacaatttatccactcacatcaatcccgctcctcctgtactgcatattgccagcagtttgtcttctcactgggaagttcatcatcccaaagattagtaacctagagagtgtttggtttatatcgctctttatctcaatctttgccactggtatccttgagatgaggtggagtggtgttggcattgatgaatggtggaggaacgagcagttctgggtcattggtggtatttctgcgcatttatttgccgtcttccagggtctcctgaaggtgcttgctggtatcgacacgagcttcactgtcacctctaaggccactgacgaagaaggtgattttgccgagctctacatgttcaagtggacaacgcttctgatcccaccaaccactattttgatcatcaacctggtcggcgtggtcgctggcatttcctacgcaatcaatagcggttaccagtcatggggacctcttttcgggaagctcttctttgcgttctgggtgattgtccacctgtaccccttcctcaagggcctcatggggaagcagaaccgcacgccgaccattgtcgttgtctgggctatcctccttgcgtcgatcttttccctgatgtgggttcgtatcgatccattcaccacccgggtcactggtcctgatatcgcgaaatgtggcatcaactgctaggatgagctgaagataattaaagagtggaactagacgcattgtgcatcgtaagttatcagtgggtggctctttttatagtatggtaggaacttggtcgggagacgttaattacatatgctatatgtacctccgctggtctttatccgtaagttaatatatatactgctttgagaattatgtatgggcaacaggttgtttacttgattttgtgtgtacatatttaaatgtctctgccaatatcaaatgcattaaccatg

SEQ ID NO: 100415 - DNA, 995 bp, Zea mays
  unsure (1)..(995): unsure at all n locations
  Clone ID: MRT4577_23092C.1
aattcggcacgagggtgaacactgggttagggccactgccaccgctgggctgcctctgcttctgcctctcccgccagcgcgcgagcccgggggcgattcggcgccggcacgcgggaggggaagccgaggaatgcggtgagtcggcgggggtccggcgtttgtgaactcgtggagggctcggattggtgcgccatggacggcggcgacgccacggtgagtggcacgcatttcgggggaacgggggttggngggaattattagggagtagcaggaagggttttctcccgcggtttgttcgttactgaaggtgttttcgtgtgtgtgcccttttgggtttggtttatctgcgcgcgtgcgaagaattcggggaagcatgtggccgggcaggtgtgccagatctgcggcgacggcgtgggcaccgcggcggacggcgacctcttcaccgctggcgacgtctgcggcttccccgtgtgccgcccatgctacgagtacgagcgcaaggacggcacccaggcgtgcccgcagtgcaagactaagtacaagcgccacaaaggtatggccaaccgccgccatttccaccgatttccatgtactccaggttgagtgcagcaggctaggctgcaacagccactgaaatcaagcaggtagttgtgttttaatcgctaggaacaggtaatagttcagtgtttggcaaatttattcagattctcaccgtaagctagctctctcagtgaactgtactcgaattgtagtttcgagtcacattgccgccaagagccacaagagtggaattctttggcttcaaccgaggctgaatcttattctttactcaatcgtgttctgttgttcagggagcccaccagtacacggtgaggaaaatgaggatgtggatgctgacgatgtgagtgactacaactaccaagcatctggcaaccaggatcagaagcaaaagattgctgagagaatgctcacctggcggacaaactcacgtggca

SEQ ID NO: 100416 - DNA, 559 bp, Zea mays
  Clone ID: MRT4577_23093C.1
gggaagtcgtgatccattggcaaatgggtaacacgacttgtgggtaaagatgtgtaacctctgcagagtgcaaaactggtatatcagtcgtgctcacggtcatgagtagcccggaccctcacatgagtaatttatggaactaaacttaattggttatattcattgcattatgggtgttgttattaattttgatctcatacttatttgggttggtatctaattatacttagtaattgctaataaaactttgaccaactttaaaagcaatgctcagctttatccatctcctttggtaagccttacacttcacattagctcccacctttggtgagtttgtgcacattattccccacaacttattgagagataaacgtatgtgagctcacccgtgttgtactcacatcccccaggtcaagaacaggtaccacaggatgaggcgcacgaaggatattgtgaagagttcgtgagtggtctaggttgtcgtctcctagtcaactttgtgttgctggattgttgtctttgcatgatgtaattatttaactattttgtacagaacttc

SEQ ID NO: 100417 - DNA, 161 bp, Zea mays
  Clone ID: MRT4577_23094C.1
taatctatccatttccctccatttattcaatatccaacgtctcaactaatatttgtgtgagagtatctcatttagagaaggtcattatcctcatccttagttgatgtattatctacacattttactaagtacatatgatttttcttttaaaaatcttctcc

SEQ ID NO: 100418 - DNA, 117 bp, Zea mays
  Clone ID: MRT4577_23095C.1
ctttattcttttctgcttagttttgttagattgtgaaagcctgcctccagatagtattgcagcatgccagcatttacatgctaatgggttcagtttattcgcagggacagtagtgga

SEQ ID NO: 100419 - DNA, 310 bp, Zea mays
  Clone ID: MRT4577_23096C.1
cactagtttctcacaacagcataaatctaatgcatatggacaaagattaaagtctgatattaaagcttattgtaaagaccttccatgaagagcccagttgattactcaattcataaaggactatgcaaccacaaaaacgaccatagtgaaagctatagccgaaacttttgctgacgctgggtcataaaatgtcacaaataatctcttggctagcctggcggacaatggcatgctaaaatatattgaacgcattgctgatagatctgttgatcatactatggaacataaggtggagatgaaggctgtggtc

SEQ ID NO: 100420 - DNA, 1344 bp, Zea mays
  Clone ID: MRT4577_23097C.1
atgactgaatccttgtctgtcaagctgagtccattagggtcacatctgacgaagctttttcagaaggacaaggagcccgcaaaaacggagaaggcagctaggccaaaaaagcaaagaattattacagtgacggaagtcattgaaaagacaccaccaagagctttagctccgaaggcgccagttgttgaggacatatcggctaccgaagctgcaccttcggaggctatagctgccaaagctgccacagccgaagatacagagttagaaaccaccattgcaaatattgataaaatactgctagacatggccgcagaagaagctgcagcagctaccgaagagacttcggcccagattgggcaagagctgaccaaggccgaaaaagaagagttaaaagagtatgccatatcttgcgggtatcggccggggtcatttctcttcggtggtattgatgatgaaaagttgggctgtatccgggatcaaaccggagcaaaggttatcggtactctatcaaagagtatcggttttccgaagcttgaaacagacatcagccactaccgacgacagcacatcgtcggtagtttgttttattctaatttcaagagtatgttgctgagcaaagctttaaaaatgcaacaagacttggaagacaaaaaacacgaggttataatcgagaatttagaaggcaaaataaaagaccaatctgctgctcttgaaaagaaagatttcgagcttcagacgaccgaaggcttattggcagaagctgaggctaaaataacagaactgaatacgaagcttctctgccagtcagaaagtttcgaacaagaaaaacagaagctaaatgaaaaatttgaggccgaagtccagaaggtttcaaatttgcaaaaatcattaacgagccttcaaaataaatgcttagaattcagcactcgatgtactcaacggctgaaggtcttctattcagtcggggccagcagcgaaaaatttactccttcagctgaagatctaccaggggcctttgaacacatcgaaggtgaaattgatgaccttgatgatgttattgctggacatggtgatttctatgccctggtagcttctcggggcactgctgcattcctgaaatctggctgtgagcatggaaaaattatcaacagacccaattttagtttatcaccagcagatctagatgatatccccaatcttgctcaaaatataacaaataaatttataaaggtggtatggacaaagggtggacgagacaaagctagtgacgaaactcggagtcatcttaagccgtgccttaactcgtgtaggatgacgaagccgaagccgaagcttgaagagtag

SEQ ID NO: 100421 - DNA, 1127 bp, Zea mays
  Clone ID: MRT4577_23098C.1
cattgggtacctcgaggccggccggagacgagcccctcaatcccccttttcttttctctttcaccggtcccgagctgcagcacaagaagcgattccagctgttgtcttgcatctcccttgtgctatctcaccccatgttcgcacaggaaactgaagaagaggggtcagggcacagacaacgcttcacgcagcagcccgcccgcggtcgcgcgtgcaaaaggagcgcccttgcgaagttagctagaagatggcgatttagtggaggcgaaaagctgcgatggggctgggtcgtcgatggagaagtgctggcagcgtgccctagctctgggatttatcttacaacaagttgagcggatcaatacctgattccctgccaactttgccttccctacgagttctaaatgtatctggcaaccagctgagtgacgaatccctatgtaaaaattatactggaccacttattttcagacgtgattttgatggctcagtatgcaacaaaccttcacccagcccgtcaagaaataaagtagctatcatagctatttcagtagtggttcctgtgttagtactaattgtactacttctacatatttcatctggtggcagaaaagaaagcctattgtgcaaccagtacccacacatggctcaacaagagatccagaacctgataatgcttcaggaataaaaaaaagttatggctacaacctgaatataactgagaatcggcagttcacatacaaagagctggagaagttcactaataatttcaagaagttcataggacaaggaggttttgggcccgtctactatggccgtttggaagatgacactgaggttgctgtcaagatgcgttctgaatcatcgtcacatgggcttgatgaatttttagctgagagcttgacaaaggtgcatcacaggaatctagtgtctttgattggttactgctgggaggaagatcatttggcgctggtttatgagtacatgcctcagggcagtctttttgatcatctgagaaggtaaaatggtggactgctatcgggtattggtttaaacgtaaccaggtactgcttgaatctgcacatggtttggattatctgcacaattgtttggatctgagaaactttttt

SEQ ID NO: 100422 - DNA, 1050 bp, Zea mays
  unsure (1)..(1050): unsure at all n locations
  Clone ID: MRT4577_23099C.1
gcccacggtgggtgaacctcggtcgaccggggcggcccattcaaccggacaccagctcctacgccgtgccctctcgcatcctgcagacagccgtcgccgcggcatcgaataacggcacggcggcggcgctcaccgccgtgacctggcagtacgaaaccaagtactcgttcatgatattcctgcacttcaccgacttccaggacacccagcttcgacagttcgatatcctcatcaacgagaacgaatcggggccgaagctcacggcgtacaacgacacaagctacctgactccaacccatgtgtacaccaaatcctacagggctgacgacggcaagtacaacgtcactcttgctgcaacaaaagcctccgtgctgcctccgatgatcaatgcgctggagatctacattcgtgtcccttatgagagtccgacgacactccctcaagactttgacgccatcgtggctatcaaaactgagtatggactcagcagaaactggatgggtgatccatgttttccaatcaaatatgcttgggacggtgtgaaatgcagcaacgcaagtggtaacacatcgaggataacatcactagacctctccaacagctctttgcatggcacaatttctaagaactttacactgctcacagcactcgagaatttggatttatcttacaacaagttgatcggatcaatacctgattccctgccaagtttgccttccctacgagttctaaatgtatctggcaaccagctgagtgacgaatccctatgtaaaaattatactggaccacttattttcagccgtgattttgatggctctgcatgcgacaaaccttcacccagcccgtcaagaaataaagtagctataatagctatttcagtagtggttcctgtgttagtactaattgtactactttttacatatttcatctggtgggtgaaaagaaagtctaatgtgcaaccagtacccacacatggcccaacaagagatccagaacctgataatgtttcangaagccaaaaaagttatggctataacatgaacaaaactg

SEQ ID NO: 100423 - DNA, 307 bp, Zea mays
  Clone ID: MRT4577_2309C.1
tcgccccacgcgtacggcactcatgttgcatcgatgaaaaaggtactttgttcatatttgggcagaaaactgataacggattgggacgagcgtacgaagaattcaaaccagatctcgatgaagagatacgattttcagaagaagtggcctgtggaggtatccatacttgtggtgttacagatatcggtgatcctcatgactggggatccattgcaagtggctgacctgtggttggaggggcggttcttgtccggtctacggcaactctgaccagaactctttgagaacattccgtatctcaagtttg

SEQ ID NO: 100424 - DNA, 339 bp, Zea mays
  Clone ID: MRT4577_230C.1
aaaaacaaaggacgctttcctggtcaactatttttacattaacccaggcttgtttttggcgccccccctgtcgctctcttaattattcaagaccacagagacagaaggggtgcttcattttgggtcaccgggcgggcgggggggagggatgcaagagcctttgcggaaggggcttttgccggggaacttcactggcggggggaagaggaccctgccaacgcgtcgaaaattttggcctggacccttcctgtcgggggggacccccaccgggtgaacgcccccctggggggggggggaccccaccccgccaagggggaaaacgcgacaaaaccgggccgg

SEQ ID NO: 100425 - DNA, 382 bp, Zea mays
  Clone ID: MRT4577_23100C.1
aaaaggcctttaaactgttctgaattacacgaccattttctttacaaactgcttaattcaagagcgcctctgcaacctatcaaaaccagcgccctccctatattacactgaacaagaactagggcccagtttttccaaacgaatcacggagggttacacttttgatgcacacgagtttattaggtgtggacgacgtatccacggctaagtcaccaagctcctcaaactggaacttgtcccccaaaacctcaggggccagtgatgggacaacatatgcatcctttatcacctatttcgagagagggttaaaatcgccaagccgatcttacaatttaaggggtttctttgacatgaacaatttatcgaataaggttacttccac

SEQ ID NO: 100426 - DNA, 251 bp, Zea mays
  Clone ID: MRT4577_23101C.1
tattttttttttttttttttttttttttttttcaggaaaaatatacgtccgggggcacaaaaacacaaggtcagacgccccaaagattattacaccggttccttccagcgaacgctactatccgatattgtgggttgggcaaaatgaactttacaccatgggtgatggctgttgtcatccggaacccatccagacggaatacatgctaaccattcaattgagctgggacctgagtttaagaaggttgccaa

SEQ ID NO: 100427 - DNA, 309 bp, Zea mays
  Clone ID: MRT4577_23102C.1
ttcttaagcagtggtaacaacgcagagtcttttttttttttttttttttttttttggtaaaaacctcataaggagaaccaaaaaaggaaggaaaaaaaaccaaacccagaaaaaaaaaaatactaaagggatatggaggcagggaaaagaataaaactgggggtggaaaaagaataagacgcggggaacgggaattttattgaagggcccccggacctttgggtggtaacaacggttaaggggggaattctggaaaaatgacagagagtgcgggcggttcgaggatgaattaaaagggccaaagtaacc

SEQ ID NO: 100428 - DNA, 1838 bp, Zea mays
  Clone ID: MRT4577_23103C.1
cctcgaggccggccgggactattttggttcccgatggaataacccaatgccgccgtagccgtctgcctcctcgctttccctttcgtccgtacgccgccgcctcgcaccgccgacagtcctcagtccagaactccagatcgagcctccctctccccagatcgggtcctaggctacagcagccgccgcatccgtcaccttcacaccgcgtgcgtgctctctctccccctccccctctccgtgcgacgactgggtgggctaccgccgccctacgcaaggtgccgagaacttcgccgatatctgcgccggagaagagcgcccaccagatcaggcgcttagaaggcgcgctggccggtggatgacgatggcgggtggcgggggactgaaccggtcttcatcgagggggcagctgccgccgcaagagctgcttgacgatctctgcagccggttccttctgaatgtgcccaaggaggagctggagtcgttcgagcggatcctgttcctgctggagcaggcgcactggttctatgaggacaactccgttgagcacaaccccaacctcaagtccctctccttcaaggacttcacttccctcatgttcaagagctgcactgctctccggccctacatcgcgcacctggatgatatctacaaggacttcaacaactacaagtttcgtgtgcctgtgtccggcgccatcatcctagacgacacttatgagaggtgcttgcttgttaaaggatggaaggctggggccagctggagctttcctcgtggaaagaggaataaagatgaggaagaccacacatgtgctgttagagaagttctagaggaaactgggtgtgatgtttctagactattaaatctggatgattacattgaagtttcaattggacaacaaagggttcggctctacatcataacaggggttaaaagagacactgtgtttgcacctcaaaccaagaaggaaattagtgaaatttcatggcacagaattgatgacctcttaccagctagtgatgatgcagtatctcgtgcagtgaatggaatgaagctgtacatggttgcgccatttttgacgggtcttaaggcttggattgccacacatcctccaccactgcatcagaaaccagagacatctgctagaggtactgtgtggagggcgaagggttcgtcgagcggcacaaccccagtggagaatcctgttgctaaagcaggatctgacgtgcagcacgctgccgaccgccctggttgcagcttcagaaacttcaggtttgacaccgcaagcatcctgcaggccatggaggcttccttcctacgcacctagaatcctgacgaagcatcaacacctgcacccttgatgtgtatagaccgcggaccagcgctatctgtgttgtcaatctgtctttgtttcgtctttctcgccttgtatctgtactcttcacagcaatcctgtcagacgcttgaacctgattttgctgctgccccgtttggtggtggttgtccataaagttctaacgatggtgctgcaaagtctggaaagggccgacttgcgatcttcgtgctgatggctcggatggggccaatccattgggccgctggagccactgcccgcgttgttctacaagagttagttatcctcgcggttgacacagaaaggataaaattgcaagttgtgtctcagtttggcactcgaagggagcttgtgtgggtgttgttgttttttttttgtcatggcagcgtcgtctctaactctaaaggataccgcagtttctccaggtattttgtttaatagcgttatgtacctactcagttgctgtgccatgatagtgtagcctctc

SEQ ID NO: 100429 - DNA, 362 bp, Zea mays
  Clone ID: MRT4577_23104C.1
cgttattccattcatcagtgttcatgtaaatcaattagcaaaaaagggaaagtttggttactaaatactgagcaagtctatgattaaaaagtgtgtttggttttagaaataagttagtccatcatattctcacttctcttttttttactttatggaatgaaatgagtcgaccatcactatttcattgctcttaggctaataattagtaataatatgagaaatatgtctattccaccaaattcatgaaattgactcgagatgcactaactcatctagaatagattgatccatcaaatcaaacatgttcaaaatggttaccttcgtaacctcaaagaagacttttccagtcctataaacatttt

SEQ ID NO: 100430 - DNA, 462 bp, Zea mays
  unsure (1)..(462): unsure at all n locations
  Clone ID: MRT4577_23105C.1
tttttttttnnnnnnnnnnnnnnnnnnnnnnnnnnnnnnnnnnnnnnacatatgttggtgatcaattgaaatcgtctctcttagatatatatatggaatacatattttggaacgagttaatcaataagctcgtgtttgtaatatatatagtaaagtagtacatagtaattaattattacctttagttctatgcatgcatacctaattaataagcatatactgtatatggtggtcactagtactgtactagctagctgctccgtttatatgtacagagagaaaaatggaagaatggtggtcaccagtacaagcaagcatatggtgcttcattccacgggcgaatattgttgacggccgccgtcaggtgtcacgtcacgtgaggtgaggtgagtgactatgcgaggcgaccgacggcagcacgttgtcggcggcgagctgcctgtctgtgccgcatgctcgtgc

SEQ ID NO: 100431 - DNA, 284 bp, Zea mays
  unsure (1)..(284): unsure at all n locations
  Clone ID: MRT4577_23106C.1
cccacacctcctaaaaaaaaaaaaaaaaaaaaaaaaaaaaaaaaaaaaaaaaagaaagacaaataatatatatgatacaaataaaaccacntgcccgccccttctaaagtatccaatattaccaccccattcttcccacaatatcacttttttatacgctcacttaatttcaataccctggccttacctttataaatactcttttaaaaaaaccctcttttaccccatcttaatatacttaaaagacatcctcttttcgccatttccaataatttcaaaaactt

SEQ ID NO: 100432 - DNA, 420 bp, Zea mays
  unsure (1)..(420): unsure at all n locations
  Clone ID: MRT4577_23107C.1
ctcctgcttccctcaccaatgacgccgctccccataccccttagccgccctttcccggcggccggcgccctatccttatctcctcgtttttcccgatcaatttctcttcctctcactctcggtctttctctcctccgctgctagtcctctcctcattgcgccttctttcctttccctctttttcttcttctctccacacttccacagtcgacgacaccctccatctccgtccctcccactccccccacggcggcgtcgctccctgtacccctcagccacggngccctcttcccagccgacggcgcccttcccctggtagcggcgccctacccttggcggccagtgcctccgccgctgcgccctgcccccggccggcggtgtctttcacctcgcgagcagcggtgcgcaacgggcccggga

SEQ ID NO: 100433 - DNA, 264 bp, Zea mays
  Clone ID: MRT4577_23108C.1
attgatgtcatggatcatcttttctcatgcaacatggcacaaggggcacactctagctcagactgtatttacatgtatctaccttatgagaatggaaagaacttcatcgcatgctatactaaatagcttttgcaggattttgcgtgctacttgtaatgctgtcatttctgctgtttctactgcccgaactcatgaggaagaggatctctttactatgtcctttggtctgcctttgagagatgaaggtgatcataagtgcctgtc

SEQ ID NO: 100434 - DNA, 245 bp, Zea mays
  Clone ID: MRT4577_23109C.1
cgacatccttgcaaatctactatataggatcccgtcgccgaattccaattccacattctcaagaaataaggaggcaaaaatggtcatatatgaattggaattatttgttctcttattaggcctatcctgaagccaacggggacgacatcggaatccatcggaggattccaatcgcccactttcaagacataacgaagccaacatgcccatatctgaataggaattacgtggtctagcacatcgcc

SEQ ID NO: 100435 - DNA, 453 bp, Zea mays
  Clone ID: MRT4577_2310C.1
ccggccgggatcacaacgatgtacggcgtatggtaggtgctccggtcgaccacctatcttcgtcacgccgatcccggcctcttgagatcctggattacgactcgtgccgtgtcttcacagctcattggctgttcctcctcgccttctccggtcggccgtcgagtcgagattctgggtggagtcgcttctgcttctgcacaccgacaccgccgtagcacgcatgacgtacatgcttgcctgttctgggcaacgcctcgacctggctcacccaagtgtgaaactgacggattataactgctcctgtgcgtgctttacgaaacaacacatcaattgtgcttcgagtacttgtgcgactgtacgaaacactaagagttgattggaaaaaaaaaaaatggaatgtgcatttcttatttgtcatgtgaactgatgatacgacttaatatactagatctt

SEQ ID NO: 100436 - DNA, 437 bp, Zea mays
  Clone ID: MRT4577_23110C.1
ctgtttttttttttttttttttttcttttttctatttattttttttttttattatgagcttatgtcctttccggtggacatccttgtaaatatcgtgggggcccccaattaggccaccccggatctctgatttatcgggaaggaatccgacaaaggcccggaggagcaaattggattggctcttaatatcgggccgggcattgacggagcgtaaatttaacaagggaacggagcggtttaaaacctccaaccggctgagtgtgtcaacacaccttggcccttgtaacgttacttactattagcgcgatgctccaacccggaccctttgttgcacctgtaagccccctacccgttgtttacatggggacatactcgcaacagctggtggtgctaccttacctagttcctaaagcaaacttgattggataaaattaact

SEQ ID NO: 100437 - DNA, 224 bp, Zea mays
  Clone ID: MRT4577_23111C.1
cgcagcattcctgctcctatcctagggcaccgcactgcatagccctgactacacaaccttacgtctgtctctggacagggctggtcctgcatgactatcgcgcatggtgcccactggattcattcaggaaggacagatgatgattggctcggggtcgtttcagatatcacctcctgcggaaaaaaaaaaactgctatcaagtgtagctaaaacataaaaacctg

SEQ ID NO: 100438 - DNA, 1207 bp, Zea mays
  Clone ID: MRT4577_23112C.1
aattcggcacgaggccgagtcttctataacagataaatccgaagtctctttgcatcaatccaagggaaagttttgtatgaagcgaacccgtgagtctgacagtgatggtgaatcagagcttgaagagaatgtcataagcgggaacaccagttcaagttcactagaatccactaaacatgaagacgctaggctagagccaacaacttttatttcatttgattgggagaatgaagcaccatatgaaaaagctgttgagaggttaattagtgaaggaaaattaagtgatgctcttgctgtgtctgatcgttgtttgcgcaatggagcatctgataatttgcttcagttgctcatcgaacagaaggaagaaaaaggtccaggcacaggacaaattcatccatatgtcgccaacagtcttgggaatgatacttctcagtactgcttgaggctgagagacaaaaaagttgcagctcagctcgctctaaagtacttgcacagctgggaccttgatgctgcaaccaatgttctaactatgtgcatgtgccacttacctgagaatgatcctatgcgcagtgaggtgttgcacatgaagcaatctttacagaggtatggccatatcatgagtgctgatgagcactacactagatggcaagaggtggaagctgattgtgaagatgacccagagggcttggcactccgtcttgctgccaaaggagctgtttccgctgctttggaggttgctgaaagtgcctctttatcaattgatttgcggagggagttgcaaggccgtcagcttgtcaaactgctaatcactgatccacttaatggcggaggcccagctgcagcttcaagatttctggcaactttaagggattccaatgatgctcttcctgtagccattggtgctatgaatttattacctgacctgcgttcaaagcagcttcttgtgcatttcttcctcaagcgtacagttgggaatctatcagatgctgagattgcacggcttaatttgtgggcattaggtctccgtgttctttccttattgccattgccatcacaacagcgttgttcttctctgcacgaacaccctcagttgatcgtagaagtactgttgatgatgaaacaactccagtctgcttctttgattttgaaagaattttcttccttgagggatgataagttaattattgcgtatgctaaaaaagcaatc

SEQ ID NO: 100439 - DNA, 563 bp, Zea mays
  Clone ID: MRT4577_23113C.1
ttttttttttttttttttttttttttttttttttttttttttttttttttttttttttttttttttttttttttttttttttttttttttttttttttttttttttttttggaaggtggaaaaggcttgaaaaaatccccatgttaattggggggggtttaaaccccccaaaaaaaaaaaagccctactacccttgcccaaaatttaaaaagggagaaaggggggaacttaaatcccgagggggaggggaaaaaaacaaaaaaaccgcctaaaaacccatgacccatttttgaaaaacccaagaaaaaatcctttttttccaaaaaacccggcccccccaaacaaaaaaaatgatttttaccaaacaaaaacaaataggtaaacctttacccccaaaaaactttaggaaaaaagcccaaggggacataaaaatttcctaaaaaaacccacccaagccttagggtaaacccaaacacccttggaaaggggtggggctaacaaaaaaataaacacccttttaacccccccacactttaaatttgggttttcgggccccggggggg

SEQ ID NO: 100440 - DNA, 867 bp, Zea mays
  Clone ID: MRT4577_23114C.1
cattgggtccctcgaggccggccgggaggaagaaaccccactcccactcgtttccctccacccacatggcgctccaggcgcaggcctccccgtcgccgtccacctcgccgacgcgcgagaggacggccagcggcgagtggcctgacgacgtggagaagctccccgccggcgcatctgcctcgccgccctactcctccgacgccgtcgagctcgtcgtcgtcgcctccacgcaccacgccgccgccgccaggtactcggaagccgtgaacgtgatcggtttcctgtactcggtgttccagttcgtcgcgctcgtcgagctcatgaggaggaacaagcatttgatcccccatcgcaagcgtggtctcttcgacttcaccatggaccaggtgctagcataccttctgatatcgtcgtcgtcgtccgcaaccgctcgagtgagcgacctgatcgacaactgggggagcgaccctttcccgacgatggcgaacggctccatcgccatatccttcatggcgttcgcggcgttcggcgtctgctccctcatctccgcgtacaacctgttccgccgagacatgtagccgccagccgctctcgtcaacctcttgttgcccatccattgtatttctggacacgagttttcggcgcagacttcacattgtgctgtacgtgtgtgtatatgtgtctgtgtgtgtgatgggaactctgcactgctagcaaataatatatatctacacggtgaagggcagctcacttgtgtggtgaacagaatgtgggaaaaaagttctagtggctctgaatcgaagtagttttgctgcatggcatcaagaccaaaggtaatcgattggtggcgtgcgatcacccggagac

SEQ ID NO: 100441 - DNA, 390 bp, Zea mays
  Clone ID: MRT4577_23115C.1
ttttttttttttttttttttttttttttttttgtttggttttttttttttttttttttttttttttttttttacacccgaaccttaaacaaaggctttgtttgcaaaaaaaatggcccgactgaaaaacaaagggcaacctttttgaccataaacgttttgggggccggttgcccccccctaatgggatattccccagtgttgggaaatctaagcccccatccaaaacaaatggggggaaaaaccccccccctacataaatttttaatttcttcgataggaaaggcaaaaacttccccagttcctgtttggaaaggcccggaaaccccccctgtttttgtccggcataatttttccccattaaaaccccgccggaaccgttcttttttcc

SEQ ID NO: 100442 - DNA, 292 bp, Zea mays
  Clone ID: MRT4577_23116C.1
gtttgcttaatttcatgtcctgcctaccttttcctaccggtatccaggcctcccccagcccggctcgggcgtcgcccatacatgaaccatccgtcctaggagcaatactacgtccagccggcgccaggcccggcggtggcggacgatgccacctgcctcgcgccggactaacggttacacccgaccgatgaggagctggtatcctactacctgaagcgcaaggtcctaagacggccgctcaaggctgatgccatcgccgatgtggaccttgacacgctcgagccctgggacc

SEQ ID NO: 100443 - DNA, 663 bp, Zea mays
  Clone ID: MRT4577_23117C.1
ccgcgctttctaaagctcccatttgccctgcctacttgggtcgtacgcaaccctcgccgagagcagcccccgtaaaatcttcctctgcatcctattcgctattgcgggtggcatcgccggtggcgttcgtgtgcttctcggtacggtgaaacctttattgccgttcctgccgcactttcctcatttcttgagactttggccgttggacggtggactctgcgggatccccaatctcctgctgagcttccgcacagagggcgggcatggctggaaggcataccatcattctcatgcaaccatcacagaacagatcgacgaggacatttatggactacgattcagttaaccactcgctggatggtacgatgattcacttcacgctttcctgccgtatgaccgccagtggataaaacagaagctgtttcagcacctgaagcggatggcgcagcagtagggtatccagcaccgctggcttttgacctgcatctggttaccggttcgggcttggattcaaatgcccgggatgtgtgtatagaaataagacctgtgtcccgtgtttgatgtagaacatgtggacatggtgttgcttctgaagacgattttggctcacaatgcagatttcatgtttgtcaaaaaaagaaaaaaaaaaataaaaaggcccta

SEQ ID NO: 100444 - DNA, 430 bp, Zea mays
  Clone ID: MRT4577_23118C.1
attcatggggcatattattggggtaatgggtgggggaaaatgttttattcctccgacccgccacttttaattagttgaaccggatcgggtacacgggctgtttgttgccgaaaaaaaggccaaagtttttttccgggggaaccccccccttttggtttttgttgaacatgggaaaaacaaaggtttccagggggccggtccttttgggcgtgcccgggcccacgggggcaaaaaatccctggttgtatttccccgcgttgtaaaccctggccccaaaacccccggccgggggccaaccgtttttggacacaaaaacccttgacgttgggggccccggcctttttgagcggggggaaaacggggtccaccatggggtaaaaaaggttgttgtaattgaggcccttgcccttgtccctaacgggggggcccg

SEQ ID NO: 100445 - DNA, 301 bp, Zea mays
  Clone ID: MRT4577_23119C.1
actttgcatggtttgattttgacctggtcccccacgtgtgaaatgtagtggcatccatttctaatgtatgcattcatccaacagagttatttattggctggagatggaaaatcacaccacctgacaggccttctgggcctccaaagcccatccttggggttccccctccctgtgtgaaatgtattgcacaccagcagacactgccgggcctccctcccgggggcactgcctgaaggcgagtgtgggcatagcattagctgcttcctcccctcctggcacccactgtggcctggcatcgcat

SEQ ID NO: 100446 - DNA, 375 bp, Zea mays
  Clone ID: MRT4577_2311C.1
gagctcactagtcggtggccgccctttttttattatatttttttttttttttttatgtttgtttttatgttttttttttttttttttttatagggaaccaaaagggggattgtgttttgccttggaagacgatcaaactacaaaattatattaggctaatgataaaccacacaggggacccatttttcgtatctgggaacttaaacaacaaagggtctggtattgagcttacttaaatgaaaatgcccaggggaaacaaggcgcgaagtgtgatggactagtaccctgtattttttcaaaattgagaatcctgggcattagacattatgttacttcccagtgacttggaaaaaaaaggggggggggacaaccaac

SEQ ID NO: 100447 - DNA, 936 bp, Zea mays
  Clone ID: MRT4577_23120C.1
ttcatgtgcttttcgctacggtgaaacctttattgccgttcctgccgcactttcctcattccttgagactttggccgttggacggtggactctgcgggatccccaacctcctgctgagctcccgcacagagggcgggcatggctggaaggcataccatcattctcatgcaaccatcacagaacagatcgacgaggacatttatggactacgattcagttaaccacgcgctggatggaatatgtggtctttacgaaaggaaaatcagaaacatcaacccgatggtcaggaacttgacttatgatatcggtgacctgtacaacttcatcgatggcctgaccgacataagtgcactggtgtacgacgattcacttcacgctttcctgccgtatgaccgccagtggataaaacagaagctgtttcagcacctgaagcggctggcgcagcagtagggtatcatcaccgctggcttttgacgtgcatgcgtcgtggggagaaccccctcacctaagccttaaggctttgtttgggtgctctagtattaacctcaattcatatgtattgaggtgaattaaggtgtacattagtttaatttacaactcagggcttgttcggttagctctcaatccatgtggattgagtggaattggataggttttaatcccaaacaagtcaaacttattctcaattttttctaatctcatccaatccatatgtattgggaataaccgaacaagccctcaatccatctcaacacatgtggattatggtcaatactagagcatccaaactagcctatggttcgggcttggatccaaatgcccaggatgtgtgtatagaaataagacctgtatcccgtgtttgatgtagaacatgtggtcatgctgcggcttgcttctgaagatgattggttgaacaatgcagatttcatgtttgtc

SEQ ID NO: 100448 - DNA, 322 bp, Zea mays
  unsure (1)..(322): unsure at all n locations
  Clone ID: MRT4577_23121C.1
ccccnngcgcaaggcagcaaacgcgccgcgcatcggaaggccccggggagcngcacgaggnggccccattgcggcanggcngcaacggccgccgccaatggcgtcgagtncccgctcattgtcgtttctgtggccacgcgggtcgggacggnccttagattggccgngatgcggcgccgccgccgnccctggccccaggcgcctctggnggaggggaaacccgcaccagaggcaggctgcgcggncggcgacggcgggacggacgncaacaacgncggcgcnggggaagcnggacccgcgccggcanacacccccggaaagg

SEQ ID NO: 100449 - DNA, 886 bp, Zea mays
  Clone ID: MRT4577_23122C.1
cggacgcgtgggtctcaccaaactttctaaagctcaccatttgccctgcctacttgggtcgtacgcaaccctcgccgagagcagcccccgtaaaatcttcctctgcatcctattcgctattgcgggtggcatcgccggtggcgttcgtgtgcttctcggtacggtgaaacctttattgccgttcctgccgcactttcctcatttcttgagactttggccgttggacggtggactctgcgggatccccaatctcctgctgagcttccgcacagagggcgggcatggctggaaggcataccatcattctcatgcaaccatcacagaacagatcgacgaggacatttatggactacgattcagttaaccactcgctggatggaatatgtggtctttacgaaaggaaaatcaggaacataaacccaatggtcaggaacttgacttatgatatcggtgacctgtacaacttcatcgatggcctgaccgacataagtgcactggtgtacgatgattcacttcacgctttcctgccgtatgaccgccagtggataaaacagaagctgtttcagcacctgaagcggatggcgcagcagtagggtatccagcaccgctggcttttgacctgcatctggttaccggttcgggcttggattcaaatgcccgggatgtgtgtatagaaataagacctgtgtcccgtgtttgatgtagaacatgtggacatggtgttgcttctgaagacgattttggctcaacaatgcagatttcatgtttgtcatctctctctctctctctctctctccctccctcaaatatatggagatgaattggaaaacggagatgaattggaaaacggaagccaatccgttgggtggtagccggcccgatttct

SEQ ID NO: 100450 - DNA, 197 bp, Zea mays
  Clone ID: MRT4577_23123C.1
ggactaggtactgattctcaagccatcaaagcaaatgatcttgtgtttgttcgctggagttattgagctgaatcccgaggccaggaagtttatctctgaaaatgttgaggagcattctgagcaggttatgagatacatgggcgaatcacgatagctagtggtgctactatcatcgtgtgagcacgacagtggctgtc

SEQ ID NO: 100451 - DNA, 530 bp, Zea mays
  Clone ID: MRT4577_23124C.1
actatcatggccgagaagttcggcgtcccgcccccgccgccgttcctgtcgctgaggatgacaggcaaggacgtgctcggcggcgtcaacttcgcctccggcggcgccggcatcctgaacgagacgggcgtctacttcgttcagtacctctcgttcgacgagcagatatcgtgcttcgagatcgtcaagagggcgatgatcgccaagatcggcaaggacgccgcggaggccgctgctaatgcggccttgttccagattggactcggtgagagggcggccatggagcaacgactacatcaacaacttcctgcagccattcatggcggacggcaccacgtacacgcacgaccagttcatccgcctcctcatcaccgccctagaccggcagctcaagcggctgtacgggctcggcgcgcggaaggtggcgttcaacgggctgcccccgctgggctgcatcccgtcgcagcgcgtccgctccacggacggcaagtgcctgtcccacgtcaacgactacgccgtgcagttcaacg

SEQ ID NO: 100452 - DNA, 331 bp, Zea mays
  unsure (1)..(331): unsure at all n locations
  Clone ID: MRT4577_23125C.1
aggcttgcgtgacgtttcatatgtgtccacatatatatagacgacgcgtgtgtgcaacgcacatggaccctctctttatgtactcagttactccatgggacacagccgcacgggcaggaacacttgatactctaggacttaattggaccgacggtgacaacgaccgatcagcaggaccctttgattatctcagctaggacggcgcgctgcttctccgatagctccgtggggaagacgaacaccagttttaggctgaggtcgacgcgcgcgccgaacttctacacggggaccggnatgccctcgccgcggatcaccctctcaagcccggggc

SEQ ID NO: 100453 - DNA, 237 bp, Zea mays
  Clone ID: MRT4577_23126C.1
cccaggcatccgcccactcatcctcgggtttgcgttccacccaccccctcgcgtctcgaggtaggtttctaatcctcgagggccgccccacacaaaccgagctcccacccgcttctctttccgccatccaagaggccccacccctgataccacgcttacggcactgaattaggagattaaccatcgccaagcgaacttacggcggcacttcttgcaaacgctcttgacgcccatcta

SEQ ID NO: 100454 - DNA, 260 bp, Zea mays
  Clone ID: MRT4577_23127C.1
tggccgcgacagacgcgtccgccaatccatccttctttcgcagaaacacctttttcgtctgcccctccttaccgactagacaaggggttctattacgcacaaggaggacatcaccacagaaagatggtctatctggtggatcactagaactcttacctgtgcaagatgacgctcatacacaacaacgtgaacctcaagtccaatatactgtctttcttcacacccaatcacatattcctatacttcaaaaccatcaacgg

SEQ ID NO: 100455 - DNA, 888 bp, Zea mays
  unsure (1)..(888): unsure at all n locations
  Clone ID: MRT4577_23128C.1
aaagcagtaaagacactgagcagtgagaaggccaggagggagagccaacgcctggcaaatgcagtgcaatggcccccacccgccgtggccggcctagctagcttggagccttggcagagcagcagccagcagcctgcccagcacaaacccagcagggaaggaaaggagaagagagaaggagaggtcgaggcgagcaatggaggtcgtcgcgtcctccgaccaatatcgctcgtcctcctcttccgccagcagccccgcgcgccgttactacctgcccaagcccggcgcgctccgccgccccatctccttcgaggactcccccgactgggacgacatccaccccgacgacaccatccacctcgccaccgccgcctctgcctccatttccattgcgagcagcgcctacccctcgccttcgccctccctgccccaagggtcctcctccgcctctgctgcatgccgcgaccggaaggtggccggagttaccctcgtctggaaggacctcactgtctcctcactcgccgcagccacaaaccgcttctccgaccgcctcgtcaagagctccaacggctacgcgctgccggccactctcaccgtcatcatgggccccgcgcgctccggcaaatccaccctgctccgagcaattgcagggaggctcagctctactgagaggatatatgggcgaagtctttgtcaacggcgccaagtctcccttaccatatggatcataatggttatgttgaccgagacgatgtgctcattgaatccctcacagtacgagagatgctatacttctccgcgctcctgcagcttcctggtttcctatcttcgaaaaagcaatttgtggnagatgctattgcagccatgtcattaggtgaccatgctgac

SEQ ID NO: 100456 - DNA, 346 bp, Zea mays
  Clone ID: MRT4577_23129C.1
acccaggcgtccggtcagctcacttttgaatagtagacttccacattctttttatggagctatcattgccgtctttagatgggtttactcagaatgtggacgcgctgctctttaccgaggtgtacgtacaacactcatgcggatacttacttatgctggtcttaagcactacatatatgaaaggctgaaggtacatgtaccacaagattacacatgctatgtaacatccaagctcacatacaacgctgactgtaggattatttgaacagactctgacatattcattatacgttgtcaggaggcaaatgcaagttcaaaatcagcaacaacatgagcaattaggtgc

SEQ ID NO: 100457 - DNA, 371 bp, Zea mays
  unsure (1)..(371): unsure at all n locations
  Clone ID: MRT4577_2312C.1
ctctcttgtgcgaacacgcgtacggcggacagcttgcggcgagtggggatgctgctcgactagctcagcagcaacgccgctagataccgacccacgggacgcacacacactgatatggtggaggggatcgagatgagcgtcagaggtatccacgtggggcactatctactggcgagcctgctgccgcacgacatgcataagttcgtctaccggcatcaccaggtntggatggtagggctcatcacgggaaacaccaacacgctggacaggaacatgccggccatggacggcctggaggacacccgccgcctctcggcgggggtgcacgagcagaacggctctggcaacatcgacggctcctagagcttaga

SEQ ID NO: 100458 - DNA, 445 bp, Zea mays
  Clone ID: MRT4577_23130C.1
acgcctgcgacaagcacacttctactgagagcgtattggataggtctttctggtgaggaggcgaactctggtgaacggctgaaacgtgtgacgtcgcaccgctcggatcacaaccttggttataggacatagaaactggggcgcgtattccgacgttgggtatacttgacggactttacaacattatcctcaacgtatcatttatgtggaggtcaaagatattatgcgcaacgcgtgtatgtgacgttctatttgtcccctacgtgcagggctacatatgtgtatcgaaatcatgataaattggatcttatccacgaagatggtgattggtacattcttctaggcagtgatgggttgattgatgaattcaccaataatgaaaatgttctcgtggtttatcaatttatgcacgataatccaatgggggatcctgctgaatatttta

SEQ ID NO: 100459 - DNA, 384 bp, Zea mays
  Clone ID: MRT4577_23131C.1
aaaacccggccaaaaagacccccgtggaacagggggagaagccaaaagtttgttaagccttacggctctcggtgggcatattcaccattcaaaaacaaagttggttcaggggaaagccttacggctctcagtgggcaaaacccccattaaaaaacaaggttttttcagcagctggttcccacaaatatcccccccttccggggtccaggaaatcgggccgcaatttatcaattcggggagcccatttagacgtggccctccaaaaaaaaacgggttttcctggggaactgggggaacctcccttacgggggaacacccgtttcttcggaggggttcccaaattggcggccccttttggtagagggcgggacaggcttgggaccc

SEQ ID NO: 100460 - DNA, 216 bp, Zea mays
  unsure (1)..(216): unsure at all n locations
  Clone ID: MRT4577_23132C.1
aaagaaggngnggaganggaacanaaaangnnagaagaaanaaaaggaaangagaaaaagacggagaannnaaangancggngcaaccaaanggngcagcaggccaacgnacngacaaaggggggccngnggnacaagcaaangcnngagaaaagacgnncngagcnncaaaaggcngaancngaggnngacgnnnnaggaggcaaggncaangca

SEQ ID NO: 100461 - DNA, 591 bp, Zea mays
  Clone ID: MRT4577_23133C.1
cattgggtacctcgaggccggccgggaacatcttccttctgactgctgaacctcgtttaccagagctccccagctgtctgcgtgcgggagctgcgcagcttcgtagactgccaaacgcggagcagaaaggggtcggtcccagatgcccagagagcatgtcaggatgaacacgatgttgatcaacagcaagccctgctacgacgtatcccggaagacgtcgctagatctcgggaagcctcggcaccgagaaaggacgatccactgcatgttcgaaggcagggaaggccgccgacgatctcgccgtatgacgcgcccggaatgccttccactaaggggcctgatcgatgatgactacatacatgtcttcacggatcacgctgaagtctacggccaatacttgcaggaaggttgtgctgctgacattgctagatatgcaagacggacacaaggtggtagccgaggcaaattgacgagatatgcagagacgctcgctatgtgcttatacccaaaccgcacttgtcccaaatgatctcaaaatactatgctgctgccgggaagcgtaatgagtcgtcgtgttagagacacaacata

SEQ ID NO: 100462 - DNA, 1268 bp, Zea mays
  Clone ID: MRT4577_23134C.1
accgtcttataggtaacttggatgacaaggttcctgagagggttctgtatgaaattcttattcaggtaggtcgtgttgtagacctacacatacctcgtgacaaggaaactagccgaccaaaaggctatgcttttgctgagtatgaaacagaggagattgcccaatatgctgttaagctattttctggtcttgttcgacttcataataaaacgcttagatttgcgatctctgggcaagacaaaccctcattaaatggcaatatccctgtaactcctaggttaaactctgtaccacagccaaagcctcatcaacctatgaggtctagtgatactcctttgccacagcatgcagcagtgaatggcaggaatgccgggtatggtatcccaccaaatcattcatacgacacgcacactcaaggtgaggaaaactctggtcattttggaatccaagttaatgttgaattatgtgttaagtctcacaactccccttttgaccagcactgtcgagtgggttaccgaatagaggactaagcaacggtacatatgaatatagtaggcgtgtatttggttctgttctgaatgatgttagccgtcgagaccacagggaagccaggccaatcccgtacccgtcctactagcatgttgagccccggtgactgactctgtgctgacagaaaatatttctgaagatgttctctgttgtgtcagccacctgtaatatctctgtactcaccatttcatgcctgtaaatatgggttatggtggtaggacatatgcttgttttttttggttctgcttcgcattgtagtgagacttgtccctgcttgttaggtccttctcatcccctagtgtgaaggccatgccttcactagtatggctgcactaggaaataccattcctagttacatgaatgggtggcaatatgctggcaattgtgttttaacattagtgccattagctatttcaatgttacagcagggcgtgtttgtgtttgcgatattagtatttggtggattttgtgcttctcatcatgtatctgggacatctgaaggagaaacattgttttaaaagaaaattgtgaaataagtccaaaaaaaaaaaaaaaaaagcggccaattgtgttttaccattagtgccattagctgtttcaatgttacagcagggagtgtttgtgttagcgatattagtatttggtgtattttgagcttcacaacatgtatctgggacatctgaaggagaaacattgttttaaaagtttatccctagttt

SEQ ID NO: 100463 - DNA, 1283 bp, Zea mays
  Clone ID: MRT4577_23135C.1
ctaacttaaacttcatacgcaaactaagcgtcttatttgacgattataaaatcaataataaaaatagtgatttggctcaccattattaacttgattcaatatttgcaagaatggcgacagtcttcgattgaagtcttcgatcaaacagctgacgagtatagaacgaagcttcaccttttcttctatccacaattcttggaatctctccatattaactagaactccgcataaacggtgatgattcttgttctggcctttcgccgagcacttggtaaatatcacgcggctagctccgtcttcacccgactcttgggatttcttgattacgcatggaacgacgacgagaccgataacgcacacgtgtgatgagacatggtctatgaagatgtgcataagggaagatgagcttgtggtgccgagagtcgacgacgaacagaacacggaccagggggtttgcttgggagtcaagcaaggaatgacgggttcgacgactcgacggcaaacgcgaacacgccaaaacccgatggatgaggagtgagcgcacgcgggacgagcagcacggatttgaagagtggagaaattgtccacggcgaaataagaagagcaaagagcgctcatgaacattatggcggaatctgcggcagccgatgccagagcgcacggtaatggagcttcgcagttcgacgagaccgtggccgagcgaactctgtggcgcggactgcttcgcggccaagacagctgtcgcgatgcgcacgatgtcgccacgtcacaacaccaccacggccaagctcgcgccggccgtcgctgaaccacgagagcagggcgaggtgctggaatttgaggtcgagcgaaccgagatgactgaacaagtgctgacgagctgaaagaccacgacgcgagcagggaaccggccatggagcttggggagctgtgcgcagaggcgaacagagagatgggcgcggcggcgagcacaggcgagcaacagagaagaagacacgcgaggaagccgcttggctgggcgctggagctggaagccgagcgaagctctaggctggggcgagcagcagacaggctgaaggagggagctgacgcggtgcgcgtggagaccagagagcgaccgagcactagggaagaagaaaaggagcgcgccgtagtgaccagccgcagcgctgaatccaggaagagcgcgcgtaggaaatggaggttgcggcagctccaagaagaatccagagaaggcttcgggatgacgcttgggcggcaggaaaaatcaagggcgcgtcccg

SEQ ID NO: 100464 - DNA, 598 bp, Zea mays
  Clone ID: MRT4577_23136C.1
cgttgctgtcggcctagtaaacatggctgaaacagtttcaagacaagccaacacacatctcgctagtttacaacagactgaggcgaaatagactcaagaggcctatgcagtgtgggggcgcatgtaagcggcttggagtctgtaagggcagagtcaaagccctgatcaaatttgcaggaaaactttcctagctgtcattgtgcatcatcaactacctaaattatgggagtgccaactgaatgtagcatatcagtaattcattgagtcaaataagagcgtccaatttgaattagtaataagtcagagtgacttcaataaggtaatttccttgtgaacgtgcatatagtctcttaagatcatacctacaggcatgactgaatcttgtggacgtgatggctggtggggacagaacccccggaaacgaacacggcctcagaacagcacaaaaaggcatttatcacagcaacaaccgtcacacgccatagtacttgagaggcaccgaaaagagacataaagccacaccaattgcacaataatccgcccacagcacttagcaaagctaacattaataccaagaggatgccttgaattatttacc

SEQ ID NO: 100465 - DNA, 445 bp, Zea mays
  Clone ID: MRT4577_23137C.1
cccacaaaaaaaacttacaaaagccctcccccatcagataccccgaaccacccccccaggacccgggcccctaagaaacaaacccttgacccccaaacctagattccaaccccccccgtggcccccccctccccaaagtttgggcccccattcccccatggccccctcctaccacatttccacccttttgcccaaccccctatttcttggacccccattttatttcccggaaccccccaggcgaactgcccttccccaaaccccccaggtcccacccccccaaacccagggctaccccgaaatccaaaaggacctcccttcaggccttttggcgccccccctcggcccaaggaccgtaaacccccccttctccatgggggccgggatccgctcccgtttggccttctcgggcaggcggaacccgcccaggaaccccccgctgttc

SEQ ID NO: 100466 - DNA, 1632 bp, Zea mays
  Clone ID: MRT4577_23138C.1
cagcaatgacggcgactacgagcacacgtccgcagccgcagccgcagccgcagccggcggcggtggcggaggcaggggcggcggccgccgcctctgggtcaaggagcgcgaccacgagtggtgggaccggatgagcagccccgcgtgccccgaggacgagttccgccgcgccttccgcatgtcccgggccaccttcgaggccgtgtgcgaggagctgggcgccgccgtcgccaaggaggacaccatgctgcgcgccgccatccccgtccgccagcgcgtggccgtctgcatctggcgcctcgccaccggggagccgctccgcctcgtgtccaagcgcttcggcctcggcatctccacctgccacaagctcgtcctcgaggtctgcgccgccatcaaggccgtgctcatgcccaaggccgtgcagtggcccgaggcgcccgacgccgccgcggccgagtccgccaggttcgaggccgcgtcggggatcccgggcgtcgtgggcgccatgtacaccacgcacatccccatcatcgcgcccaaggccaacgtcgccgcctactacaaccgccgccacacggagcgcaaccaggtcctactccatcacggtgcagggcgtcgtggacgcgggcggtgccttcacggacgtctgcatcggctggccgggctccatgtccgacgccgacgtgctcgaccgctccgcgctctacctgcagcgaggcgccgcgggcctgctgcaggggcagcgcctggtgggcggcgccgggtacccgctcatggactggctgctggtgccctacacgcaccacaacatgacgtgggcgcagcacgtgttcaacgagcgggtggacggcgtgcgcgccgtggccagggacgccttccagcgcctcaagtcccgctggggctgcctccagaagcgcaccgaggtgaagctgcaggacctccccgtcgtgctcggcgcctgctgcgtcctccacaacatctgcgagcgcgccggagacgccgtcgaccccgacatcgcgttccagctcttcgacgacgacatggtggccgagaaccccgtgcgctccacggcggccgtcgccgcgcgcgacagcatcgcccacaacctcctccaccgcagccgcggcagcagcagcagcgccgccgccggccccaggttcgccttcaattgaactctgacggcgggggcaaggaaaagcagctcgctttctcggcggaatcagagaagacgacgccacgagggcagctcagcaatctttcaccgtttttttcgcttgaatgaaattgtaataagttgggaacatagcaacgggggttgatagcgaaacatacatagggttcaaagatacagtaggtgattggttgataggatttgagattgttctgcattttttttttgtagagtcaaaggttcaatcatcatttttcagatttggtgagaccgcgtagcctgtgtagtcaatactgtgcaggctattttgccaccagactttgcaatcaatcggtttttagctaaaacagaagttgatttcgcctctccaaaaatccgtcaccttcctcttttttatgctttgctagtacagtagtacataattgggctggaacaagaaagaaataggctaaaaaaaacaa

SEQ ID NO: 100467 - DNA, 637 bp, Zea mays
  unsure (1)..(637): unsure at all n locations
  Clone ID: MRT4577_23139C.1
atggccgccacgcccctccctatcacctccccacctccaccacccacgccacccctaccgcagccacccaccgccgccactatccgctctctcactgccgcaggcaaccatgccgctgctctccacgcgctatcatccttgtcggcggcgtcctcctcccatgccccgctcgaccacttcgcgctcccgcccgccgccaagtccgccgccgcgcttcgctccctcatagccgtccggtccattcacggcgctgcgctgcgccgcgatctcctccatgggttcaccccggccgtcgccaacgcgctcctcaccgcctacgcgcgatgcggcgacctcaccgccgcgctcgcgctcttcaatgccatgcccagccgcgacgccgtcacctttaactccctcatcgccgcgctctgcctcttccgccgctggctcccggcactggacgcgctccgcgacatgctcctggagggccacccgctcagctcattcacgcttgtgagcgtcctgctcgcgtgctcccacctcgctgaggacctgcgcctcggccgtgaggcgcacgcgttcgctctcaagaacgggttcctggacggcgacgaacggctcgcgtttaacgcgctgctctncatgtacgcgcgcc

SEQ ID NO: 100468 - DNA, 726 bp, Zea mays
  Clone ID: MRT4577_2313C.1
ccggccgggattctcaaccgccaagtgacgaagtaaccagcagtcgcccattcttcaaaatgcctcccaagaagaccgccacccgtgctccccaggagaacatctccctcggaccttccgttcgcgatggcgagctggtcttcggcgttgcccgtatcttcgcctccttcaacgataccttcgtccacgtcaccgatctgagtggccgtgagactatcacccgtgttactggtggtatgaaggtcaaggccgaccgtgacgagtcctccccctacgctgccatgttggctgcccaggacgtcgctgcccgctgcaaggagcttggcatcaacgctcttcacatcaagatccgtgccactggtggtaacggtaccaagacccccggtcccggtgcccagtccgctctccgtgcccttgcccgtgctggtatgaagattggccgaattgaggacgttacccctactccttccgactctacccgcagaaagggtggtcgccgtggtcgtcgtctctgagctgcttaccttttggtggcttggattggacaggagtttcgctatctggtttctctgtggcgttgagaatcacgaggagaacggctttttcgcctggtctccagtctacactgcagagcctggtcaggttatgggttaggacgcagtagacagttgaaaattcgcccgaagaggcctatgaatcatcctgctcgacaaaaaacccgcggcc

SEQ ID NO: 100469 - DNA, 182 bp, Zea mays
  unsure (1)..(182): unsure at all n locations
  Clone ID: MRT4577_23140C.1
cagctagacattgacacatatcgagacagctctagctagcgcgtcgactttcgcaaggcctattaaagccgcgcagcagcacgaccccacggccccgncccgagacgagccggggagacgggcaaccccacggagagcgaccgccacgcagagggagccccagcagcgagagggggaacacg

SEQ ID NO: 100470 - DNA, 327 bp, Zea mays
  Clone ID: MRT4577_23141C.1
gttaatacctgcaagccgagaccccgaggtcgggggacatggacgagccgctccccatcggagaccgaccggacaacaacacgcaagggcgcgagcacagaagagagccagaccaagagaccggccaataatggatcgcgataagacgcgctaaacggaccgaacggaagagatggagccgggctggaaccgaaccacaagcaaccgggacaggcacgacaaaaatgtcacagctaaaggaggcgcaacccacactgcggcccaccggtgccgcccaggtgcaacgcatgaaggccgggagcgacaccgaccgcgacggctgaatcg

SEQ ID NO: 100471 - DNA, 601 bp, Zea mays
  unsure (1)..(601): unsure at all n locations
  Clone ID: MRT4577_23142C.1
cccttttcgagtttttttttttttttttttttttttttttttttttttttttttttttttttttttttttttttttttttttttttnnnnntnnnnnnctttttttttttcccttccgtttggccttttttccgggggggttttttttcccgccccttcctgtcngggggtcccccccccaaataaaggggggcccttcttttttttcccagtttccaacaccatcaagacatacatccctttggggaggacacagaaataatttgtttttcccagtttacaaaaactttaaaacctttgctaaaacccaggaatcatttgggcgggtgaatttggcggccaaaaacccatccatccttaaagaggcttgccatgatttccacaaaagccccatgctggggggtcaactaattttttattgaacaaccccgttttggaactgttgtttccatacataaaaggggtccacctcaacctacaatgccaccccattttttaaacaaacactgttttacttttgcagccttgaaatagctttgtaaaaccaaaccccctcaataaattaaaaacaacgtgtcttttgctttttttaaagcctttt

SEQ ID NO: 100472 - DNA, 469 bp, Zea mays
  Clone ID: MRT4577_23143C.1
attttacaagacccaagggcactagcagaagttgctcctcgactcttcctcctcggacgccgcgtcagatctctgcgagcgatgtagcgatgattgcactctcctaggctccccctgggaacccgaaggcggacgagaagatcttcaagaccaagtgcgcgcagtgccacacagtatacaagggctccggccaccagcaaggaacaaacttgaatgcactttttgggaggcagtcgagtaccaccggaggctactcctattctgcgggaaacaaaacaaagctggggtctggagaggagaacactctgtatgactacctggtttaccctaagaagtactttcctggaaccaaaatggccttccctgggctgaaaaatccagaagaacgggctgatctcattgcgtaactgaatggaggaactgcagaacatgatggaccggcctcttgcatgaagaaaaaattcggttt

SEQ ID NO: 100473 - DNA, 356 bp, Zea mays
  Clone ID: MRT4577_23144C.1
acagttctagatcgcgagcggccaccttttttttttttatattttttttttttatgggtttttgggaattttttttttatatttttatttactatattattttatttatattttttgaatttatttgatttttaatacttacaattttaatgttctctaagtgttaacaacgactaaaaatgataattacttaaaccaatcataagaatctgatagacataatcaaaagttcattaaataagattttgatatatacacaatcgctataaattaagacttgagaatatagctagattatgatcatcagatacaagactcagctagcaccatatttaaagctgaatacccagtttttc

SEQ ID NO: 100474 - DNA, 220 bp, Zea mays
  Clone ID: MRT4577_23145C.1
ttctgacacctgtcgtccagaccctaggagttcctaacgcataggcgttgttcatttggctctgcggcccaatctctgggctgcttgagcagcccattgtatggtacagcatcgaccgatgccgattccgctttggtcggcgacgtgccttgatctttgtttgaaccatactcgtaacaactgttgcgttcctgaacggctatgcagcctatttaggaca

SEQ ID NO: 100475 - DNA, 252 bp, Zea mays
  unsure (1)..(252): unsure at all n locations
  Clone ID: MRT4577_23146C.1
cgccgccctttttttttttttttttttttttttttttttttttttttttttttttttnttttcnnnnnttnaaacaatgaacattttcttataaatagggagggacattttcaaggtaaagccatcaattacagatgtttgtcttattagataagtacacaggttgtttaaaagaagatggtttatttacaggtggatttcaaatatttccccctaagagctttcttggtcaaagaacatcccagtttttct

SEQ ID NO: 100476 - DNA, 374 bp, Zea mays
  unsure (1)..(374): unsure at all n locations
  Clone ID: MRT4577_23147C.1
ctaataaagggaaaacatgatctctgaataattgtgacatgccatattacaagctaggggaaacaagccagaccatgccatacaactgcatgtcaccaagagggctacacaagcgcataccatgtacgttctcggcgctctataacctaggctgatatnactgaacatactttaagcttactaccagagcgggtatagctgcaactaacagaggaggtgatacatgcatacttgccaagaccactggcgccgggagattcagatcttagaacaacaccatgccaacggcaccaacaacgccaagaaccaggccaatacttgccttcaaccaagccgcggcgttgaatgcccatacccggacattgttaatcacc

SEQ ID NO: 100477 - DNA, 534 bp, Zea mays
  Clone ID: MRT4577_23148C.1
cgagcgcctgttcgcgtgggccgcggacgcccgcctgccgggccgcgtcacggcgtccgtgtgcgacgtgtcggcgcggggcgaccgggaggcgctggtggcggcggcgcgggcggagctggggcccaggctggacatcctcgtcaacaacgccgggcagagcatgttccgcgcggccacggagatggcggccggcgactacgcgcgcctcatggccaccaacctcgagtcctgcttccacctcgcgcagctggcgcacccgctgctcctcgccgcgggcgcgggcgcgggcgccgcggtggtgaacgtgtcctccatcgcggggctcgtcgcgtacccggcgctggcggcgtactcggcgaccaagggcgggctgaaccagctcacgcgcagcctggccgccgagtgggccggcgacggcgtgcgcgtcaactgcgtcgcgccgggcggcgtccagacggacatgttcagcaacggtcgcgcttgagatggacccggagacgtttttgaggatgatggaagcggaacttgccc

SEQ ID NO: 100478 - DNA, 717 bp, Zea mays
  Clone ID: MRT4577_23149C.1
aattcggcacgagggccaatgaacgtgcacatgcagcagcagcaccacctccgtcagctccgagccgtcctcctccgccgcggccaccccgtccccccaccgccggcgacccacccggaccctgaccgggccttcctcgccgccatccgtgccgccgcctcctctgccccacgcctcgtgctcgccgcctgcgcctgcctccgccgcgccggcctgcccgcaccggggccccgagcgcttccggccctgctccgctccgctgcgcgctgcgagggtgctggcgcgtacgtcgcggccacgcacgcgctggccgtcaggacaggggcactggacgatgggtttgtcggaaccgcgctggccggggcgtacgcggcgtgcgggtgcgtgagggacacgcggaaagtgtttgacggaatggccgtgagggacgtcgtctcctggggcgtcatgcttgatagttattgtcagactcggaactataaagaagctttgcttctgtttgctaagatgaagaattctggagttgttccagaccaattgatccttgctactgttctaccagcttgtggtcatataaggcatttgagaatcgggaaagccattcactcgtacatgttggtgtcggacatgattatcggcgctcacattagtagtgctctcatcagtttgtatgctagttgtgcgaacatggagatggcagaaaagctatataacgaa

SEQ ID NO: 100479 - DNA, 1529 bp, Zea mays
  Clone ID: MRT4577_2314C.1
caaactaaatgccgctgagattgaaaacagaagactgaaggtcgacctaaatggtgatttcacaatgttagggtcattgcagactgaagtcagtgccctggaggagcaaaccttatctctcgctaacgaccacttgcatacaaataagctcaggatggaggaaaatgcattatctccacaccttgtgaagaccacaacaagatccagtggcgaagaaaatgcattgaggatggtgaaggggatggagctgcaaaaattgcatggaacaatcaaagcccttcagaaggtggtcacagatactggtgtcctccttgaacaagagaggcttgatttcaatgccaatttaaaagaagcaaagaagcagatcgaggtgctaaagctcaaggagatcttggatgatgatataattgaaatgaactacgagcaaatgttaaaagacatacagcttgacctcattcaaacttcttcaggccagaaaaccagtccgtttggtcaggaaaagaaaaatgtagcacaagtagatgacaagatggtaaactcacgcggttctattgggccgagccatggacatgtggctgacgacctaagaccgccgcaaagtgagtcatttgggagagagaacaatttaatggtcgtgaaagagctcagcattgacaagcaagagttaccgaggtcgcttgctatggagccacacgaggagtggagaaacaaggtcgtagaaaggttggcttctgatgcccagagactcagtgccctccagtccagcatccaagaacttaaaacgaacgccgaaacatccgaagaggtagaactcgggagtgtcaggtaccaaataacagaagctgagggtaccatcatgcagctgatcgataccaacagtaagctatccaagaaggccgaggagttcacgtctcccgatggccccgatgcggagaacagtgacttgaggagcaggcatcagcgtaagatcttggagcgtgcaaggaagatgtccgagaagatcgggaggctggaggtggaaatgcagaaggtccagcaggctctgctcaaatacgaggaggagcagagtaccaggagtacctcaaaagccctgcagcggcggtccaaagtgcagctcgtggagtatctctacggccggcggcgggacagtcgcaaacagcagcggaactcgccttgtggttgcatgagagcgaaaaccatcgacgactaacgacgtgcctttcatgccgcttccttttttttaaggcgtaatggaaggccaatcttgtcagcttcagaatgtatcaggtcttatgtttatttcatgttcaatgtagataaatgagtggctgtataagggctgtaaattgtagccatgtacaataaccctctgttattaatgaccaattggcttgtaaaattattgcttaacagttgctgctaaaaaaaaaaaaaaaaaaaaatgttccataggaggtttgcactcgaaagagtatatttctttccataaatagccaggagaggacattgaattgaattggaaattggaa

SEQ ID NO: 100480 - DNA, 558 bp, Zea mays
  Clone ID: MRT4577_23150C.1
atcttcttcactatcgaagctagccggagagcgctgcatggctacctctgccatatgacgcagatgcctgtccagccctctcatgtcggtatcctcttccaggagccccatcgtgcgctcgcaaagccgaggctcacttcggcgaatttttagccaagctccgcgtgatcgaccgctaccttcaaatgactccttgctgcatctcgcaaagtatcccgctcagagtggtccgcactgactgcagcatagaacctggacatagaaatacctggtgtaaggattaataaagctgcgacagtcttcgcagctcatgccgaccggatacaccctagaagtgcactttgaaggcatcgaatttctggggatacaactatctcacggttcctgaaaggaagcttgcaggccgaaagagaatgcatgacaccgctctgcgaaaggccttactgcgttatctacatatactgaatgaggctcatactcctggctgatgagcagtccgtgatgcagagagtttagaccgccagataacattgcttgcatgggcctattataagacac

SEQ ID NO: 100481 - DNA, 179 bp, Zea mays
  Clone ID: MRT4577_23151C.1
ggggttggttttttttttatatgttctttattctatataacttttacactttatatgaccttttattggatgaagcacagaaagttatattgaggcaataatatggaatagccgtcttgcttggagcgcgttggtccgaacgtcgtgtaccacacacctagaattccgaacacgtgacg

SEQ ID NO: 100482 - DNA, 301 bp, Zea mays
  unsure (1)..(301): unsure at all n locations
  Clone ID: MRT4577_23152C.1
aaacctggggaaacctaccccttcaaatttttttttttttttttttcccaannnccccgtccggggggggggggggggttttttttggggcccctgggtcccccaaccgggagggggaatttttccccgggccccccggccttttaatttccttttctgaaaattctccttttagggtcgggcccctggttcaaccaaccgagggggggcgccccaccccantttttcttggggtgggtgggtgggngaggtttttctttcccccccctggcccccgaactgtcccccggttccagggttc

SEQ ID NO: 100483 - DNA, 607 bp, Zea mays
  unsure (1)..(607): unsure at all n locations
  Clone ID: MRT4577_23153C.1
tccgtcgtgaactaaggaagagttcaagagcaccaangtgaaatgttgcattgcccaagcaaggcaatggacattgagaacgagatccaagttctgtgtgatcaactggctaaaaaatcttcagattctcttcgccttttgaaagagttggagctgcatcgaagttacgggngaaaatgacatgcccttgtatgaactaaagggtctagaaactttaggctcaacgttgcacatagttgttcacgactgtgcctctgtagatttctggaacagttcaatccagtggtttcgcatacagcctgaaggaagcaagaaagaaattatttgaggcaccacaaaaccagcatatgctccagaaccacatgatgtgggccggtacacccaagctgaagtcaaatctggtggccaaacatcaatcacaaaaattgctggttcagtagatcctgtttcgtagctgcaggattggttcattatgtagaggctcttgtaaggcgaagagaaactggttataatgtatgatcacgtggcaaaaaattttaccatgtttttgttttaaagaaggcacacctttcatctctttcattatcacgcttctccttttttattg

SEQ ID NO: 100484 - DNA, 1595 bp, Zea mays
  Clone ID: MRT4577_23154C.1
cctcgtcttgcggatgacggtggcgaagaagacctcgcagctcggggaccagtccccggccatcccgcggctcggcgtgccagcgtacaagtggtggtctgaggcgctgcacgggatctccaaccagggccgcggcatccacctcgacggcccgctccgcgccgccactagctatcacaggtcatcctcaccgccgcgtccttcaacccgcacctctggtaccgcatcggccaggcttctacagatgccaagagaattattgacgaagaaagagctaatgctcggttggagataggaagtgctaaagcttctgtacaaaaaattcaatcagcacttaaagagcaggaaaaattttctcacagaactgggaagcaggatgtcgatgaactaaaggaagaagttcaagaagcaaggcaatggacattgagaacgagatccaagttctgtgtgatcaactggctaaaaaatcttcagattctcttcgccttttgaaagagttggagctgcatcgaagttacggggaaaatgacatgcccttgtatgaactaaagggtctagaaactttaggctcaacgttgcacatagttgttcacgactgtgcctctgtagatttctggaacagttcaatccaatggtttcgcatacagcctgaaggaagcaagaaagaaattatttgaggttgaacaattctcatcctacaaagtactaatattttctagagatgaagatatatttctgacattttctgttactaaaacttttaagcaccacaaaaccagcatatgctccagaaccacatgatgtgggccggtacacccaagctgaagtcaaatctggtggccaaacatcaatcacaaaaactgctggttcagtagatcctgtaatgatggatggattgtccaacacatacaactgttgtttaattgttttggatttgtgacatggctgacagttcttcagtttcgtagctgcaggattggttcattatgtagaggctcttgtaaggcgaagagaaactggttataatgtatgatcacgtggcaaaaaaaaatttaccatgtttttgttttaaagaaggcacacctttcatctctttcattatcacgcttctctttttttattgattgattgtgatcacatggtaggcctcatgtgcgctttgctgctgagggttggtcagtttttcttggaatttaccattattctcttgttttattgcttgattgtggcctcatgtgcgctttgttgctgcatttctcaggttcgacatgccctgtgcctactatcactctcgatttgaagaagagtctgaaggcttttgaactgcttgaagcattagtgtagctttggtgcttttgtgactaatcagctctggagcagctagagtgatgtagttgtgggcttttgaacaatagctagagtgatatgacacattagtgatgtagttgtaggcttttgaactgcttcaagctggagtgatgtcgttgtggtgcttttgtgactgatcatctctggagcttttgtgaatgatctagctagctatctgtaaatgatctagttgtgaatgatattataattgtgatacttttgtgaat

SEQ ID NO: 100485 - DNA, 606 bp, Zea mays
  Clone ID: MRT4577_23155C.1
ttttttttttttttttttttttttttttttttttttttgtttttccttttattttttttctgtttttttgtgggcgtccagggttccccttggtgtgtcgggccggagccgggcggcccccggggcccagccgggaaccgggggaaggggccggggggccacaagggcgcacgttataggggggggaagctgggggggcgaagcctggggcgcccaatgagcgagcgggctcacattagtggcgtggcgggcgccgccaaggaggaagccggaaaacatggggggccggggggggggccgaatggggcaactcgcggaaagaggcggggcggcttttggggcgccatggtccggtgggggttccggggggggacgggcctcagccgactgggctaaaccgcctggcccggggggagcgggaaaaggcggtccgcgcctgttcgccccgcccggggaaagggcgcgctggggggggcccccgggggggctttccctggggggggccccggggggggggggcgccccggggcggaaaatatccggggaaaaaaggcgggggggggggggggggaaaaagggggcgttattgcccgccaaagcgcccat

SEQ ID NO: 100486 - DNA, 876 bp, Zea mays
  Clone ID: MRT4577_23156C.1
cattgggaccctcgaggccggccgggactccccttcccgtctcgggcttcaccgccgcaacacacgtactcccccaatctactagtgtctctccaccaaatttttggtctcggatacaaccaagatgtcttcatctttgcacgacttaacaccaaggcatctttaatgattccacgaggccagctggcgacaacaactaccagcattttatcctggaggcggcgtcaccgtcgccgatccctcctctcaactggcaacaatgggtgcacaggatgcaactgccctgagtgttcagcagggccgagcgaggacagctgctgaaaacctcgtccacgtccctgccgcccaggtttcacttccaggtgccctagccctagggaactttgagcaagagctcggagaagacgcgctgctgccgccggtgctgagccaggagcagcaggacgccgtgaagagatacaaccatctgatgggggtccacgtggcgtacttccgcgtgtgcatcgaccctacggtggccagttccaggcggctcctccagcaggcaatccaggatctcaagaaccactgtgctggcgatgctctggtggcgcattattacgtgaacaacaggaacaacaacgacccagcagatcagccagacactactacggccattcggcagcaagcaattgctcgctctgctgatgcctcctctcggcagcatcatggcgcctgcagaggattcaacgaccatcatggcggcggcgttgttccttccgttcaccgggaggaggaggaagctctggcggctccggtggtggcgatgagcatgagccccgcccttgcggctcgtggacatcaagggcaaagtcgcagctttctgtgccgatcgca

SEQ ID NO: 100487 - DNA, 1510 bp, Zea mays
  Clone ID: MRT4577_23157C.1
atggccgcacgctcctctccctcctccacgtcgccgccggctggtggtcctgctgcagctgcatggcggcgccgtcgggttgcgtctgagccgccctactcctgcggcgccggcgcgtcgcccaacatcccgttctgcgacgtggggctgcccatcgaccggcgtgtcgatgacctcggctcgcggatgacggtggcgaagaagacctcgcagctcggggaccagtccccggccatcccgcggctcggcgtgccggcgtacaagtggtggtccgaggcgctgcacgggatcttcaaccagggccgcggcatccacctcgacggcccgctccgcgccgccactagcttcccacaagtcatcctcactgccgcgtccttcaacctgcacctctgggaccgcatcggtcaggatgtcgatgaactaaaggaagaagttcaagaagcaccaagagtgaaaatgttgcattgcccaagcaaggcaatggacattgagaacgagatccaagttctgtgtgatcaactggctaaaaaatcttcagattctcttcgccttttgaaagagttggagctgcatcgaagttacggggaaaatgacatgcccttgtatgaactaaagggtctagaaactttaggctcaacgttgcacatagttgttcacgactgtgcctctgtagatttctggaacagttcaatccagtggtttcgcatacagcctgaaggaagcaagaaagaaattatttgaggcaccacaaaaccagcatatgctccagaaccacatgatgtgggccggtacacccaagctgaagtcaaatctggtggccaaacatcaatcacaaaaattgctggttcagtagatcctggtatggtttcctgatgtatggattgtccaacacatacagctgttgtttaattgttttcgatttgtgacatggctgacagttcttcagtttcgtagctgcaggattggttcattatgtagaggctcttgtaaggcgaagagaaactggttataatgtatgatcacgtggcaaaaaatttttaccatgtttttgttttaaagaaggcacacctttcatctctttcattatcacgcttctccttttttattgcttgattgtgatcacatggtaggcctcatgtgcgctttgctgctgagagttggtttgacatgccccgtgcctactatcactctcgatttgaagaagagtctgaaggcttttgaactgcttgaagcattagtgtagctttggtgcttttgtgactaatcagctctggagcagctagagtgatgtagttgtgggcttttgaacaatagctagagtgatatgacacattagtgatgtagttgtagccctccccctcgcttcaagctggagtgatgtcgctgtggtgcttttgtgactgatcatctctggagcttttgtgaatgatctagctagctatctgtaaatgtcctagttgtgaatgatattataattgtgatgcttttgtgaataaaccccccccccccc

SEQ ID NO: 100488 - DNA, 204 bp, Zea mays
  unsure (1)..(204): unsure at all n locations
  Clone ID: MRT4577_23158C.1
attcttaactttatttagtccaagcatacattattggggccaccaaacatgaaaatgggggacgatagacggaatgacaacatatataaatagagagagaccgaggggggggggcagccaaatatagaggatcannaccagggggggttggcaaaggggacggcgcaagggggggcggggcggccggggaggccggaccggggg

SEQ ID NO: 100489 - DNA, 1201 bp, Zea mays
  Clone ID: MRT4577_23159C.1
cttctactccagcggtccagcctgcccgctcctcctcctcctcggtatccatccgctcccgccttctcattccaaagctcgccccgcgtcgccggctgctgcttgcccccctccgcggatcctcccccccccccttccctcgtgtgctccggcggcattcttctcccgctgccaggctcgaggatttcttgtagatgactcgagcttcgactatcgatttcggacggcggaagcagagcgagctcttcgggtcagggccactgcgtccagcaaacatcatcagaaataaattccccacctacaagaatggttcgaatgggattgttatcaaattggccgatggcccagaaatgccatctctcaaggaggccgttgccaaggaggcaacagatctgcttgataggtgtcagcgtccttcagtccgagagctcaccatgaaattcgagaagggctttaacgcagctaccttgttgtctaatgaggctaaatggagacatgcggctttattggagcgggacatccttctaaaggatcttaaaagtgtgttggaatcgctgagaggtcgagtagggggcaaaaataaagatgaaatcgaggagtctctatctatggtggatattttagccattgagctatccaaaagagaagatgagttgctccggcaaaaaacagaggtcacaaaaattgcagacacgctgaaacgggcttctacagatgccaagagaaatattgacgaagaaagagccaatgctcgggtggagatagaaagtgctaaagcttctgtacaaaaaattcaatcagcacttaaagagcaggaaattttttctcaaagaactggggagcaggacgtcgatgaactgaaggaagaagtgcaagaagcacgaagagtgaaaatgctgcattgcccaagcaaggcaatggacattgagaacgagatccaagttctgcgtgatcaactggctgaaaaatcttcaaattctcttcgccttttgaaagagttggagctgcatcgaagttacggggaaaatgacatgccctcgtatgaattaaagggtctagaaaccttacgctcaacgttgcacatagttggtcacgagtgtgcctctgtagatttctcgaacagttcaatccagtggtttcgcatacagcctgaatgaagcaagcaagaaattatttcatgcgccacaaaactagtatatgc

SEQ ID NO: 100490 - DNA, 320 bp, Zea mays
  Clone ID: MRT4577_2315C.1
cccacgcgtccgggggtccctcctctcgctctacctgcttcctcgggccgtcttcctcctgctggccgcctgttgctccttcgccagcggcggcgtgaacaactacaacaccagcgatgccgccgccaggcagctgcagtggggcaacgccagggccacatggtacggccagcccaacggtgccgggccctacgacaacgccgctctaccgcgacggcaagggatgcggctcctgctacaagatcaggtgctccaagcacgccgtctgctccggccgcaccgagaccgtcgtcatcaccgacatgaactacaccccgggc

SEQ ID NO: 100491 - DNA, 523 bp, Zea mays
  Clone ID: MRT4577_23160C.1
ggggggtttttttttttttttttttttttttttttttttttttttttttttttttagggggaccacaatgcagtcattaatgattttgtttagccacacgttacattaagcgtgtgggattcatgcctgccaaaacattatcgttggcaggggggggggggactgatccaaaagcagcatacacacatggttcattagaaatccgaacagactattagcgagtattggttgcacataaaagcacagagttcgtttgtccagggggaatattaccagaagacaagtgttatttttggtggacagaaaaatgacatgtcccttcatttccaacgatagacctccatattattggtccatgggatgatcgcttttggcattacatgccagggttgctagagtaagggcttggggttctattagtaaactgatgggccaaaatagaaaaaaaagttgttcagggctgattgggttcgcttagctttccgcaaagaaggttttaagtccctacagtgacttgggtata

SEQ ID NO: 100492 - DNA, 142 bp, Zea mays
  unsure (1)..(142): unsure at all n locations
  Clone ID: MRT4577_23161C.1
ttggacagtatatatatgctgaatctcatgctccataataacgaaacacgagtacatatgaatacacacgtatacttgataattaccgaccccagagtacacattacctgttatttttttnnttccccgaaaatgtatatca

SEQ ID NO: 100493 - DNA, 588 bp, Zea mays
  unsure (1)..(588): unsure at all n locations
  Clone ID: MRT4577_23162C.1
gacacacgtacacactgcagccatttaaagtccatggaaggccgcgcgcgcctctccctcctgcacgccgtcgccgccgcgctggtggtcctgctgcagctgcatggcgccgccgtcgtggttgcgtctgagccgccctacacctgcggcgccggcgcgccgcccaacatcccgttctgcgacgcggggctgcccatcgaccggcgtgtcgacgacctcgtctcgcggatgacggtggcggagaagatctcgcagctcggggaccagtccccggccatcccgcggctcggcgtgccggcgtacaagtggtggtccgaggcgctgcacgggatctccaaccagggccgcggcatccacctcgacggcccgctccgcgccgtcactagcttcccgcaggtcatcctcaccgncgcgtccttcaacccgcacctctggtaccgcatcggccaggtgatcggcgtcgaggcgagggcggtgtacaacaacgggcaggcggaggggctcaccttctgggcgcccaacatcaacgtgttccgggacccgcggtggggccgcgggcatgagacccccgcgaggacccgacgatga

SEQ ID NO: 100494 - DNA, 1067 bp, Zea mays
  Clone ID: MRT4577_23163C.1
actgcaagaatctcacatgggtaactactaggcatatccagcatataaaggcgattgttaacaaagccaccggggggagctaaactgggcatatcatttacacaagtgactgtagggacttaaaaacttctttgcggaaagctaagcgaaaccaatcagcactgaacaactttctcttctattctggaccatcagtttactaatagaacaccaagcacttactctagcaacactggcatgtgatgccgagagcgatcatcccatggaccaataatatggaggtcaaagaaggacgcgtgggtgaagacacacaaggttctttcctactagctcgtccttagttcttttgagtcctttggttgttcgatgccttctactgattcatgtctcattcggttatgtgtgtcatcactcgtcatggcgtcggtgaagcggtttcgagtgacagggaaggacaagatcgtgcggcggtgcgccgggaagcaacacttgctcgccaagaagaacaccaagggcaagaagagactctccaagatggtctatcgttggaaatgaagggacatgtcatttttctgtccaacgagaatagcacttgtcttctgctaatattgccgctggacaaacgaactctgtgcttttgtgtgcaagcaatactcgctaatagtctgttcggatttctaatgaaccatgtgtgtatgctgcttttggatcagttatattttgaactagcaacgataatgttttggcaggcataaatcacagacgcttaatgtaacgtgtggctaaacagaacctttaatgactgcattgtggtccaactaatattgctgctacttcattgtatatgtatatatctatgttgtggcttaatatgtctgtaattatacccgaaaataccattatttgccatataattggacattgtacattgtatcgataggatattttttggatcagttccctgttgtatcaggcctgattattatactatgttgcccctcccatgtatggtagcttgtgctccaacaaaaacctgctgttattctaatgtgaattttgccctgtct

SEQ ID NO: 100495 - DNA, 323 bp, Zea mays
  unsure (1)..(323): unsure at all n locations
  Clone ID: MRT4577_23164C.1
gggggcgggggggctcgatcatttatcatcccagcgggggccgccaaacctggccatgtcggaatagatttcaaagggggaatacttacagcattctctgtgcatggcatctcgccgaagctctactactgcttctgctgggaagagcaggtgggcgcagccgggacgagcgcctgcccctactgctgcgcgatttgcttctgtctcttttgttcttacgggtagcacagcgtcgcccggacgggcgccggctttgtgaatgaaggcncctgngtcctcaccctttcctgcttgtccacctgtgccgtgctccgctcctctcc

SEQ ID NO: 100496 - DNA, 412 bp, Zea mays
  Clone ID: MRT4577_23165C.1
tggacaaatgtcagctatgacatatagaatagggtgtgggctcaaaacatagcggatagcaagatatcgaacaaaaacaaagcagacgacattatttacagcaccgaaactttatcagcctggtcatgctgtaacctctaacctgtaaggataacctgtcactcaattatgtgcaacagattaaacatgctatccagatgttgccgacgcagttcaagggataacttggaaacctgataagcatagtgcatatatgtcccgttttttgcaaacaaaggtacagcttaacactgtttctgcaaataaaggtacatcttcagccatatgcaagtgagcacatgtagcattctatacatttacaatctggtgatgtcagaacagacaaataattgcatgctgcagggccaatgag

SEQ ID NO: 100497 - DNA, 293 bp, Zea mays
  unsure (1)..(293): unsure at all n locations
  Clone ID: MRT4577_23166C.1
hycctatmccatgggctgacactngcagctttccraggcttgtagcamgymgmgagttatmcgaattttgatgytcagtgaaagttgacwtctcagcawgcacacgggattttataacgacaayscwttatgtaagaagtccasccktgcttactttcgagacgwctagacactwgactttcccattyttwttcctgtctctacaraacrctgbtgttstatcaywtanatccttatagtgahscgttccaasrgcatttttgtttccccgtccagaatascatttaaatcac

SEQ ID NO: 100498 - DNA, 908 bp, Zea mays
  Clone ID: MRT4577_23167C.1
ctcccctctaaaacccttcttccctagacctggctggcacgcaagcgtggggccgccgcctgcggcgcccgccccggtgaggctccgtctgatcttcgaaaacagccgtctcctccgacgtgtgcagagggatgaaggccttcggcgctgctggcttctccttagcccagagctcgccaccgtcgccaacctcgctgctcatgtcgcagcccgtttccgccttcgccgcacctgcccacgcggcgttgtgctctcaatggatgggtttaccttgccaccatttgagtcaacctgcatctttagggacaacgatattataagggttaaacaaaaatcctgtacgaagcacatagagcacaatgatgtgcactgtattcaagatcatgagataatagagaagagatcacttccagttgatggcaaaatccttgcaatccaggataaggaggatgtctgtaaacaccaagaagaagaggcacatgacgatcaccagcttgaagaaaatgccactgctagccatagcacagaaaataatggtacaagtttgaagaggaagcggaatgatggggttgcagatatacctgagagctcaaagggacaaaggctgaaggtgacaaattctggaaagcatatagattacagcaagaaggaacaaaatggatctaaaaagttgaagctgtcagttattgatattgaagctaagaaagcaactccacaacatgaaactaccactaccttagtggagcagcaaaaatcagaggggtattattctcaaggcatatgccagttactgcttttaagttttaaggcactttggtttgagaagtagtcttagttttgttcccattgatcataaccagtttgaaaggtattcctgtgttggttcccttgaaagaaaaagaaaagaa

SEQ ID NO: 100499 - DNA, 131 bp, Zea mays
  unsure (1)..(131): unsure at all n locations
  Clone ID: MRT4577_23168C.1
ggcactcaccactagtattggagccgtnactgcggatcctgctcaatgggggaggagtagatggagctaatgcgtgagcttctgcgngatagggaactatgaggcactcgtgcggtagtatggcaggtgtt

SEQ ID NO: 100500 - DNA, 431 bp, Zea mays
  unsure (1)..(431): unsure at all n locations
  Clone ID: MRT4577_23169C.1
gctagtccggcctcaccgacggagagtttatcacaggatgccgaaggtgctgtagaatagcaaaataatattcttaagcatttggagcaaaatgagactgaatatatgcgcttgcgaagacacaggatgggagctgaagaacctttataattcacggtgggttgggagaggngcaaaaggagaggcgcgtatatttttagagaagacgggtgggaggggggacgccattattaaactcacgaaatctgaaatgcttggcaggggccaggtagaacatgttaaagctgaaaggaaccttgttgctgaaagtgatagggctacctaggtaagctctatgattctttccagacaagaagagtttatatgtgcatcatggaataccttgctggagggggacttgatgactctacttatacgcacgggcatgacta

SEQ ID NO: 100501 - DNA, 1122 bp, Zea mays
  unsure (1)..(1122): unsure at all n locations
  Clone ID: MRT4577_2316C.1
ngtaccatactgcccctgctccatttgatgacctgaccctgaccctgaccctgaccctactataatacaagcgcagcagccactgagtcctgagagcgcgcaacagcagctaagctagcactagcaggcggccgggcaggtcggcatggagcctcacatggagagcgcgctgcggcagggcctgtcggaggcggagcagcgggagctggagggcgtggtgcgcgcgcaccacacgttcccggggcgcgcgccggggacgtgcacgtcgctggtgacgcagcgcgtggacgcgccgctggccgccgtgtggcccatcgtgcgcggcttcggcagcccgcagcggtacaagcacttcatcaagtcgtgcgacctcaaggccggcgacggcgccaccgtgggcagcgtccgcgaggtcaccgtcgtctcgggcctcccggcctccaccagcaccgagcgcctcgagatcctcgacgaccaccgccacatcctcagcttccgcgtcgtcggcggcgaccaccgcctccgcaactaccgctccgtcacctccgtcaccgagttccagccgggcccctactgcgtcgtcctcgagtcctacgtcgtcgacgtccccgacggcaacaccgaggaggacacgcgcatgttcaccgacaccgtcgtcaagctcaacctccagaagctcgccgccatcgccacctcttcatcggccaattaattcctcctcctccccctccggtgccggtggtgccacggatcatcgtcactagctagcgcgcgctaatccattgcgtccaaggcatgccctgttcgttccgttgctactgcaaattgcctgcaatggtgacgatgcttcttgcttgctttttcatctctccatccgtccatcgtttctagctctttggaacgaacaagaagctagctagctagctagagagagagaaaaaaaatgttgtccaacagtttgctataaacgaccttttccttttatttcatcgtaactaattcagcctttcggtattgcaaatctgctgcgtcggtgacatcgaaaggggttgcaagttggtgttattttatatatatcctggttttcttcttctttgtaaataaatatacacgtacgtcgtc

SEQ ID NO: 100502 - DNA, 1657 bp, Zea mays
  Clone ID: MRT4577_23170C.1
aggagttctcctgccgatttctttggatttgatgcgcgatcccgtggtgtatccacaggacagacctatgaccggacttcgatcatacagtggatcgaggaggggcattccacctgccccaactccggccaggccctcgctgacaaccggctcgtaccaaaccgggcgctgcgcagcttgatttcacagtggtgtggggtgcatggctttcagtttgattcgccggagagcaacgaagggatgattgaatgtgttgctgcatcttgctgcagcaaggcggcaattgaggcgaacaaagccacagcaaggattttggtcaggatgctgatggagggatccgttagtgcaaaaccgattgcagctagggaaatccggttgctggcaaagactgggaagcaaaacagggcattcattgccgagttgggtgcgataccattgctatgtaagttgctgctgtcgtcagattggatggcgcaggagaacacagtgacggcgctgctcaatctatcgatctatgagccgaacaaggcccggatcatggaacaagcggactgcttgcatcttatcgtcagtgtgttgaagaatggtcggacaacagaggccaaggagaatgctgcagctacgctcttcagtttatctgtggtccatgactacaagaaaaagataatgaatgagccaggggctgtggaggagcttgcgtctatgctgaccaaggggacagcaaggggaaagaaagacgcagtgatggcgttgttcaacctctcaacacacccagaaagctcaggacggatgcttgagtcatctgcagttctagctttaattgagtcactgaggaatgataccgtttcggaggaagctgctggtgctctggctctgctgatgaagcagcctaccatcgtgcatcttgttggtagctctgaaacagtgatcactagccttgtcgggctaatgaggcggggaactccaaagtgcaaggagaacgcagtgtcagcgttatacgagatatgccgtagaggcggatcgacattggcacagcgcgtggcaaggatacccgggctgaacacggtgatacagaacgtcacgctcacgggaacgaagcgtgccaagaagaaggcaagcctgatcgtcaagatgtgccagagaagccaggtgatgccgtcggcgttggcgccgctaggaagcaccttgacagtggttgatcattcgttggtagggaacggcacgttgaggcgcgccgcaagctttggcagcgaggagttatcgaaccctgtgtcgatctcagtgcccgtgccctaggtggtgaaccctgtatccatcccagagcccacatgattctcgcatttggtgagtttttgtccctgatattctttcattccatcctcaaatgaaggtatacagatttaatcccgaagaatcaaatatatcagatgtgctcgtgtgtacgtgactgctggatagctgtgcagatataggtttacagatagaattccttggcaagcttggaaattaattatttgattttgttcagttaaaaaaaagccgaatatgcatgctacttgctgtaaactgttcccatgatttggaaacggggatgatacatcatttctccaacccccttgtaatagtagaactgatgaagaattaaaatcttcgacgt

SEQ ID NO: 100503 - DNA, 352 bp, Zea mays
  Clone ID: MRT4577_23171C.1
gggttgggggttcaggaaacggtcacaagcaagcactcgaatattccatactgcaaattagacctgaatcttgaaccttccaggctcaatgcttcgcacaaaatccgcccagcaacaaacattatacgattttcaagttacaaccaagcctgctgaaaaccaaaacctttgccagttgctcaatttgaattctcgtcacttcagccgccaaactggcatcatcttcattcttcaggaagctcgcctaccatgataaaaattctgtgctaaaacgatgatgcgaagtgtaagctatgtgcatcagtacacgaattggtcgcctttcgtagctcaacatataatatagatatag

SEQ ID NO: 100504 - DNA, 339 bp, Zea mays
  unsure (1)..(339): unsure at all n locations
  Clone ID: MRT4577_23172C.1
agagaaattggggggttcttgaaataattttacatgcggttattgaatgaacgtgccatttatacactagtgaagctcgtgaccttcacctagctactttttacactggtggaattcctctaaaattttgggttttgtttgggggnaaccnnnnnnnnnntttttatttttatctttttttttttttttannntttantttnttttttttttttttttttttttttttttttttttttttttttttttttttttttttttttttttttttttttttttttttttttttttttttttttnttttttttttttttttnttttttttttttttttttttttt

SEQ ID NO: 100505 - DNA, 553 bp, Zea mays
  Clone ID: MRT4577_23173C.1
gatttgctaccgcccctgcctccaggctgctccgccggctccctaggcagcgccgacgcggagggatgtgccgtatcccttgctccacggccatgaaaaccgacatcaccgcctcgacgtaagacaggagcaccaccgcggctgatcaaagacctcgcttcaaccaagcccaagaaaatttctctgcgctcgactacctgttgctgttcaccagttgctcacctacctctcctttgtgcgtatgtccgccatctactcaccgggtattcgacagctcgtcgatcgatgacgttcgaagaacatgccgcccatgacaacgaccatgcacgccaacgatacctccgccctgccgctagaagcaatacgttcccacggacgagcagaatgagcgccacgaccctgacgtggtcgcagcgattgccatacttaccggatctctcttaacaagcatcatcaccaggacgtctcctgaacccaagctaacttcggtaccttaactacagactccatgatcacctgcaactagaacgtgcgacgacgatgcattcccata

SEQ ID NO: 100506 - DNA, 566 bp, Zea mays
  Clone ID: MRT4577_23174C.1
gcacgagatggatcggagcctgagccagaggcgtacccgtccgaacagctgtcggacgaggccctggtggaggacctcctcgccgccctcgccgccgcgcggtcattccaggagttccgccgctcgcagcgcaaggagtcattcggtctccagcgctggctccagctcgtgctcccgctcatccaggagatccgcgagatcgcgccgtccctcagtgatgacgcctaccgccgcctcgccctcctcggtcgtgcattccacgctgctcgccggctcctccgctgctgccacgacggcagcaagatcttcctgtctttggagagcgaggctgtgctcgggcggttcagggccgtgtatgagaagatgaatcttgcattggatgggatgccttactctgagattggcatctccgatgaagtcaaggaacaggttgagctcatcaatgcgcaactgaagaggtgcaagaagagaagtgatacccaggacatggaactctccatggattttatgatgatactccagaacaaggacgggaatgcagatagagctatattggaaaggctagc

SEQ ID NO: 100507 - DNA, 791 bp, Zea mays
  Clone ID: MRT4577_23175C.1
ctcgggccggagagatcagtgccatcctccatcacgaggtagaaggagcctgaggactaccctcggccggcgatcgacagagcaagatgaggacgccgcgggctgtctcgtcgtcgtgtcttgccctctccgggttcctcctcctcgtcgccgtctcggtggccgcgaccggctacgccgcttcgccgggggagagttccaacggctacggcgctgcggccggttcgaacggcggcggccaggagggaagctacacggtgccgccgtaccagaagcccgtggacggcctcgacgggcggtactacgggaggtcgtgcccgaaaatggaggagatcgtcgggacggccgtgatgaaggccgtgaaagccgacgagaccctcgccgccagcatcatccgcctcttcttccacgacttcgccgtcgggggcgtggacgggtcggtcctggtagacgtgcccgggcagagcgagaagtacgcggaggcgagcaggacgctccgcgggttcgagctgatcgaggggatcaagaaggaggtggaggccaagtgccgcgccaccgtctcctgcgccgacatcctcaccgccgccgcccgcgacgccgccttctcggccggggcgccctactggtcgctcaagtacgggcgcagggacaggaaggactactccagcgtcgaggcgcccgaacgcgacgtccccatgggcggccagcgcgtcaccgagctcgtcgcctctttcgagacgaagggtctcaacatccaagacctcgtcgcgcttttcggagctcacacgatc

SEQ ID NO: 100508 - DNA, 210 bp, Zea mays
  unsure (1)..(210): unsure at all n locations
  Clone ID: MRT4577_23176C.1
ggaataattaccgggccgacgaggtgattattttgcggangcccgttttttttttatgggggggtttaaaaaaaatttccgctcaataaccagataaaagggggaaaaaggcttcccatttaagtagagaaacccatacgactaaaggattaaaggaagaaagaaaagcgggtggaggcaagtaagatgggggaagaaccccgaacccag

SEQ ID NO: 100509 - DNA, 339 bp, Zea mays
  unsure (1)..(339): unsure at all n locations
  Clone ID: MRT4577_23177C.1
atcgtggtcgtcgtgaccattcattcaatcnatagatgaaatggttcatgttgttgttgtgctggggtaagaatcggtggctggtcggtttttagccttggtaaattaaagagcaagcgctggttgggggggggggggggcaaatggggggggcaaaaccacgggcgtggccgtcttagctggatgggttgggtttgggattaggattaggattaggaccaagaaacctggtggtgcctcgtgacgcgttattgttcaaatgccaaaccacccaccaatttttggtgctgatttatggggttttgtttcttttggctggtgtcttgttcttgtcccgat

SEQ ID NO: 100510 - DNA, 305 bp, Zea mays
  unsure (1)..(305): unsure at all n locations
  Clone ID: MRT4577_23178C.1
gtcgtgggcttcgcgcgcgacgtgggcttggatgaacccgctggtgcagcgcgggcacccctgncgctggagctgtcggacgtgccgacgctggcaccgtcccaccgcccagagcgcatgcacgagctcttcaccctgcactggccgtcggcgtgggcgtccaaggacaacaacccggtccggcacacgctgttccggaccttctgggcgcagttcctgctgaacgcgttgctggcgctgctccggctgaccgtcatgtacgtcggcccgacgctcatccagagcttcgtggacttcacgtccgc

SEQ ID NO: 100511 - DNA, 380 bp, Zea mays
  Clone ID: MRT4577_23179C.1
cttgtttttgttgggttttaactctagcccatcgaaatttgcttgggagtaaaaggctttgttgttgttgttgtcaaggttttaaagtcgtccgactaatcgcgattagtcgcgattagtcggccttatcgctagagggagctcgattagggtcttcgactcgactagagcgactaggaagcaattagtcatcctagtcgccgactaatcgcgattagtcgtccgactaggtatagtcgtcgactagttttgcttgttttgggccactaatccagtctctgttacatgggcccgcccaccatctgtacatcacaaacattgttttgtcctacttgtaccaatacggtacacgcattacgcatcgcacagtcgcgctcgcg

SEQ ID NO: 100512 - DNA, 317 bp, Zea mays
  Clone ID: MRT4577_2317C.1
actcatacacccactcatcctattcgacagacttcgctttttcctcaagcatattcaaacaaggctcaggcgcatttctaaatcaaccacttccaaactactcccacacatatccaatttcatatccatactaaatattcacatttaatctacttacttgattattatattaaaatatataatcctgctacaacctaacttttcttactctactcacataactttcaaaacatactcatacatttcaataattcccaactacaataatctttatacactttatccactatttatatccatattactcaaattttatc

SEQ ID NO: 100513 - DNA, 450 bp, Zea mays
  Clone ID: MRT4577_23180C.1
cgtgtacttttttgttcgcatgcaatcaatcaatccaaaccatgcattgcacatccaacgttccctgctatatttgcatttacaccctcccgcctcatccattatctcccccaacctggtgcttgctttttgctagatgccccctgctgtccctgatcctgtacagccacccccccaccactcgcaggcactctctcgacgtttcggcttctggctttggctcgctgctgccatccaccggcacccaagtttattgccgacccctattctcttatgattgactatggcttgcatgggaacgaatggatacaaaatagatatcatattcgtgaatcatggaatccagcgtactatatggaggtatctctagcacgcatccttagaaccacactatggtgctagagcgcagagttctttcttaatcagattattcatcgcaaactatcattt

SEQ ID NO: 100514 - DNA, 2821 bp, Zea mays
  unsure (1)..(2821): unsure at all n locations
  Clone ID: MRT4577_23181C.1
aattcggcacgaggctcccctccacaggccgacgcggcgacgccgctgtttcaggtcaccgagccacattcgctgcttacctctgcgctgattacggcctagattgtggcgttagcgcttggctctcctggctttgcgtggggggctgcgtttggctgcccagatccgcgtcgcgcgctcttggtggttttcctccccctctctgagctagcgagcttttgcttgcccgggaatgaaatcggggcctcagactcccactgccgttttcggccactgcatttgggctacatgctttcctcactttgtatcttgtggttgtggagggctggacagcttgcttctcctctaacgatcttttcagctttgtttttttaccacctcggaagcttgttatactagtgctccgcttaccgagattacggttattccagcatgtttcttttagttttctttcgctaaagtaaagtcggttctgttttactggtatatatcagttgtactgacgagctctggaatttccagtgcgggtgcattaggctgatatgggcaagtcgccggggaagtggatcaaatcggtgcttttggggaagaaatctaccaagtcaggtcctaccaagtcgaatgaatctaaggctgacaacaacagatactcgaccggggaggaccgcacattgtctgagagttctcctgtgatttctgagccggtactagttaacatccacaagaacgtagctatcaatgggaaggctgcagatgccagtgatagggcacggcaacaagatccgcagagccaaagcgttgttgagtccagatcatcggctccagctgctcagctgggagaagatcaagctgcagcgaaggcacaggcagcctttcgtggttacctggcacgaaggtcattccgtgcattaaaaggtatcgtaagactccaggcgctgattcgagggtatcttgtaaggaggcaggctgtatcaacccttcgcgcaacatggttgattgtgaagtttcaggctctagttcgtggaagaaatgttagactctctggcagtcgcatgcagctcaatgtgaagtttggtcagagtaactttgggggtgttagatcgtctgatgcatggaaagagaagctatcttcaaatgcttatgttcggaagcttctgtcttcaccaattgttttagaacctcttcacttccagtatgacaagagggatcccaattcaacctataactggtttgagagatggaccataggttgcatctggaagcctgcttttcaacccaaaagagttgctgatgggaaaccactggtaaagaaggctagttatgcaatggaaactcaatcagccaagttaaaacgcaacattcggaagggttctgctgctatcgctgggagtttccatacatctggtgaatctgataaagtaaaaaggaatccaaagaatttctctagcttccctgctgattcagtaccagatagccagttatctgaacttgaaaaggttaaaaggaacctcaggaaggtaactgattcgatggctgaagcctcaaagatatctagttccagggttgattcctcgaaggtatgtaattctacagctgaggttccaaaggaatctaatcctgtggcagaaatctcaaagatacgtagtctcctgaatgggatctctgaccatcaggatattcaatgtgagaatacacgtgaatcttcatttcctcttggaactcaagaagactctgacaatgatcatctattgcgatattcaaatatggatagcttggacttggtacctggtttgaaaagtgatcaggaaattcagctggattcggtttctataggagaaaatgttgatgatcccactgttgttgctccagcagttgaagaaatgtcaccgcaaaacattgatacggaagacaatgttttatgcaagaaagaggaagcaaggtccaaggaagagcacttgtctaatggaagccttagaactagcaagaggaagtcttcattccccaacaaatcagaatatgtagaaaatgggactcacgctactcctgttcagccaaggcagccaagctatatggctgcaacggagtccgcaaaggcgaaattgcgagcccagaattcacccagtctggattctgattcagcggcagaaaagaatggtttcacccgacgccactctcttccttccagtacaaagagtagagcacttaaagctgaatggaagcgctgaagaggcaacccatcgtccacttgaattgaattgtgcactgctctgaaacttcgctggatgaactcgaccggtcttgtcccatgttcttgctgtattgaacaaccccttgtgaagttgcgattctggttcagtttgtcgtaggttcatgtgcaaccactagtgccttgtgtcgtatattgcatggttcttgtcgaaggaacaatgcctgcgaaagctgatgttaggactgcattaactgaataacatcacccagttgcccaggtctttgtttgtcgtcttaaaaaaaaactcgtgccgaattcggcacgagtggtggaagggcgaaaaggataagctccgtttggagatttaatagcngaccagaagcatgccatggctgaattagaggttaagcgcctcaagatggacttggctgcatcggcaaagcgaaggagacacccatcgtccacttgaattgaattgtgcactgctctgaaacttcgctggatgaactcgaccggtcttgtcccatgttcttgctgtattgaacaaccccttgtgaagttgcgattctggttcagtttgtcgtaaaaaaaaaaaaaaaaaaaaaagggcgg

SEQ ID NO: 100515 - DNA, 590 bp, Zea mays
  Clone ID: MRT4577_23182C.1
ttacttgactctgttgcgtctcctattgactgtctcagcttctttgctaaccgcacgacgcttgctagtaagcgagctcctgaaatgtcaactcgcttctcctcgagaggactagcagaccatactcctccgaccgaagcgctaccatctgcccagctaatctgtacaataactgcttgcccggattatccaaacatacctctgggtcggggttctccggggtgccttgaggatggaaggaggaatctgtctctgtgaccatggtgtgaatgagaaggatgagcgggatcacatcgatgacacagctctgagctttatgaagatcgacactcacccgcgccggtcctgcttcatcgactcctgatctagtgtcttacactactggggttatgtgatctcgtatacttgcccgcatgctgatgcggccttctctagtgcacatgcggaatcactgcactggctgccttgccgagacgatgctccttatatctggcttatgctctacgatctcaaaggtgtaggagataatatttgacctcagctaccgctctgaatctgacgagtgatatttgatactatgccatcctgac

SEQ ID NO: 100516 - DNA, 3230 bp, Zea mays
  Clone ID: MRT4577_23183C.1
tattaatggaggacccttcctcccgcagcttcagtcttgattttcttcattacgtaccaccttggaacagaaacaacaaaaatttgttgcttcttcacctaaaacaacatgggacaaagccctgagtacgaaatgtacttacgcaagtcttacccgtcaaaataaaagactctcaaggaatatgctggcttaagggagtcaaggtaaggcttatcaataatcaaagactgtttgcagaaatgcttacaaatagtggatccttaaaaatccagttttatttgtcaggtttagtaaagttacctgcatctagagttctttctaccctagttcaagcacttgacctatactagccaatttcttaacaacccttcttattcactggagtgctacgtgtagggcagtgaccaagtcttcatgtccacgaagttacgacgatccaaatcgattatactcagctgaggatctccaatcacacgacatatgtagcacttaacccttgcatatgtcaactcgccactggggttcttaagaccagatcaggttcacgccaaccaagagcacagatacactaccgcccagcctcttgccacggagggtacaagcatactctcgtcatctctccactccaggtgcgtgcgagctgttctggtattggtccgaccgaggctaagcttacccatgacgaggcatgtggccagttaaagggtcctagatcagcaagcctactttcggtgcggtctttaatcgacacagacgggcgacctttcctgctcaacgtctggtctcatattaaaataattctgaaaacctggtacctgtcagaggtaccctactgaaatgatgaagtcatcaaggcctttgataccttcatcattccagcccctttttccttgtaaaaacatgattcatacatcaaaatattttgttccttgtctataagcaggctaagcatatctagcttttcaaatcaggtatcaaggatgataatcaataattcaaggatggtaatgcatcaattgtttaaccattcaactcctatcacctaatgcagcatataagtgataaaatatttttaaaacagcaagaaggtggcaaatgcaccggggcttgcctgggataacactatgttagtgttgttagatgatggccacttgacgatcaacttttattctgacacccgcttagttcatctagcttcaggatcatcggccgacatcgtcttgtgagttgttttgatccacacccttcgcttcgcacgattttcaactagcgtacctaattagatgtacaatgcacatgtataaacataaggaagaataacacaacatattacacacaataaagaattaagcacaatgacgaggcgctgcaacacttgtgagaaaatactagacgccaataaatggctaagtacaacaaggacgaccacgggttctaacccaaacatcgagaaactttaaacgaatacaagtcctatcgtacttaggtagagtataatacaaaagattcatccgattaaattcactataactggcttctaggactaacatatggagagaagcaaactaacacatttaacacaattagcctaaacagacttattagctaattattgaaatgctacatttatttctcgcactattatttataccacacatcgctcatgcagaactaatttaattttacttcatattactgatttcaccaaagtatttacctcccctttaattcaatcaagtctaaagcaaatatttagaaagaatgaactgaccatatataacaaggaatttggataaaccatcatatgcaacaagttttcatcaatcaaggatcaaggattgactaatccttcctaggcaaacaaaaatgacaccaagaaatcagtttaacacatgcagattttctagacagcatcatagtggttaactgttttgctcataacttacaaaatattcatccaaaaatcgtgaactaagactttgtagaaagcttaagaagtcctctacaacctttgtattatcatcacagtgagacttgacacttagaatggtcaaacaatgctaaacgtaaattctgtccagatttggacagaattcgactacttacttcaaaaaatcataactggagtttcagacatccaaatcaggtgatcctagactttttagaaaactaatagaattctctaaaattcatttatgaacatcccaggttaatttaatatatatcaaggtcaaaaaacatgagaaaggctctgcttccaaattgggacagattcagaaatcctaactcaaacagttgtaacttaatttatagatcaccaaaaagggtgatccaaaatttgttggaaagcttaagaaaagtactgcaattctcctataattgctaatgattgattctcattttaacttagccaaacaatccatttcatcggattaactagcatagctaacacatcacactatttgtcctagcaagtagagcatcatcaaatattacataatctcatttgactataacctagaagcaaaatactttaagcgcctaaatgcacttcccactatatagctctcggattacaactggaataaacctattgatgctatttgcttcgaactaataaggataatgaggaacatttattcaagatgattaacttaagcgaccaatctccatttatgatatttactcaatcaacaaccatagaacatgataattactaaaacaaagcattacttcaccaattaagaatcagctaaacttacttagccaaacaatagtaacttcaagccaacaatttaatacttgcagaatttttttagacagcagcacagcggttaattgttttattcatagctcacaaaatatacatccaaaaatagtaaactaggactttctggaaagcttagaaagtcctctataactcttatattatcatcacaacatgattcgacagtttgaaaggtcaaacagtgctaaactttgattctgtccagatttggacagaattcggctactcacttcaaaaaaatcataactggagtttcaggcatccaaatcaggtgatcctaaactttttagaaagctaagagaattttctacaattcatttagaaacatctcaggttaatacaatacatatcaaagtcagttactacaaacagacttcgctgtccagatttggacagattcagactctatattcaaacacccggccggcctcgagggtcccaa

SEQ ID NO: 100517 - DNA, 496 bp, Zea mays
  Clone ID: MRT4577_23184C.1
cccacgcgtccgcccacgcgtccgaaagaacaatatcttcatcaacatggatagatgcacgaagtacattactttctgttatgcaccaagaaatcccaatatcacaccactggcaactgcatcgtttggggacatggctgattcttcaatttttacctttcccagaatccatgtgaaggatccatatcagcgcctcggaatcagcagggaagcatcggaagaagaaattcgggctgccaggatttatctgataagcaagtatggaggccataagccaagcgctgatgcaattgagtctgcccatgataggattatcatgcagagtttctttgataggaaaaaaccaaaaacgaacctcaagaaaaaaattagagaacttagtcacgtgccgtgaaggctattcaaggcagatttcaaacaccacgtagcaaagtcatttggcagacagctattacttttgtcttgcttggagtgcttacccttgctttccctactg

SEQ ID NO: 100518 - DNA, 792 bp, Zea mays
  unsure (1)..(792): unsure at all n locations
  Clone ID: MRT4577_23185C.1
ggccggccggggctgcatcctttcgattatggcagctgccgcagccgcgggcggagctgcatcagccgccgtcgccagccaagaacctatgaaggctctcggcacaggcatcctccgccgctccgcgccgcactggtccgcagccgccgcttccttcttttccccacccttccgcccccgccgctgccgccgcgcgcccgctcctgcagccgccgcgcgtacccctggctcgcctccctctcgctgcttccgaccgacgacatccccagtgctgacgccaccaccaacgggtgggtgattggggtggatcctgacattggaggcgccatcgccgtcctctcgcctgacggctcgtctcaggtgtttgacaacccgttcgtgcacattatggtgtcagaagtcatccgtaagcgactggacaccaagtcaattatccaactgctccgtggccttgatgcgcctcctggaactacggcatacattgagaagtctagcccatttccaactgatggaaagcagggatggtggagcactggtttctcatatggcttgtggattgcttctctagtggcttcggggttttcggttgtcccgattgcatctcagacatggaaggcttactttgngctaatgcgaagtgaaacaccaaaggatgatagcagacaagctgcttcaattttgttccctgacaaagacagtccttggagttgaaaaaacaccatgggcgagcagaggctcttctgttagcagcctatgggaaaggcctgtgctgccatcgggggagttcagcaa

SEQ ID NO: 100519 - DNA, 711 bp, Zea mays
  Clone ID: MRT4577_23186C.1
gccggccggtccgaaaagaaatcacatccacgcgacatgatatcttttcggacgcacccgaaaacatatatatatatttacacgagagacatggggatgatggttacctctacgcatctgcgcgcgtacgacgccaccgaccccgccaagctccttacgtctcctgccggcctgaggtctagcacggccatgtccgcgacgtgaccttctaactactacggactgcacctaccctgacttctacaacctcgagaacaaccgcctgatcgaggagatgaacaacgacgagggcaactactccagccacatctccctcctcttccacaactgcttcgtccacctctgcgattggtagacgaatcctgcaacgccaagtaccccggcgtccaactacatctgagaagatggctgcaactcaacagaatccgtgtaaatttactctcggccggcgtactgacgggatgcgggtctgtgatgacttcgtgtgctgctgactgctcctgctacccaataattcgaacgcaacgacgaaatgtatgtcgatgtgtgaataactaccagatcctagaccttgtatacgctgctgtagataccacatgagatcgagtactcatgtgtgataagctggctgcgtaattccatgaccatgatcagtaatatgaatagaacatattggagaaaaataaacacaaagaaggcccctaggcctct

SEQ ID NO: 100520 - DNA, 1337 bp, Zea mays
  Clone ID: MRT4577_23187C.1
ccgggaacattctttttggagttgctctgctcttatccccaccgcggaaccagcaaaacccgctgcagcctttcgaattatggcagctgccgcagccgcgggcggagctgcatcagccgccgtcgccagccaagaacctatgaaggctctcggcacaggcatcctccgccgctccgcgccgcactggtccacagccgccgcttccttcttttccccacccttccgcccccgccgctgccgtcgcgcgcccgctcctgcagccgccgcgcgtaccccgcggtcccgcgcgagtgccaaggcccgggcgaagctcctggcggaggttgaggcccgggacccctggctcgcctccctctcgctgcttccgaccgacgacatccccagtgctgacgccaccaccaacgggtgggtgattggggtggatcctgacattggaggcgccatcgccgtcctctcgcctgacggctcgtctcaggtgtttgacaacccgttcgtgcacattgtggtgtcagaagtcatccgtaagcgactggacaccaagtcaattatccaactgctccgtggccttgatgcgcctcctggaactacggcatacattgagaagtctagcccatttccaactgatggaaagcagggatggtggagcactggtttctcatatggcttgtggattgcttctctagtggcttcggggttttcggttgtcccgattgcatctcagacatggaaggcttactttgggctaatgcgaagtgaaacaccaaaggatgatagcagacaagctgcttcaattttgttccctgacaaagatcagtccttgaagttgaaaaaacaccatgggcgagcagaggctcttctgttagcagcctatgggaaaggccttgtgctgccatcggggaagttcagcaaaacctcagtttgatgtctatggtgattgcagattgacttgccatttttttgggggtaaacagaggctcttctgttagcagcctatgggaaaggccttgtacgatgcctatggtgattgccgactgacttaccatttcctgtattgatggtactgcaaattttcatttcgcttaggaggccccaatcaagacattaaggttgaatctgctgtaagtttgcaaaccgtaatagagatcatagctaacccatcatttttcgtggaatgcattacagcattagacatttcccattgtgtccttagtgtggcaggctacctagatgaaatctggatgttgtaaacatgtaatgatggaaactggaatgaactggtcgtcttttcggtgaaagtggaaaaaaaaaaaaactcgagcccgggtcgactctagagc

SEQ ID NO: 100521 - DNA, 364 bp, Zea mays
  Clone ID: MRT4577_23188C.1
gctggaattcatgagacccacgcggactggctcacgacatagcccaatgcgatgacgccaagcgtgatgtttaactagagcagtcaaagaaccttatgtatttacaccaacgtgtataccatggccctcatttacgcgtgcatgcgtttactggaaacgaacataagaccgctctaagaaaacgagacacgcattagctgacacgtgacattaatctatgtatgaaaagccacaccacacgatcattcatggagtgatgccgaagtgagcacaggttatgaatgacgctgggatcttccgggcatttggttgatgaatgtacaaagaacaacagtggttcttcctctgtacattgtacaatatg

SEQ ID NO: 100522 - DNA, 661 bp, Zea mays
  Clone ID: MRT4577_23189C.1
ccggccggggaacaatttctttccagacccgcagtccgcagacgagagtggaagcggcgcacagacaggaagagaagccagtggcgctgtccctctccctcgggcgccccgggcccctcgccgctgccgccgaggcagtgagccatgaagctacccgcagccagcctcgcattcccggagaaatccttcttcggggggccgctgggcgccaccgcggcctccggcggggctccgctcccgagcaagcaggccacctccaccacctcggctcgaggtcgtcgcgaaggtgaagaagggccacaatatgaagacgcacgaggcggctgagaggcgggttcgggagacgaagaggggtaagatcgcgcggcggtgcgccgggaagcaacacttgctcgccaagaataacaccgagcgcaagaagaggctctcggagatggtgtcgagccaacaaaagtgactacgacaatgctacgggtgcactgccctacctcagagtgaataggtagaagcagctgagagctacgcggtcttcgaaaagtcattaggattcgttccaccagattgtaatgttgtgtatcttccactgaatttgcttcacaaaaatactgaggcatcatttcgaagctgcgcgttcccaagaccattcccatcatgtgcggcc

SEQ ID NO: 100523 - DNA, 444 bp, Zea mays
  Clone ID: MRT4577_2318C.1
ggccgggtagctagtacattgttggagcagagcagcggcggcggcggtggccatcatcaatgcgttgttggagaatggggatggggtcgtccctccttcgggccgtcttcctcctgctggcctgttgttgctccttcgccagcggcggcgtgaacaactacaacaccagcgatgccgccgccaggcagctgcagtggggcaacgccagggccacatggtacggccagcccaacggtgccgggccctacgacaacggcggcgcttgcgggttcaagaacgtcaaccagtacccgttcatggccatgacctcctgcggcaaccagcctctctaccgcgacggcaagggatgcggctcctgctacaagatcaggtgctccaagcacgccgcctgcttcggccgcaccgagaccgtcgtcatcaccgacatgaactacaccccgggcg

SEQ ID NO: 100524 - DNA, 1399 bp, Zea mays
  unsure (1)..(1399): unsure at all n locations
  Clone ID: MRT4577_23190C.1
aagagcagatcgagngccgttcgcttcattcntcctctggtctgcgccgcgggcagtctgctctgaggaggaaggagtccgtcaggtcgagatcgaaaccgactccgcttccgccttccccgccgttggggttcatcagcagttcgcagggtaaagaaagggcggccgcgatgtgggtggaaatcctgtgcggcctggtggtctacaagatcatccaacgcgtcttcttcgccggcggcgacgacgcttcctacctcgccgacctcgactcctcccactccgatctctgcttcgccgtcgcctccaggctcgagaagctctacgccggtcgatgcttcgtcggtctccgcatccccgaccccgacgccggcgagcgccagcatatcgacgttgtcctcgttaccaagagggaggtgatggtggtagcgatcaagaacttatctggttttgttgaggctgacaaggatggaaattggtcttgtcccactgacaagaagcataagcatgagatatttccaaacccggtattagaagtcaacagactagctgctaatcttcaatcatacttggagcaaaggggagcaaaactgcctgatgggcatatcatcgggagagttgttctgccaaatcccaactgcaggccttcctatactataagcacccaaccagaggtcatgctgtatgatcaatggaaggatctcaagacagactcaaagactggactctcagcatggattaaaggtgcatttactggaagcagaagtgacatgcaagattctgtactccagaatctacattttattctcagctcatcgcctatgtgggacaggttggaactcaaaggagacaaaaatgttcttggtgaattcattgaattcaaaggcaggcatgaggacgttcaacttctcaaaattctcaagaggtcaaaagtcagtcgcttcatcatccagaagtcaactctttttggtggttttggtaggtcacgagttcaaatattgtattctcctcgtgactatcgagctgaggggacttcatcttcagagttgaaagagatttctgtgaagcaatacacggagatcgttttccaaccactgcgttccaaaaaggctcggaagttcaagctgtccaatgttgtttctgtcacactgagtgcctagcaagcagaagcttgcctttcaaatttaggctagccaagtagccatatctcttgtattttatatttctcgtccgtgtgtgtaactcatcagttgtgtgcttctctgtttgcacttgtaattatgtgtctgttcttgatgatgagggaagtaacttacaacgacggctaactgaatatgcttcgtactgttgcttgacattatgtgcgctatggtacggggacctgattgaatatgtttcgtcc

SEQ ID NO: 100525 - DNA, 339 bp, Zea mays
  Clone ID: MRT4577_23191C.1
cccagggcaagctggtcgggtgatgggaggtagccagcctcctggctgtggcatggtgggtccaggcggctgcaggcatctcaacgtggaccactgggtgggtcagagccaggaaatggcccacctggctcttcacccccaaggttgtaccttttatgggagcagggttggggggcggagggctgctgcagatatgcaccagcctgggataccactatccaccagacctgttctgacgtcatgagtgtcaaacatgcctgccagccccgcatgagatgtcatgacaacactacgcacacccaataaagtgaatggatgacacacatcagatacaccaag

SEQ ID NO: 100526 - DNA, 241 bp, Zea mays
  Clone ID: MRT4577_23192C.1
atacattatgctgttgtttattataacagtgtcttgtaaaacatgccaataagggtcgtatacgcccgagccagacaagactaatcgctactcagcaaaggatactaattcctcctgttgcttggactagaagaccctttacccttgcctccagaatctgaaaccgtagggaggggaaccaagcgaccacccttgacaccatcggccttctctattgacttctgcagtgtgatggaaaatt

SEQ ID NO: 100527 - DNA, 410 bp, Zea mays
  Clone ID: MRT4577_23193C.1
catgaccaaactgagtgccaaatatttcagtagtgactattcagggtcgctctacgactaagaaaaccaacacatgatttaactatactgaatgctgatgcaagtgccaaacaaaatgagagattgcaagccattcaacgacggatacacagtgggtatgacgcaaaacatgtcaagaggactttaaactttccttcgcaacataatctaatctgcaagccaaacataataggttatcgcttcttagagacacaacagtgatttccctacggccagtaatcttggtgtgctgaccacggacacgaaggccccattaatgccttaaaccacggcggtctctgatgttcttgagtgtgtacaagatcatccctgagcttcatatctagagcattacacacagctggagagta

SEQ ID NO: 100528 - DNA, 215 bp, Zea mays
  Clone ID: MRT4577_23194C.1
cgtgtccatcggccacgtgatctgcgacggcgatctggtggggaagttctcgctgtccgacacctgcaggacaggggcggccgaggcgatcctgcagctgaggtcgatggggatcaagtcggtgatgctgaccggggacagcgcggcggcggccaagcacgcgcaggagcagctcgggggcgtcctggacgagctcgactccgggctcatgccgg

SEQ ID NO: 100529 - DNA, 593 bp, Zea mays
  Clone ID: MRT4577_23195C.1
agggaaacaaaccctttcaaaaaaaatcggggcttcaaattttcacaatcttaaataacccaaaacataaaacagtccagccctaaataccccagttttttattggggggacatgtagtcttgtacaaaggcccagttcccccaaatagtacaaatgggatttttagttccgaaaaactccagtcccttttggccccttttactttgattttccaataataggaccacaagtcctggacaacccaaaacgggggagtgggggcaaactggaaaacccataaaaaaactggggcccgggaaatcgttcaaacaaattactcaggatcaaaaaagcccaattttggacagggttgactgaaacaaactcaaaaatgcctaagcagcagttccatcatcagctttgattttgagctgggccttcgttgaggctgggtggacaatcctttcaacagggaaaaaggcaccccccccatttttttgagcataaaaaaaaaacttgtatttcggaggctgaccgcctgaacaatacatgggatgggattgttttgcatataacggataagtgattgggaattcatcaaagctactgccct

SEQ ID NO: 100530 - DNA, 385 bp, Zea mays
  Clone ID: MRT4577_23196C.1
atataaccatcctctggtctaagttccatgatggtgctagtgaggaacgcttaaattaactaacggacaataagacatactacaaatcaactgtggagaagggaagctcccagttgctatacgacactgggcaaaagcataacattcacgaagcttgcatgaaccaagactgacggccctttggaactgatactacacttgggactgctcatctctgattagcacgtgcgccgcgccaagagcagcgttcgtcatccaacataaataaccgctttgatcagcggccgacctttacctaaattcgggtgactgatacaagacactaccgggttttgtaccaaccaactgacgggtctaatgcacagacggccataattgttgcaca

SEQ ID NO: 100531 - DNA, 119 bp, Zea mays
  Clone ID: MRT4577_23197C.1
tcggcaagacattgtcgccgcgctttttcgccttgtcgcggagctccgctctcggcgcaccgtttacactagggccaaggagaaggttacatcaattttcgcgtcctacgatacaacgg

SEQ ID NO: 100532 - DNA, 262 bp, Zea mays
  Clone ID: MRT4577_23198C.1
tttgttttttaagccaagaaaaaaaatacatcaggagggacagtcacaattgagtagactgagaggaggcgtgaggggctggaccagagggccaggagggagcgaggcgtgatggggtgagggcccccctcccagcgcctgaagatggggaggagtggaataggctgtgggtagcagctactgcgattctccaccccgaccaaagcagttactcctcctgtgcccaggcccagcccatgctctgtggccatgcacctagcag

SEQ ID NO: 100533 - DNA, 354 bp, Zea mays
  Clone ID: MRT4577_23199C.1
gtgaggaaggtgcttgtgctccagctaaggttcataggttttctgaggtcctaccgggaggcgtcagcaggtatagctgacccagatgatgatatcgcatggaaagaaccgctgtttctgatacggcttaacctggaccagcgcatataactcaatctacaatgcgatcaagagctacagagaaggcttcatgcgtatgatcaacatctaaagataatacttaaagatgtgcaaaatgtcctacacaaccgttgagatagatgaagaaaaatatgaacaccttgtgcgccctaaacaacgaactattccattgctttttgatcgacgtgatggagtcatattgcattctccacc

SEQ ID NO: 100534 - DNA, 304 bp, Zea mays
  Clone ID: MRT4577_2319C.1
tttacataacccgcgcgcttacctcctgagggcatcaggacatggcggacacccctacccccaagatggtgctggtccctatcgtgaatgggactgagcccatggacgcggccattaccatcgacgtgctccggtgcgcggcagccgatgtcgccgatgtttccgtcgagccggatgcgacatccgcagctgacttatgaggcatgaagcttaccgcagacgcggtcctcgtggacctggcggaccatgagtcagatctcatccatgtaccgggaatggctgatttttcgacttttggagagag

SEQ ID NO: 100535 - DNA, 221 bp, Zea mays
  Clone ID: MRT4577_231C.1
cccacgcgtccgcttagaccggtcattacatgtaggcgaacactcaagttggagggacggtggatgtgtcgaccgtgacaccagaccgaccagatttcgctcatagtgaagtcaccttcgagacggagggtgtagaaagcccaaactttgcttcacctgcacgaccacaagatatatctaatatagcgtgaccaaagcacacttcaatggtcaatgttaca

SEQ ID NO: 100536 - DNA, 843 bp, Zea mays
  unsure (1)..(843): unsure at all n locations
  Clone ID: MRT4577_23200C.1
ttgggaccctcgagccggccggggtctctactccgtcacaccttggctctccttcggtcctgcacgggcccgcgtcagctgccatcccggagctcggagccgtcggcggcagcggcaccactccactcgcatggccgacaagcagctctccacgatcgtcctcaaggttgaccttgaatgcgagacatgctacaaaaagatcagaaaagtcctccgcacaatccaagacaagatgaacatcgagacgatctcgtttgatgagaagagcaatgccgtgacgatctccgggccgttcgactccgacatggtctgcaacaggctctgctgcaaggccggcagggtcatcaaggagatggacgtcaaaggcaacgagaaggacgccaaggccaaaggaggaggcggcggcgataagcccaaagacgccgccaaaccggcggccgaggaggagggcggcaattcggagatgaaggcggagaaggccgagaagaaggagggcaagggcgacaaggaggataccaagtcagacagggcagagaaaggaaacaaagacgggaaggcggaggccgagacggtggagttcgacctcgacgtggacggcgtggcctccgcggcggacgcgaagcccggcaaggccatggcgatgccgcccggcatgaccaaggccgacctcggcccgctcctggagaagatgatggcgccgggagccacgcagagcgtggtcgtgccgtccatctggcccgcgtccgccgggttcgtgtccggctactacggctgcaacccgggctacgaggcgtcgccgtcctactaccgcgttggngctggcgctgtctacggcggctacta

SEQ ID NO: 100537 - DNA, 167 bp, Zea mays
  Clone ID: MRT4577_23201C.1
agcttgattaattttattcaatttttgtatattctttaggaaacacatgtccgacattgagggccccattttctgactgcccgggccgcaaccacgcaacgggccaagcccgccgcattaatgaaccttcctacgcgcggcgagaggcggtccgcggattgggcgct

SEQ ID NO: 100538 - DNA, 164 bp, Zea mays
  Clone ID: MRT4577_23202C.1
caaatggccggcactttgaccaatccttaatggagcacacaccacagcattgtgcatattattccagtggcgactactaatacacgacaacaatttgttgacagaaatgctcattgaaatcgcgaaaaacgcagcctagtgggccaactattttatccatacat

SEQ ID NO: 100539 - DNA, 153 bp, Zea mays
  Clone ID: MRT4577_23203C.1
tgtactttggctgaggaattggttcgtcatatttatgtatgcattttcactctgtgtatagagtgtactagagtgggcttccctaacaaaagggcctatagcctaatggttaaggactttcgaatagcatctacaaatcttgggttagatttc

SEQ ID NO: 100540 - DNA, 621 bp, Zea mays
  Clone ID: MRT4577_23204C.1
actcctatgggcgattgggttcctcgaggccggccgggaacagttaccaaattgttctccgtttcttcacgcacgcgaagaaagacccatccacggcacaaaacattcacaggcgatgtgagctcccaatccactggttttctccgtccccatgccagacatttccttcatgcctccgcaggtcctcttcaccccccttgatttcacgatcatgtctccgtcgttcctctccactccctcgatttcaaggcacaaaacattcgctggcaagatgtcgaatctctccaccaaacgtccagcctcgtcaatgtcgtctagaagtggtgattatccgccggaatcttcctggacgacaccgacatgaatccatctcgcggcgactgcatattttgaggtatgcacatcctgtggacaactttgtgttgggtttaggagcaattccatgtatgccatcaaaaaatgtactcattacttgtgtgccactggccctacatataatacacacaaaaaagttatatatataccactcagtggcatgtaaggaatgagtataaaatttgatgactgctaaggaatgagtataaaatttgatggcaaaaaaaaaaaaaaaaatttgcggcc

SEQ ID NO: 100541 - DNA, 188 bp, Zea mays
  Clone ID: MRT4577_23205C.1
aatctcaaaacataacaggggaaacacgaattaagcaggggccccggggggttcacagacccacacctaaaccggtaaataaaacgggggggggtacatgataaactaagaccccccctcagatcaccaccattttattcaaatccaaaggaacggccccagggggagtccaccatgacggggggggg

SEQ ID NO: 100542 - DNA, 324 bp, Zea mays
  Clone ID: MRT4577_23206C.1
attaccatcccgaacttccagcgtgccccggactcgccatccgacctcccccccgtccgcttgcgcctccctctgccttcgcgcatgccggccagagcccgcgctcctgaccgcgccgccgcacgcatcctcgagcctccttccgcttgtcgtctctggcgctctctctgctgctggaccggggtgcgccgatccgttcgggcttccgattgttcatccgctgtgttagtggaattgaactatttttgaggctgcagaaagagctgcttgttgtaatccacatcttgacgcctgtaccagcgcgataaggaattgtgacatttg

SEQ ID NO: 100543 - DNA, 152 bp, Zea mays
  Clone ID: MRT4577_23207C.1
cgccagccgatcccctctacctcacggcgccctctcccatggccgtcggcactcaccgcaatggacgccgatcttacttcctacagtacgtcacgacatcgtatccctccttcccgtggacgcctgctgcacgcgttgtcactcccctgagc

SEQ ID NO: 100544 - DNA, 255 bp, Zea mays
  Clone ID: MRT4577_23208C.1
gaagcaaccaaaaagccgatcattctcttcccaaagaacatttctaacaggaacaaacaatgctgatcagaagccagccagcaaaaggtctattatttccaaaaagcaaacttttgtaaacaatgtacaggattcatctgttgagcgacttataagggaggtgacaaacgataagttctggcacaatccaggttgcttctttattgtcatgtttgatttggttgtatatgatttttaccttactggaaaatttag

SEQ ID NO: 100545 - DNA, 391 bp, Zea mays
  Clone ID: MRT4577_23209C.1
ccacgcgtccgcggacgcgtgggcgcgagctgcgcccttttttttttgttttttttttgggggggggtttttttgggtgggggggggtgttttttttttttttttttttttttaaaaaaattaaaaatgtccttttttttttttggggggccccaaacttttttttttttggggacaagtttgggaaatttttgataaaaaatccacattcccccctttacacaaaaaatttttttccccgggggggaaaaaatggcttccccacaagggagtcccctttgggggttttaactcttttacacctcaagtcgctccttctttgattaaataagatccttgggttggaaaaaaaattcctttttccctgaaaatcacccctttgttttttatt

SEQ ID NO: 100546 - DNA, 775 bp, Zea mays
  unsure (1)..(775): unsure at all n locations
  Clone ID: MRT4577_2320C.1
ccggccggggcgtgagagnatcgtgggcgacggcgtgcgtccctgagtacgtcgtctgcgtcgtcgatcgccaccgagctgcaccaccggcagccgacggcaacacaggattgggtccgaacctgcagcacgtttcaacagagacactgacctgtaggatttctgcaaccccttgaggtaccatcctaggtatataggtggacatctcgatggacttcatcaaagagctgtccgaggttagcaattagcagcaagtccatcgtccctacagtggtcgatcatttctctaagtacgtgcatttttttaccattgaacaccctacaccacgatgtccaccgctcgagctttcttcgatggcatcatccagttgtatgagtttccctcctccatcatcagcgacagggacttgtgttcaccggccatgtatgactagacctcttcaagatggcgggcgcaacgctgcccatgagcaaaaaaaaacatcctgtttggcaccaaaaagggccagcggacggtccggccctagagccggacggtctgcggtccggacagtccgcgcctgtgggccagacggtccgcgcctgcgcagagtagattagggttccgagttttgtgctatgtttgttggctagatttgcggaattagctcggaatccagtcgtgtaaagggtccagcccccctcctctataanaagtgaggcatacggccgatttgtaatcatgatcaatcgaatcaaacacttctatctaaaaaaaaaaaaaaaatttgcggnc

SEQ ID NO: 100547 - DNA, 465 bp, Zea mays
  Clone ID: MRT4577_23210C.1
ataactttttacgccactaaaaacgaatcaataaatagatcaatacaatgagtggtgtaccaaatggtattgtatctagatatacattattattgtacaactatcactgcacaaaaatcaaaacaaatcctttgcataagaaacacacatcacaccaactactaatggagttgatctgaaaataaacacgaactgtgcaagagatcagagaactccatgaccttatccccttcgtccgtcccctcgtttccaatcccatctcttcatctctaggtgagtgtgcaaggcgtgttgaatcattgtttcacctgatcgatgctgtgaagtgattgcatctgatgaaagccagcttggggaaactggtgaaaaacctacactactatatacagctcctgaactgcggcctaaccaaactcaagcaagatgatctgtcctcctgtcaatgccatgcatcaagctagcgga

SEQ ID NO: 100548 - DNA, 222 bp, Zea mays
  Clone ID: MRT4577_23211C.1
cgaagccggccgggctctctctctctctctctctctctctctgtgtgtgtgtgtgtgtgtgtcctctcgttctccttacttaggttccagtttcttatttcgttaatttattattgttatgtaacctagagagcaaggttgttatgtgtatgatgctgctgccccttgtcttatatggacataatttcgagctggatgttggctgggcatcgatctagtcat

SEQ ID NO: 100549 - DNA, 301 bp, Zea mays
  Clone ID: MRT4577_23212C.1
tggtaggaaaccgtccgaccagcgccggaccagacccgccggctggtgtttctggaggagactgctgagaggacgggatgcaacagaggagaggaccgcacccatgtagtcaccgcaagcctggagcactgaactgaaggaacttagtcgacctttcaagccccattggggaagcaccagtgatgtgtgagcttgtccgtaaacccacgaaaagtactggatgagggaatgccgtcaatgtaaatgactatttaaggctatgccacagggcttggcagcgacagtatggaaacacctatgg

SEQ ID NO: 100550 - DNA, 228 bp, Zea mays
  unsure (1)..(228): unsure at all n locations
  Clone ID: MRT4577_23213C.1
ggttcgtccagtcttccgtccttccgctctgggggttatcacatctcccccaactcgccaggccattcgtcctggtcggactgctatcgatgcggtgaagaanaccattcatctgatcgacgcagttcgctcgctgcccatggcagatcacgaggctactgatccaaaggcgttcctagaggaacggtctaaggctcagtgcgtgtagcaggaggatgaatatcagaa

SEQ ID NO: 100551 - DNA, 2365 bp, Zea mays
  Clone ID: MRT4577_23214C.1
ctcgagccgctgcgtctctcttctctctctctcgctctttctcccggagtagattttattcctattcattcctcgtgtgagtgaggtccctccgctcctcctctctctctctctctctccctctccgcggagtggagccggagtcgagaggcaggcagacgagacgaggaatgcttccttcttcccatgccgccgccgtccctgttcttctcctccctccctaattccagtgctctcacgtaccagatctgaggccgcggcggagcgtgacgacgacgaagtcggtcaggatgagccgcgaggataccctgaaagtgcagaccctcgagctcaaggtgaacatccactgcgacggctgccttaagaaagtcaagaaggtgcttcacaagatcgatggggtgtaccagagcacggttaatgcggcggagggcaagggtgacggtgtccgggctcatggacccggacaccgtcatcaggaagctgcacaaggccgggaagccggcgcagctgtggggcgccaccgccaagcctgccgtggcgacccagctcgagaaactgcagctcaaggatgccgggggcaagggccagggccagccgcccaagaacgcaggcggcaagggtcagccgcccaagaacgccgccggcaagggccagggccagggccagaagcagcagcagcccaagggtggagcgggcggcgccggcgccggcgcgaaagtggtggcgctgccgcactcgcagccgacgccgcagcagctgatgcagatgcagcagcagatgcagatgaacgggatgaagtttgctcatccggagctcatggccatgggcgcaggtcgcatgccgatgccgatgccgttcccggcggcagcgcaggcgcaggcgcaggccgccgcggccaaggaccccaagaccgtcaagttcgacctcccggggggcgaggagttcggggacgacggcagcgacctcgacgacgagttcgacgaactagacgacgtggatttcgaggacgacggcctcgacgacgacgacgacggcgacctgtacgacggccccgggatggtgatgaagcccatgggcatgcccccggccgctgctgccggtggcggcaacggaaacggcggcggcaagaagggtggcggcgggaacgaggtcccggttcagatcaatgggaacgccagcaacggcggcggggcgaagcagaacgggggcggcaaaagcggggccaagaacggcaagggcggcggcggcggcggcggcgtcgttgccccgggcggcgggaaccaggctgggcagggcaagccgaaaggcggcttccccggcggcgccggtctcggcgggccgatgatgggcggcgcgccgccgccgcatgcgggcatgatgatgaggccgccgaacatgatgggcggcgcgggcggtttccccggcatgggccagatgggcggccacccccacatgggtggcggcggcatgccgcaggcaggcgggggcgccgcgcacggcatgccggctggtggcagcatcagcatggccgctggcggaatgcctggggccgggttctttccgcgcggcgttggcggcggcatgccggccggcgcggagatgctgggcatgtcgcagctgcctccgcagcagcagcagcacatggcggcggtgatgcagcagcagcagcagcacatggctgcgatcatgcagcagcagcagcaacagatgatgatgatgaacgggcacggccacggccacggccaccatggccacggcgggtacgggtacgggcgcccggcgatgccgcagtacccgccgccgccggcgtactactacccgatgccgcagcgccacccgcacgacagcatgttcagcgacgagaaccccaacgggtgctcggtgatgtgaggcgaggcgcggcggcggcctgcggggggctccggagaaagtgaaccaggcaaccagccagccagccaaccggaaggagggagctcgggcccgtcaggtcggaggcggccgccgtgagtggaagagtcgtcgtcggtatacatgaagaaaaaaaaaactagctatatgctatagcaccagccgtaacctcgccgccccatttcgttttcgtctttcccctagtttgttttcacctttggtactttttgtttcccttctctgaacaaagaaagagcggcatgcagcttcctcttccttgagtggaaggtaggtatagtggtaacaacaatgatagtggtgatgctagctgatggctgtcttccttcgcttctttctttcttgcttgcttgcttgcttgcttgcttgccccatatctaatgaatggacaatgtgcaagagcaaaaaaaaaaaaaaaaaaaaaaaaaaaaactcgaga

SEQ ID NO: 100552 - DNA, 306 bp, Zea mays
  unsure (1)..(306): unsure at all n locations
  Clone ID: MRT4577_23215C.1
ccggccggaccagacaccanacacagttcgtcgtaggcagcgagcgtctctcctctccacgcatcgcgccaaggaagagagagagatcgccgctccccttctcggcgtcggtggtgcgggtgccctccctcctcgagcgagatctgtctggtcacagatctatctgacaaaatggtgaagatctgctgcatcgccgcctgatatgtgcgggagccaagccgggtggacgctgtcccgctgagctctcccgacaggggctcgtgattttgacgcctgcgctgtatccggggggaaagttggcctcct

SEQ ID NO: 100553 - DNA, 1755 bp, Zea mays
  Clone ID: MRT4577_23216C.1
gagtgagaccagctcagccggaggggagaggctgctcgcctgctctcttcttctccgtaacagaaacgatggacgataacccttgtgtccattccgaaaataacttgttttcttctgttctaatacaaatgcgctgggcatggattggtgggtgttgcaggggtgtaccagagcacggttaatgcggcggagggcaaggtgacggtgtccgggctcatggacccggacaccgtcatcaggaagctgcacaaggccgggaagccggcgcagctgtggggcgccaccgccaagcctgccgtggcgacccagctcgagaaactgcagctcaaggatgccgggggcaagggccagggccagccgcccaagaacgcaggcggcaagggtcagccgcccaagaacgccgccggcaagggccagggccagggccagaagcagcagcagcccaagggtggagcgggcggcgccggcgccggcgcgaaagtggtggcgctgccgcactcgcagccgacgccgcagcagctgatgcagatgcagcagcagatgcagatgaacgggatgaagtttgctcatccggagctcatggccatgggcgcaggtcgcatgccgatgccgatgccgttcccggcggcagcgcaggcgcaggcgcaggccgccgcggccaaggaccccaagaccgtcaagttcgccctcccggggggcgaggagttcggggacgacggcagcgacctcgacgacgagttcgacgaactagacgacgtggatttcgaggacgacggcctcgacgacgacgacgacggcgacctgtacgacggccccgggatggtgatgaagcccatgggcatgcccccggccgctgctgccggtggcggcaacggaaacggcggcggcaagaagggtggcggcgggaacgaggtcccggttcagatcaatgggaacgccagcaacggcggcggggcgaagcagaacgggggcggcaaaagcggggccaagaacggcaagggcggcggcggcggcggcggcgtcgttgccccgggcggcgggaaccaggctgggcagggcaagccgaaaggcggcttccccggcggcgccggtctcggcgggccgatgatgggcggcgcgccgccgccgcatgcgggcatgatgatgaggccgccgaacatgatgggcggcgcgggcggtttccccggcatgggccagatgggcggccacccccacatgggtggcggcggcatgccgcaggcaggcgggggcgccgcgcacggcatgccggctggtggcagcatcagcatggccgctggcggaatgcctggggccgggttctttccgcgcggcgttggcggcggcatgccggccggcgcggagatgctgggcatgtcgcagctgcctccgcagcagcagcagcacatggcggcggtgatgcagcagcagcagcagcacatggctgcgatcatgcagcagcagcagcaacagatgatgatgatgaacgggcacggccacggccacggccaccatggccacggcgggtacgggtacgggcgcccggcgatgccgcagtacccgccgccgccggcgtactactacccgatgccgcagcgccacccgcacgacagcatgttcagcgacgagaaccccaacgggtgctcggtgatgtgaggcgaggcgcggcggcggcctgcggggggctccggagaaagtgaaccaggcaaccagccagccagccaaccggaaggagggagctcgggcccgtcaggtcgg

SEQ ID NO: 100554 - DNA, 463 bp, Zea mays
  Clone ID: MRT4577_23217C.1
cctccgctcctcctctctctctctctctctccctctccgcggagtggagccggagtcgagaggcaggcagacgagacgaggaatgcttccttcttcccatgccgccgccgtccctgttcttctcctccctccctaattccagtgctctcacgtaccagatctgaggccgcggcggagcgtgacgacgacgaagtcggtcaggatgagccgcgaggataccctgaaagtgcaggtgagttcttctgtttgcctgtcattttagtcaatcaggcagggctggccgctgatcccggttcgcgctcaccctgcatgccatgtcttctcctgcggcgtttttctgtctgggcgcacagaccctcgagctcaaggtgaacatccactgcgacggctgccttaagaaagtcaagaaggtgcttcacaagatcgatggggtgtaccagagcacggttaatgcggcggaggg

SEQ ID NO: 100555 - DNA, 570 bp, Zea mays
  Clone ID: MRT4577_23218C.1
ggtaccgcggccctcctcgagtttttttttttttttttttttttttttttttttttttttttttttttttttttttttttcttttttttttgggttttttaagaaccaccaaggcgtggggcgaccatacccgggccacgaaccaaccaaaaggggaggcggggaacaaaagccccccgggaaacatatttaccccctacggagaaaaaaagaaacgggcgggcgaacaacccgggagggcccaaccgcgcaaatgtgccccctggtgccccgaaacacccggcccccgtaggcgcttggcgccgaacatccaggtggggcctcagccgccggtggtaaggggtgggcccgggggcaccacggcctgatacggacccccctgaattgggcccaaagtcccccgcgaagagcccagcaccctggcgcggggggggaaacccaaccttgcatggaggtccgggacccccaacgggttttggaaaccccggggggggggaaaaaactggcccgaagtcccaaccccccggtggccttactcccattgggggggcccctcgggggcgaagaccc

SEQ ID NO: 100556 - DNA, 2724 bp, Zea mays
  Clone ID: MRT4577_23219C.1
gaggttcttgctcgagctttaacttcgcctggcccgagaggccgagatcaatactagacctcgactcgagtctcgagtcacgtttccgccgtcatctgcatcaacggggtcaggcgactgaacagtacaggcccttggccgccgccgccgccgccgtactccaggtgcccaggtcttcgtccgaccctttgccagcgacgagcacccaccacaccaggatttcatcatggttgattctgttcatgacaatattgtgctgaacaagtgtatcaaggacatccttgcactaatcaaaccagtagaggatgatagaagcaagcggttatccacaattcaggagctggaaaattgtatccattctcttgcatctctgtcaggtgctgctgtcaaaccgtttgggtcttttgtatcagatctttactcaaaatcaggtgacttagatttgtcagttcagtttgggaatggttcaaaccacccaataaacaagaaaaagaagcagaatgccttgagagatgttaggaaagctttactaagtcgaggtgttactggatacatgcagatgcagttcatcccacatgcaagagttccagtccttcaatatgtgagcaagcaatttggcatctcctgtgatatatcaattggcaactttgctggtcgaattaagtccaaaatcttctactgggtcaatactgtagatgagcggtttggtgatatggttttgctgatcaaggaatgggcaaaagcacaaaacattaacgatccaaagagcgggaccctcaactcttattcgctttgcctacttgtcctctatcattttcaggtgttgtttcttatacctaagtatctctctatgtgttcctacttatttatggtttcactaatgctacgtttggacgtcgatattggagaggatggaattgaattgggttaagtaccaaatcatacattgcttttaaatgaggtgtaattcctggacgaatatatgagatccacaatcaacaggtgtataatgcagggttccaaaccgacggtccgcaccagaatcagcagcggcgaaagggatacacatcaaaccatcagactaacaggctttctgcgacggcagcgaggtacgagcctgttcgtggacagtttaacaacggatcgacatgggactcaaggtcccaagcaccgggcagtgcagctctgcgaaggtagccgtcagcatctcaggaggatagtagtaacaggcaaatcggctggattttgactgctgggcagctcttccttgtgtaaaaaatttctagcacttctttacgggtggacaactcttccttatgtaaaaattgctgttagcagtcggttcgtagtatgtgtcaattaattttttttaaggtgtgattgggtttatttattgtgtctcagaaattcatcgcccacatgctcacgtatcatgtaaataaagtacaatagctggtccatgacacgctcaaatattcttactgtaaaaagattgagcgaatccagaacaacccaagttggatgaggaaatcttaccatttatttgttgaagatcctgtagagagacctgataatgccgctagagcagttagtatgaaaggccttgacctcattgctattgcattcaatgatgcttgtcacaagtttaagtctctggaacatatcgaccggaatgaattattggcactgttgtgtacccctgttgttcgcttgaaacttggtgtgagagtcagagagaactcttacccaaaatctccaaggaataatgtgcatagcaggattagaggacagatgtggcgtgatcgaggccaagcacccagcgcgagagggtttactggaaccagatcagtccatgaaaatccactagcgaacactacagcacatgaaacagcagtgcaataccacaaccatgtgcagccgacaacagttcggcaaacagccatccgcaatcaagtaacaaatactgcagtgcatcagaccgcgccttaccagaaccatactgctcgacaggtgtatcctacttggtcccagacagctgaaccctaccagaatcataatcagcaggtatacgctactgggtttcaaacagggccataccaaagccataatcaagtccatgcttatagagcagggttgccacctggaggaatatatgagatccacaatcaacaggtgtataatgcagggttccaaaccgacggtccgcaccagaatcagcagcggcgaaagggatacccatcaaaccatcagaataacaggctttctgcgacggcagcgaggtacgagcccgttcgtggacagtttaacaacggatcgacatgggactcaaggtcccaagcaccgggcagtgcagctctgcgaaggtagccgtcagcatctcaggaggatagtagtaacaggcaaatcggctggattttgactgctgggcagctcttccttgtgtaaaaaattctagcacttctttactggtggacaactcttccttatgtaaaaattgctgttagcagtcggttcgtagtatgtgtcaattaattttttttaaggtgtgattgggtttatttatcgtgtctcagaaattcatcgcccttctccgtatgctcacgtatcatgtaaataaagtacaatagctggtccatgacacgcagaaatattcatcatgtgtgctgctgcctcacgccatatatgagcttttaagatttttaggaatcaattaaaaaaaaaaaa

SEQ ID NO: 100557 - DNA, 606 bp, Zea mays
  Clone ID: MRT4577_2321C.1
tcgaggccggccggggagctttcttataggtgggttggcttctcctccccctccgggtcgggatcggcttcgtgaggttctccggagatctggttctcatgcgcgagctggatctagatcggcgcttctgatgttgataccactgcttcatacgcggactcgcctgggccactgacgaacagcgtccctcacacaaggtcttcggcacctatggctaaggcctcgagacgaggatcatcctgacatccggacactatgaggactcgaggtttccgctgacttcccttgtcctatgaggaagtgaagcagaacctcctcgggggcacgaacctcaaggaactgaactgacagcctacatcgacgggcaatagggctggtcccacgggggacgtggtacccgctggtgggggtgcgggggtcccctatgaaggagcacctacaggtggtgtctccgacttcatgactggggctggtacggcactggcagccactgctacggtggcggcccaggctacggtggtctggttgcccgataacgcggtggcaatcgttgcggagaataccctgactccaagctgatctgtaagaaatgactgatgaggcccg

SEQ ID NO: 100558 - DNA, 338 bp, Zea mays
  Clone ID: MRT4577_23220C.1
ggacccgcggcccaaaaaatcgggggggattgttccacaccccaacttctttgggaggggggtccaaaaaaattccctaaaagaggccggcccccttaaaagattgtttcctcggcgcccccctccgaaacccaaaaaaaatcccaatcccgggtaggggctccaaaccccgtaggccccccttaaggtggcatgcccccctgtacaaaaactggggccacccaagggcccccccccccccccttggtagaaaaaggggggggggggggggggtaaccaataccggggcccggaccttttgggccaaaacccaaaagttaaaaccaccccccctttcc

SEQ ID NO: 100559 - DNA, 350 bp, Zea mays
  Clone ID: MRT4577_23221C.1
acccacgctgcaccaccctccgctcaccaatcacactaactgcaatactactcacttatactatagcctctaggaacaaactacacacctaaaggcaacaatcgctcacctaccaaaacctccaccactactccacacaatccaataaaaccctcatctacaacacccctacaattatgctctagtaccaatacaccaacaagctcactatctaaccaaaatgcccagtcaccataaagaatatccaatgaattccacaccttataccttcttcatacaacaagtctatgatgacaactaacctcatgacttttaactctccatattataatcgttctgtcttgtacctc

SEQ ID NO: 100560 - DNA, 452 bp, Zea mays
  unsure (1)..(452): unsure at all n locations
  Clone ID: MRT4577_23222C.1
gcaaattaaagaggaaaaacaagaatctgaatttctaccagcagctggaggaacatttaacatctctgtcagtggggatattgatggcttaattactcaggctttgctaacgggtaacttcgagagtgctgttgacctctgtttacatgataaccgcatggctgatgccattatattggccatagcgggtggacaagaactcttagctcgaacccagaagaaatactttgcaaaatcccaaagcaaaattaccaggctaatcactgcagtagtgatgaagaactggagagagattgttgagtcttgtgatcttaaaaattggagagaggcgttagctgcagtgttgacttacgctaaatcagatgaattttccgccctttgtgatcttctgggaaccagacttgaaagtgacggcgatagcctcctgcagactcangcctgtctctgctaca

SEQ ID NO: 100561 - DNA, 224 bp, Zea mays
  Clone ID: MRT4577_23223C.1
acttgctctcttgcgcttcctaggcgcttttgcacacatagcgacggtagtgcaactccgcgttcactcggacacacaagctcactgccgtctcctgatcacgaaagctcactccaagccgcccctctgctattctacaaaccatctactccaaagtagatatcaaccgcttgagcactgaacattacagcctgtacgttatctccatttaccagcacttcatg

SEQ ID NO: 100562 - DNA, 224 bp, Zea mays
  Clone ID: MRT4577_23224C.1
ggggcgggcccatgcgcactgccctcggtggcaggcgcagacgctatgccgggccagcagctacgtcggggtggagcacatcgacgggaccaccgcgtccgaaccaggcccagacccaggcccagtcgtttttttttttcaagccgctcacggttggggggggggggggcggtcctggaccggaactgcaggatgggcccgggaagacagggacggggaggcca

SEQ ID NO: 100563 - DNA, 176 bp, Zea mays
  Clone ID: MRT4577_23225C.1
gagctccagctcgggtgcgcatgggagagaagactgatgactgatgaggcacacgtacgtaatgtgtcgtcgtaagtgtgaaccatgcatgcatgcaggccggtgagtgtaggggtaaattaaatggtcgtcggagctgtcattatgtgaaccttatttccttttatttattacac

SEQ ID NO: 100564 - DNA, 608 bp, Zea mays
  unsure (1)..(608): unsure at all n locations
  Clone ID: MRT4577_23226C.1
ctcgagggctggccgggngcaatcggtcagtagcaattgcactggcatagcaaattagcaatagcaggcgatcaggccttggagtcgtccgagtgctgggacggaagccgtgtaggcgtgtactatgcagcacatagctatttgtttttttcggactacacagccagctagccggcggacagggtactgaaagtctgaaacacagcacagcctagttcggttttttcggttaaaccgaaaaccgaaccgaactatacggttaaccggaggtccgggttttccttttctaaagataatttcggttggcatttttcaaaaaccgaactttaaaaaaaccgaaaaaccgaaccgaaaaatttcggttaaccgagtgcccagtcctaatggtcattcaataatcagggtcagggctagttttagaactctatttttttaagttctagtttggaaccttatttcgccaagtggtttctatttttctaagtgaaaataaactaattttatttgagaaaaaaaaatattttaaaaaatagagtttcgaaattagctctaagagatttctattttttctaaggaaaaataaactaattcttttttaaaattaaaaa

SEQ ID NO: 100565 - DNA, 1243 bp, Zea mays
  Clone ID: MRT4577_23227C.1
gtacctcgaggccggccggatcatcatccgttctcgagcaagaatgaaagaaataagaccgtgggaggatccacaatagaataggggtatataatgactcaatgactcaaggtaagaaaaaaacaagtcattttttcaaagaccagggtcaaagacagtaaatgctagtaccagtaccttagttactccagcagaaacattagaccttacaaatcaagcatgtgtttcaaatggtgatacactgcctgaaaacatgcagtgcacaacttcagctgcaaaagttcaggataacacagatgcatcgtcatgttcactttcaacagacaagtctaatgctgcagcattggagtggcagaggatacagaaaaagatgaagatgacactaccacgttgcaaagggcatagtgaaccatgcattccgaggtctgtgaagaagggccctaatataggccgtttgttctatgtctgtgctcgtgctcagggacctgcatcaaatccagaagccaattgtggccactttcagtgggcacctggaaagtctaaagagaagagctctaaagagaaacgtctgtgacttcatttttctcccaggaatccaggacattttgcttccaatgagtctggtacatcaccttgtcccagcatactgatgacgtggcgatgtatttgtggagaggtaagctgatcaagggcctgtttgggaggtctggctctgactggctccttgctctagtaaccggaggggccacaaaacgtgtcttcaccagctccccattgttttgaaaaggacagaaaacaacttcatgaacattgcagccacagtgccatggataagctacagtagcgcatcagctggaacagccaagagctgtcccaaacgtggcctgaacaagcacttctctcaggcaggtacatattctaatcctgtaattagttggttgacactaacatgcagccttccgttggttggctaacaactaagggcttgttcggttagctctcaatccatacgtacggattgagtaggattgggtgcgtttaaattccaagcaagtcaaacttctttttaattttttctaatctctcagggatcttctcagaagttatttatttttccgcctggtttagcgtattcaaattcttaatagacaagtcacaagtggccatcagtggagaaatcttacagtcctgtagtaatgttttatatgaaaactaatatggacattatagtattattgcccat

SEQ ID NO: 100566 - DNA, 548 bp, Zea mays
  unsure (1)..(548): unsure at all n locations
  Clone ID: MRT4577_23228C.1
tttttttttttttnnnnnnnnnnnnnnnnnnnnnnnnttagcatatattaatatactttaaatcaatttagttttttaataaataaataagacaagtcggtgataaaaaaatcaaatgaattactaaattggatctgctctagaggggccagaggggcgggcaactgccttttaactcgtcaggcctccatttgtctctggactgaaaggcactagcggcgggcgccacctgtttatggatcagaacaagagtagaggggcactaagaatcgcccggatttgcccctcggaaagacgaaacccctgccacgatcgcgcggcatcatcttcagcacggcgccgggcgcagccgtagacagcttgtggtagtggcgagatcttctctccgcgttggatgccggtcttgttcggcacgtcggtctcgtcaaatatccatgcggccagtgaggggaggcaaagggccggggcaaagcttgttcttgatgcctgcatagaagggaaaaaaaatagcattctgtcaaatgaaacaaggattctggccattctgg

SEQ ID NO: 100567 - DNA, 378 bp, Zea mays
  Clone ID: MRT4577_23229C.1
ccggccggcatgggcgagggattcgagcggccgcccgggcaggtataaattcttgaatctgttcagttttggttcaacacagtgaggaaaagaaataaagaaattaagaatgatgagtaacatatatctatagaggggaggaggaacaaaatcaagaaatgggacattatatcctccaccaacatcagcttattatgtggagaattctgaatcacagtggacatcttggttggttccaatgattgtggttgcaaatgtagccatgtttattgtaatcatgtttgttaacaattgtccaattaatattattgacagtttttacagcataggctaaaaatgtgttgcaagatttcttgggtggctttcttttcaacccct

SEQ ID NO: 100568 - DNA, 285 bp, Zea mays
  Clone ID: MRT4577_2322C.1
gccaggtgctttcagtgcggaacggctaaataaggggcttggagtccggggcgtgctgctcccgcagaactgagtgggcgtcgccatcctgaactactccaccagcagggtggcacgcgaaggctaatactgttgctcacccaatcctttacttaatagctgttcgcttattccggatagcacaacgcatgcctgtacggggtgcggcacacacatgcccaagtttatttcttaggtgctgacctgacataaatattctaggttggatgatgacctgaatcacct

SEQ ID NO: 100569 - DNA, 524 bp, Zea mays
  unsure (1)..(524): unsure at all n locations
  Clone ID: MRT4577_23230C.1
aaccccccggggggggggtttttttttccataaaaatactcancatcatccaacttctattctattntaaacaaaacccacaaaattcattaaagcaatacccccacaaacataanggttnttntcccctaaacatantancacaaacanctnaaatnagggggggggggggggtaatatttnatnttnaatatcaaatttttaaacacattaaaaaagtctccatcccatcancataatacttctccaantcancctcnanttcttcaactaactttnncttnctnccctccttnccaccaccaccacccccaaatccaccactacccctcccacccctctaataaaatcttcccttcnncatacctnctnnnncancacccctcnntncactcctcacancattcctancatnnccaccattnnanactnnnaaaaacancanatccanttnnantattnntcccaactatctctatcttcatgggcttaccantcaattnaacattnttatatttcttcac

SEQ ID NO: 100570 - DNA, 368 bp, Zea mays
  Clone ID: MRT4577_23231C.1
gagaggcgtaagtatattggcccgttctccgagcagacgccgtcgtacctgaccgtgtagttcttcagcgactacgggcggtacacctcgggcctgtcggccgacacggagacattcgcgcgcaaccggtagctggaggtgatccactcccggtgggcgatgctgcgctcgctgggctgcgtgttcccggagatcctgtccaagaacggcgtcaagttcagcgaggcaatgtggttcaaggccggcacgcagatcttctcgtagggctggctagactacctgcggaaccgtaacctgatgcacgcacagagcatcctggccatctgagcttgccatgtggagctcatgggctatatctatggctaccg

SEQ ID NO: 100571 - DNA, 398 bp, Zea mays
  Clone ID: MRT4577_23232C.1
taagctcggaattcggcttgagacttatgccgcggccagtcttccaactctactgccccattcccccgttttttgttttttaccagccgcggggtaggccctcacgacccccacttcttgcctctcctaatctcacttgctggtgtttctgctgaccaccgccacatgggacctgcctagatgaccaactatgcgcataacggcccgatatccaagaggaacatacgatgcacgctcgaagcaatactgacgtgcatgagtgagaaggtctctgggctttcagggcaaacgtctaacacaaccatgtaacttcttggcccctacagggttacattcaccatacctgacgcctactctacatttatcaacgaacccccttgatctcaggcatttgaggc

SEQ ID NO: 100572 - DNA, 536 bp, Zea mays
  unsure (1)..(536): unsure at all n locations
  Clone ID: MRT4577_23233C.1
aggccaatccgcccttgcccggatccttgtctccctkgatcccgtccbaccgggtwgshgatgcccgtctwgccrcrtctggcaggcyggaasttctatctcsgagttgctcccttcttwgcccgaccgacgggsacagtkmctcgcygttasccagggccaggcygtctaccyaccaggataaggtgttaggccggggaccacccrgctcchgttgctagccaccagccccgtccygctcccggggccccsagttwgtcttggcaggschgttagctcccggtccmgtcmggttwgggacyttcbaaggtttgccactcttttattcsgtctngctcttgtctkaacctggawaaattttkgggaacnaatgggaaagagggaagagtgakagckcttgacamcatctbaatggaagaagatggcggaaaaagragggaawggtgggtgrgagtgawggcttccagaccagttagartbagacccascatgttttacmaagamkyggggtggagatttggctctggaggaagatg

SEQ ID NO: 100573 - DNA, 362 bp, Zea mays
  Clone ID: MRT4577_23234C.1
aaatgctaatgcatttacttgattcaagtttatttagtaagtagaaaaaacgtggtgcacaggttctcatgaaacagtacaccgaatgacaggggcaaagaatggcacaggcaaatcaagaaacaatttgttacaaaaaagggagggggccaaaaaaaaaaaaaaaaaaccttccttgtgaaaattaaattaaaaccccaaaagtgtgaaaagagggaaacaacgtaacttgaaaaaattgaaaaaccaatattggacaacgagaaaaaagaaaagggggtaaggacgaaaggaacgggccaaaggggtgtataaaaacccgtttaaggaaccccggggaaggaaaaggaactcttttaggg

SEQ ID NO: 100574 - DNA, 308 bp, Zea mays
  Clone ID: MRT4577_23235C.1
tcgctctctttctttctttccttcccaaccaacaacggggccgggcgcacaacaaccaattttaccttcccttcccaacaacaattagaaccaaccgtcccggggcggaaacggtttccttccttccgcttccgaaaccttttccggcttggccggcgcttccttcaattggtccgcggttcccctccctcccgatctaaaccacccgccacccggtttcctctcccccttctttctccctaaaaccagacgctcgccccccttttctacacatatcttcttcacacgaccagcgggaggtacgagca

SEQ ID NO: 100575 - DNA, 1822 bp, Zea mays
  Clone ID: MRT4577_23236C.1
acccacgcgtccgattagttgatattatttggtttacatggagaatgaagcttttgtctgggcgaagaggggttgctatactgtatgcttacatgttcctaggtcttggttttctaagagctgtgtcccctgactttggggatcttgcaaaccaagaacaagaacttgaaggcacgttcaggttcatgcactcaagattgcggacacatgctgagtcaatagctttctttggtggtggatcaagggagaaagctatgattgacgctaaattcatgacattgctcaaccactcgaaggttctattgagaaagaagtggctttatggtatttttgatgattttgtgacgaaacagcttcctcataacgtgacatgggggctgagtatgttatatgctttggagcacaagggagaccgagctttgacttcaactcaaggagagttggcacatgctctgaggttctaaatatctgccttgtcacacgtgaacattgtgacaccatcgcaaaagctattggctagccaactgtcttgtgatgtatctcaagggaaaagccttcttgtgactggtccaaatggtagcggaaagagttccatctttagggtgcttcgaggcttgtggcccattgcttctggtagtcttagcaagccatctgaaggaatttttaatgttcctcaacgtccatatacttgtcttggaaccttgagggatcagatcatataccctctctctcacgaggaggcaaagttgaagatgctctcaggcgaaacaagtgacaagtctacagcttccgagctgttggatgatcacctgaggacgattctagagaatgttcgcttgctgtatcttctggatatacaaggtttggaaccttgagggatcagatcatataccctctctctcacgaggaggcaaagttgaagatgctctcaggcgaaacaagtgacaagtctacagcttccgagctgttggatgatcacctgaggacgattctagagaatgttcgcttgctgtatcttctggagagagaaggttgggatgctaccactaactgggaagatactctatccttgggagagcagcagaggctggggatggctcgtctgttctttcactgtcccaagtatggcatcctcgacgagtgcaccaatgccacaagcgtggacgttgaggagcatctgtacaggctagcaaccaacatgggcataacagtcatcacatcctcacaaaggcctgctctgattcccttccattcgttggaactgaaactcattgacggcgaaggaaagtgggagctatgttccatccaccaataaccgattgacatcaaccagtttatttatgttcatcggagtagggtatttacaagttgcaacgcacagagaaaaaaaaaaactcgtccactcgggtgtagagtgtgtgacggagtctttttttttttttggtttcccttttctttttctctcccctttgatggaaatcttgcgatacggaaagggagggaggaaggaaatatacggcaggaaaggaaagtattaggagaggttatagatgcaggcttcgtcatttgggatagcatagtacatgttcctggcatgatatgccagcctgattgatttttatacgagatacagaataagttaaaataaaaatggatatggcacaaagtgtgcccttgtaaattaaatgggaaactaatctataggaaattcatcctaactgtgtcgcccttgcatcgaacgtatcccaatccatatgtaatggcctaatgggaagataccgtatgcaatcactcatatttgcgagaaaaggaatcggcaatt

SEQ ID NO: 100576 - DNA, 401 bp, Zea mays
  Clone ID: MRT4577_23237C.1
cacacactgttcgaccaacgcgacaactttctgcaggaattttggaagactctctatatgaggatgatgagcctgactatgggcctcggcgaacgccaggtcactgacgcttcgaggatcaattggaagctgaagcactatctgataagcgtatcatcaacgcgaagacgccaaatatgagctgtaatgttccccgtagaccaccagaccctactgctcgtatgccgagacgttaagctgatgaatactcacgatagcgatagggcggagtcatagctatcaaactgactgcgctgatcttgaacattcaccgtctcgtgcgaagcaagatgagctggactaggagcaagagatctatgaacaatgtgaggaagaagctcctatctcagatgaacaaatgc

SEQ ID NO: 100577 - DNA, 1604 bp, Zea mays
  unsure (1)..(1604): unsure at all n locations
  Clone ID: MRT4577_23238C.1
atcaaggttcatgcactcaagattgcggacacatgctgagtcaatagctttctttggtggtggatcaagggagaaagctatgattgacgctaaattcatgacattgctcaaccactcgaaggttctattgagaaagaagtggctttatggtatttttgatgattttgtgacgaaacagcttcctcataacgtgacatgggggctgagtatgttatatgctttggagcacaagggagaccgagctttgacttcaactcaaggagagttggcacatgctctgaggttcttggcatctgtggtgtcacaaagcttcatagcgtttggtgatattcttgagttacacaagaagttccttgaactctctggtggtattaacaggatatttgagcttgaggagcttctacaggcatcacaaagcaatcctgtcatgccttctgatgccacaaatgccggttccgaagaaataatttccttccgtggcgtgaacattgtgacaccatcgcaaaagctattggctagccaactgtcttgtgatgtatctcaagggaaaagccttcttgtgactggtccaaatggtagcggaaagagttccatctttagggtgcttcgaggcttgtggcccattgcttctggtagtcttagcaagccatctgaaggaatttttaatgttcctcaacgtccatatacttgtcttggaaccttgagggatcagatcatataccctctctctcacgatgaggcaaagttgaagatgctctcaggcgaaacaagtgacaagtctacagcttccgagctgttggatgatcacctgaggacgattctagagaatgttcgcttgctgtatcttctggagagagaaggttgggatgctaccactaactgggaagatactctatccttgggagagcagcagaggctggggatggctcgtctgttctttcactgtcccaagtatggcatcctcgacgagtgcaccaatgccacaagcgtggacgttgaggagcatctgtacaggctagcaaccaacatgggcataacagtcatcacatcctcacaaaggcctgctctgattcccttccattcgttggaactgaaactcattgacggcgaaggaaagtgggagctatgttccatccaccaataaccgattgccatcaaccagtttatttatgttcaccggagtagggtatttacaagttgcaacgcacagaggaaaaaaaactcgtcaactcgcgtgtagagtgtgtgacggagtctttttttttttttggtttcccttttcttttctctctcccctttgatggaaatcttgcgatacggaaagggagggaggaaggaaatatacggcaggaaaggaaagtattaggagaggttatagatgcaggcttcgtcatttgggatagcatagtacatgttcctggcatgatatgccagcctgattgatttttatacgagatacagaataagttaaaataaaaatggatatggcacaaagtgtgcccttgtaaattaaatgggaaactaatctataggaaattgacantaaaaaaaaaaaaaaaaaaaaaaagtactgtgngttgttaccactgcttaagggcgaattg

SEQ ID NO: 100578 - DNA, 314 bp, Zea mays
  Clone ID: MRT4577_23239C.1
ggcagccccaaaaaaccccattttttccttaggataaacttaaaaaaaaccctggcggggggaacaaaatccattgacccccaacccatgctggttgaagcatgggtttgctgggccccgggataaacacaaccttaactgacacaaagcgcccttggaaaaaaaaacacaaagggggaaaaacaaacccgacccgaacgaaaataaaccctttggactaggggaaacaacccgggaggaaacaagaaaacttgggcgggcgggccccaccggtaaattcctccagttcccgggggaattgcccaaaccccccc

SEQ ID NO: 100579 - DNA, 283 bp, Zea mays
  Clone ID: MRT4577_2323C.1
ggggaaaaaagcaggggggggggaacaacttttttccccaacgggggcctcaaatttaagggggcctttacaatccggggccccggttttatagggggggcaagcttgctccttggcgggtggggggggggactggggaagggacacaaaaaaaaacctttttaacagatccggggttcccgcgaccccctcagttggtggggaacttggggaggggcttggttccctgggagacggggtgtttggggagctcttcgggggggactaggctcccgggggtttg

SEQ ID NO: 100580 - DNA, 377 bp, Zea mays
  Clone ID: MRT4577_23240C.1
attgcgcgtgacatgcgcggggaagaaaaaagctaatactttaacttcaaaaaagctgcgatggctaatgccaaagccatgggatggtgtccaaacaccagttttgatgtccgtttccaagggcttgccttagttcaactacattctccctcccccttaaaattggcgcggaagtttttgcctctgtacaccggccgcaaaagcttgggactcgccccatccaagccattttatctcctaaacaaaaccctattgtccgttagggataaaaaaaaaacttaacttggatagccgctagcaatatgcttttcatttttctaccaaagctttctatgctgggccagggctgggtatattatttcttattacaagccccc

SEQ ID NO: 100581 - DNA, 714 bp, Zea mays
  unsure (1)..(714): unsure at all n locations
  Clone ID: MRT4577_23241C.1
ccggccgggacctctaaccacacgagccatacgaccctcgccctcgccagtcgccgccacaagagtccacgacagcgtacgtgcacggtgcaccggtatccgtcctacctacgctaacgctagccacaagcccacaactcatggacgacgcgtggccgtggctggcctccctgccgcctcctcttcgtgatgaagacgggcccgacacaccgttgccggcgccatggtctctcccgctcgctgcctccaccgacggcgcttccatcgtgctgcgggctgacacaagtcccgctgcttcttcgtctctggccgacggcgatgacggtaacggtgacggcgagcccgcgctgctcgtcgctttctccgtcgccatcaacggcgcaggcggcgacgcgcgcgcgctgtgggcgtccgaaggcttcgcggcgtcctcgccggtcgcgccgagggtgcagcttctggttcagctcctcaacgaggtactcgcgctctctccgtacgtcccttgcttgggcgcgggggttgacggtctcggcggggacgcgtccgaggccaaggtggacgcggagaccgtctccgcgtcgtcggcgccgctgaagccggtccatctgcgcccgncgcggcctttttctcgctcgcttcttcttctgcggctcttctggctgggtgcaaccgacgccccggcagacgctgggtacctcttttttccgagac

SEQ ID NO: 100582 - DNA, 330 bp, Zea mays
  Clone ID: MRT4577_23242C.1
gtgtcctgctactctagccgccatatctcacgatccactcctagcaccaaaccgagcataggtgaggagagaagacgcgcgtcgaggcgctcgtcaaagtttgcccgcctcgccttcaaaaagagagcgtctgtttccttcacgatccactggcctacgtcatgtgacatgatggatgatgactgccgtctcactctaaatattgctgctccagcgcatcaaagtctgcggagacatagctgagaatctctgcgactccatcttcattctctcgcgagcatacacattgccaacgaaccctctgacagactcttctcctctaggttcctg

SEQ ID NO: 100583 - DNA, 459 bp, Zea mays
  Clone ID: MRT4577_23243C.1
agttacggaacgaccgcgaccgaggagatccatcataccgcctcctccgcccgccgattcgtggagctcgccctcccgatcacctagatcccctgccttttcccttcctacccacctcctgccccgcgaacgagctcccgcatgacatcgcgatgacgcgcgagacggactatgctcttcgggatcatgcataagaacgaggttgttcataacatcaggtcggtatagttcacaatgacgcgattgcacgtccaaacacacagacccgagaactcgtcgccgcccagctcatcaaactaggccacccgatcgacaagaacgctgaccgcgagattctcaaccaccggtccctgcgttaccctaaaatgatccagagtcatagaggtgatcctaacttcgactgcatcttgccatctgatgatgcactaatccgctggaggcgaactaattaatcgaatc

SEQ ID NO: 100584 - DNA, 274 bp, Zea mays
  Clone ID: MRT4577_23244C.1
ggcaagctgactcgctcacagtcttcgcgaacgcctgggccaccttctctccatcccaatgaactgatgcactcttttcagatgttcaccagggcaagggaatgcttagcgccatcagctgctgggagttgatgccctgttgatagtgacaaggaaagatgcacccttgaagacattttggctgtcagaagcattggctcccccatggtgcactgctatcagccaaagctgtgtcgggattacatcggtgaatgtaatgagctgctgggaggac

SEQ ID NO: 100585 - DNA, 475 bp, Zea mays
  Clone ID: MRT4577_23245C.1
gtcgacccaagcctctgtactgcaagaactcacagccctgcttccttctctcactctctcccactttcttccactctctctctctctcgcaagcccttcagcgccacatagcactcacaatggagcacatcgagcattcccagttgcacaccgaccccgtctaccgcttccagtacgtggccaagttcatgaactttggcgatgaggacatccaagccatccagggtgccgcagagctcatcaagcccctggtacccgtcgttgtcgatgccgtctacgccaagctccatcagttcgacatcacctgggacgtcatggccaagcgccacgagggatacacgcccaaggacgcaaaggtcattgagaagtccagcgagcttaccgaggacgctgagcaaatcaaattccgcaaggacatgctgagcaagtactttgccaagctgggtgacaaccctacgacgagcgcatggtcaag

SEQ ID NO: 100586 - DNA, 738 bp, Zea mays
  Clone ID: MRT4577_23246C.1
atgccccctgcaccaccacatggcaccttggatgctggaggagaccctaatggagaaggagacaacgacgctagtggcagttctagccacgacacagagctctcggaggagccaaagccggagggatggatcgctagacccatcactcgtgatgccgctagcaggtgtcacttccacgacgctctcgataccttgctgcgtcgggccttcgaccgacacacttggtccatcgagtaccgttgtgtagtctaccagcatcgtcgcgggttatacccagaccagtgggaggctacttgcttggtgcgccgtccgaacgatgatctccagggtgcagaggccttctcagagcactattctatcactgagagggatactgccgagtattgctcgttgttaagcggggtagctaatggccttaacctgaagtactacactcgtcgttcaaccggcagtgctggaggtgtgattgtctcacccgttggtgagggcaatcccaggctgaacaacatggtcaacctggctgttgtcctcaacaccgagctggaccacgtccttgatgagttgggcaaggttcgggtggaggttgcggaattgcatgctgagtgcacagcatgccactatctggatgatggttcccccgcccctgtcgggattcagcacccttaccgctcaccgccccgtggtcgcttcgagtatggtaccccagactgcaggacccggatagatttggatccatag

SEQ ID NO: 100587 - DNA, 213 bp, Zea mays
  unsure (1)..(213): unsure at all n locations
  Clone ID: MRT4577_23247C.1
tccgcttgctccagccgccgtcggntcggntccgatccaaagcaagcagcagcagccggctccgcctcccgcagcacccaccccgtccgtcaccagnagnagtagnaataggaggatgtcgggngtcgnaaggtgtnaccacccttgagaggtggccaagcacacaccaaggtgactgctggctcgtcatcggcggcaaggtgtacaatgtga

SEQ ID NO: 100588 - DNA, 265 bp, Zea mays
  Clone ID: MRT4577_23248C.1
ttatatttgtagtggtaccatcataacaagggaacatggtgaagttcacgggtgcacaactccgacacctcatggacaaaatgaacaacattcgtgatctgtctgttattgctcatgcggaccatgtcatgtctacacttacagatttcgttgcggcagttgctaggaccattgggccggaagttgctgacgatgttcgcccgaccccttcttggccgggtgaagtccagcccgcgctcgcgccgaaaggtacgggcgtctccct

SEQ ID NO: 100589 - DNA, 2030 bp, Zea mays
  Clone ID: MRT4577_23249C.1
aattcggcacgaggcacctatgtaaaaaactcagtctggaccgagaccccgggtcgccacgctccttacgccgccgccgttgcccacgagccgggatgctccgcggcgccatctcccgcctcggtgctcgcctccgcctccacgccgacccctctccggcctctcctcgcctccgcgtcctctccacccgccgcggtaaacgctcctcccccaccctgtcgcccgcggactgcgatgacgagggacccctgcgcggcctcttcgtgctatcccgcgaccccgagtgcccaccgcggctgctggtggtgcagccgcgcctccgccccggaagcctcctcgagtccaagctcgccgaggcactcaacctcgccaactccctcgaggagcgccgcgacggcttctaccacagcgagttcggcgccaagggcgcgccgccgcacctcgtcgtccagaaccccgcctcccgcggtcgctcacacgctgatacatattttgggcctggaactgtggataatgtcaagtgctacctgagtgcaacggaatcagaggaagatgtggatgcagtttttgtcaatgcgattctctctggaatccaacagagaaacttggaggttgcctggggattcatgagtggtgctggtgaaacagagcttcaactacaacggaggagaatccaagaacgccgtgtgagcttgttagctcaaattgaagatgtacgccgcactagagcgatacaacgttcaagtcggaaaagacatggtggctcgtttggtcaagagcttgtaactgttgcagtcgtcggatatacaaatgctgggaaatctacgcttgtgagtgcactttctgaagctgatttatacagtgatgacaggctgtttgcaacagtagatccccggttacgaagtgtgattcttccatcagggagaaaagcacttcttagtgataccgttggcttcatctcagatttaccagtacagcttgtggaagcatttcatgcgaccctagaagaagttgttgaagcagacatgttagtgcatgtgttggattcaagtgcatctaatcttgaagagcatcgatctactgtattgcaagtactgcagcagataggggtgaagatgtacgccgcactagagcgatacaacgttcaagtcgagattgatcttgtggacgagaatgttaaatctgatgggattgacgatgaagtcttcctgaccgaaggtgaacaggaggatgacatattctctgaagatgatgctccatcagaacaaacatcttttgattctgtagatgtagatgacggagcagattcagaatatttatcagaagaaaattctgaagatagcaatgaactgccatctaaaaagtcatttgctgagccaactgagatgggagcaatgaaagagttgtcatcaaaagaatgttttggagaacttcgtgtcctagatacaaatggacacactttcccacaaccagcttccacttgtcatgtaaaaacttctgctgtgacggggacaggattgcaagagttgttagcattgatagagaggaaactgactgaacaacaaactgtcgtgcaaagaagctatggacctttcgacagaaaatggagacctacctctatggattgtgaaaaggctgcagagccgtaggtatgggattcctccttcccctcttctatatgggattcatccttcccctcttctatatgctgctgagatcagtagcagtaaccagtttctgagtttgcatccctagagatggaaaccacacaatgtgtttgaatatgcgcttgtgcatgatgtatgatgtatcattcaaagagtatcttgatattctttctgcagaacatgaagaaactgtaggaagggaccgtatgagttttgatcaatgtcagtcactttaacagacattttgtactcatgcttcatgttgctagatagcatcttatctttatcttatattctgatgagttgtgaaaaaaaaaaaaaaaaaaaaaaaaaaaaaaaaaaaaaaaaaaaaggaggcgcgcg

SEQ ID NO: 100590 - DNA, 360 bp, Zea mays
  Clone ID: MRT4577_2324C.1
ttgtggatatccatctcactgtgggggcgcgtcaagcatgcgtttcataggggcccggtttgccctctcgggggggggtgttttgtagattgggccccattttttaccgttttgtctgggataaaacgggggttttccccctttttggggttgtggtacatatccctttttccaggtttggtgattttgtgggggggaacacccttcgcgcttttcactagttttgctccctgtatgtggcattgggccccctgtgtcgttgcttttaaagcgccgcgtgttgggtttacacgccttggggccccgttacttgtgagggggctctcgcccgcgcgcctctttatctcccctttttttttt

SEQ ID NO: 100591 - DNA, 349 bp, Zea mays
  unsure (1)..(349): unsure at all n locations
  Clone ID: MRT4577_23250C.1
agcagtggtaacaacgcagagtacgcgggtcagtagcagtaaccagtttctgagtttgcatccctagagatggaaaccacacaatgtgtttgaatatgcgcttgtgcatgatgtatgatgtatcattcaaagagtatcttgatattctttctgcagaacatgaagaaactgtaggaagggaccgtatgagttttgatcaatgtcagtcactttaacagacattttgtactcaaaaaaaaaaaaaaaaaaaaaaaaaaaaaaaaaaaaaaaaaaaaaaaaaaaaaaaaaaaaaaataaaaaaaaaaaaaaaaaaaaaaaaaaaaannncctttgnnttgttaccactgtt

SEQ ID NO: 100592 - DNA, 1299 bp, Zea mays
  Clone ID: MRT4577_23251C.1
ctatgtaaaaaactcagtctggaccgagaccccggatcgccaggctccggacgccgccgccgttgcccacgagccgggatgctccgcggcgccatctcccgcctcggtgctcgcctccgcctccacgccgacccctctccggcctctcctcgcctccgcgtcctctccacccgccgcggtaaacgctcctcccccaccctgtcgcccgcggactgcgatgacgagggacccctgcgcggcctcttcgtgctatcccgcgaccccgagtgcccaccgcggctgctggtggtgcagccgcgcctccgccccggaagcctcctcgagtccaagctcgccgaggcactcaacctcgccaactccctcgaggagcgccgcgacggcttctaccacagcgagttcggcgccaagggcgcgccgccgcacctcgtcgtccagaaccccgcctcccgcggtcgctcacacgctgatacatattttgggcctggaactgtggataatgtcaagtgctacctgagtgcaacggaatcagaggaagatgtggatgcagtttttgtcaatgcgattctctctggaatccaacagagaaacttggaggttgcctggggaaagtcggttttggatcgtgttgggcttataattgaaatattcaatgctcatgctgaaacaaaagaagcgaagttacagtcagagttggcagctctcatgtacatgaagactaggcttgtccgtgtacgtggcccaggtggacgactaacttttggtccaagtggggaggctgaggttgtcagtgcaagagggagaggtagtggggggaggggattcatgagtggtgctggtgaaacagagcttcaactacaacggaggagaatccaagaacgccgtgtgagcttgttagctcaaattgaagatgtacgccgcactagagcgatacaacgttcaagtcggaaaagacatggtggctcgtttggtcaagagcttgtaactgttgcagtcgtcggatatacaaatgctgggaaatctacgcttgtgagtgcactttctgaagctgatttatacagtgatgacaggctgtttgcaacagtagatccccggttacgaagtgtgattcttccatcagggagaaaagcacttcttagtgataccgttggcttcatctcagatttaccagtacagcttgtggaagcatttcatgcgaccctagaagaagttgttgaagcagacatgttagtgcatgtgttggattcaagtgcatctaatcttgaagagcatcgatctactgtattgcaagtactgcagcag

SEQ ID NO: 100593 - DNA, 2129 bp, Zea mays
  Clone ID: MRT4577_23252C.1
ttccggggtcccccaccccacgcgaaaacatagagtgtcgacttttctattggtgtgattgggggcactaaatacctaccacattgcactcagactacatatactgtgtttgtgtgttgtatgccgtatgcgtgtgtgagcttgcgcaaattggacatctaggccgtgcgtaccctgcgatgaaaggcgccgtcatcggcgcatcgaccgtcctggtcgtggcggtggtggccaccatctgcgtcgtttccttcaaaggcagcggcgatggcgggagggccgaggagggcgagatgtccacgtcggtgaagtccatcaagtccttctgccagcccgtggactacagggagacgtgcgagaaggcgctggaggcggcggccgggaacgccaccagccccacggagctggccaaggccatcttcaaggtgacgtccgaccggatcgcgaaggccgtgcgcgagtccgccctgctcaacgagctcaagcacgaccgccgcacgtcgggcgcgctcgacaactgcggggagctgctcgactacgccatcgacgacctccggacgacgttcgacaggctcggcggcttcgagatgaccaacttcaagagcgccgtggacgacctccggacgtggctgagctccgcgctcacgtaccaggagacgtgcctggacgggttcgagaacaccacgacgcccgccgcgggcaagatgcgcaaggcgctcaacagctcgcaggagctgacggagaacatcctggcgctcgtggacgagttctccgagacgctcgccaacctgggcctgccgagcttccaccgccggctcctcgcggagcacgcccgcggcgcgccctcctggatgcccgacgccaagcgccggctgctgctggtctcccccggcgagaagggcttcaggcccgacgtgacggtggccaaggacggcagcggcgacttcaggaccatcaacgcggcgctggccaaggtgccgctgaagagcgccaccacgtacgtcatgtacgtgaaggccggcaagtacagggagtacgtgtccgtggcccggaacgtgacgaacctggtgatggtcggcgacggcgccaccaagacggtgatcatgggccacaagagcttcatgatgaacatcaccaccaaggacacggccacgatggaggcgatcgggaacgggttcctgatgcgcgggatcggcgtgaagaacacggcgggagccaagaaccaccaggcggtggcgctgcgggtgcagagcgacatgtcggcgttctacgagtgccggttcgacgggtaccaggacacgctgtacacgcacacgagccgccagtactaccgcgactgcgtcatcacgggcaccatcgacttcatcttcggcaacgcgcaggtggtgttccagaactgcctcatccaggtgcgcaagtgcatggacaaccagcagaacatcgtcacggcgcagggccgcaaggagaggcggtcggtgggcggcaccgtcatccacaactgcaccgtcgcgccgcacccggagttcgagaagagcgtcggccggttcaggaccttcctgggccgcccgtggaaggagcactcgcgcacgctctacatccagtcggagatcggcgggttcatcgacccgcagggctggctgccgtggctcggcgacttcggcctcagcacctgctactacgccgaggtggaaaaccacgggcccggcgccaacatgaccagacgcgtcaagtggaggggtatcaagaacatcacctaccagcacgcgctgcagaagtacaccgtcgagagcttcatccagggccagcactggctcccacagctcggcgtgccattcatcccggggctgctgccgcagcagcaatcgggcaggatacactgacatctaaggaagatgatatatgatcggcaggctgcgttgtcgatatgacgtggcactaacatgtacgtaccatggtttagtttgttggttggtttatgctattttgactactactttttttatatttgataaaaaaatgcagtacaaaatagggcggataactagtgagcactgattggaacttggattgccccgaaactggtaataggttattaataataacaaaatggaagaagtcatatttttctc

SEQ ID NO: 100594 - DNA, 249 bp, Zea mays
  Clone ID: MRT4577_23253C.1
gaccacccatgtacatggcggtggggcatgttaccaaacttcaaaacttaacatgcaacgcattgaaatgaaggcgcatgtcgagctatacactccacattctgaagccaaggcgtgcaaaaaaaaagcccagctgaattcactaaccgcagataccctattgcactataatatacattggccagagaaatattccttgcccgaaaggatccgcctgtacatattaagtattggctgcttgggcaagca

SEQ ID NO: 100595 - DNA, 634 bp, Zea mays
  Clone ID: MRT4577_23254C.1
cccattagtgacaccaaccagtactaaacttttgaaccttttagtattggatggtggcaaaacccagtggaggagggtgaaagaaccttaaaattctaattcttaaaataaggcctctaattttttctagtcaaaacacatgcaagaaagtaatctatttagatgtgcaactatggttgttaggtgtgtttctatctctaccataaaagagttatgcaacttacattccaaatctatgctagcctagcaagctaaactaggaaataagaacacaacctagttaaacaataaataaagtgtggaaccttaatcaaggtagagatgcaaattcaagtcgatgactcttatatttttatggaggcatcaagatgctcatgcttcccctagttatcgttaaagcctctcataaagattctctagcaagggacaagcttcgaacctgctaaatctgtgggcatcccatggtcctttaccacaattagtgggtctctaagatggcctcttttggactgctcccgtatgtgttcattgtcgagctttagacaaatttgacatgtgtctcattctttatagtacatagtagtggacaccccacaatcatagtgtgatatcactaatgacctaatatttgtct

SEQ ID NO: 100596 - DNA, 594 bp, Zea mays
  Clone ID: MRT4577_23255C.1
ccggccgggatacgcacgccgcacgcatatagatacttgctccctgaccaaatcctacctgtacacgacgacgccgtcgcatctcctgtgccgcccgaattgcacccctctcaggaggtggagggattcgtacaagtgaggggacgcgaggtcaaggcagagtccgcgctgatcccgaagatctgaccgctccgactctccccaaacagaataggtgcaggatatcgaccatgagacccgccatgactggaagagactacgcgagacaggcaaggttatagcgctaaaacaacggggccagggctttgtccgcccatctgacgcgccgctaggcatcggagctctcggagaaaccaagaggtatccgaagagtgtcgagaacatcttacacagtacatgcatcatggctctagcgactcatcagagatcgacaagaccatgtggaacttatgcgtagggcaatgagtaagtccgaaaactgcgaggagatatgtgtggatctgacacgtctgacgaaggagcatagaagagaactatgccaaagtattgcacgaatagattaattactgctatgcccatgttcactcctgttat

SEQ ID NO: 100597 - DNA, 245 bp, Zea mays
  Clone ID: MRT4577_23256C.1
ccccattggaagcacgacatccttccttcgccgacgggccctgtgcaccccgcgtatccccgtggatggggccacctcgacccccggccaggcatccggctcgggatcctggcaccgctggaggcctagggcccgctgctacgggcctggaccgcccccgcaccgcggatgtacataccgcggtgggcggggctactggaggggtcgcagctcctacgcaggtgaaaaagtggggcggaaagacg

SEQ ID NO: 100598 - DNA, 156 bp, Zea mays
  Clone ID: MRT4577_23257C.1
gggacagcaaccaagcacgcgtccctacctgccgaacatcccagccagcggtagccggttagtccaaatgatcttcagtagccagcccgtcagccggattgcgatgggctctagtccgacgcgatggaaggactcataaaggttcgccactggcat

SEQ ID NO: 100599 - DNA, 449 bp, Zea mays
  Clone ID: MRT4577_23258C.1
aattcccgggccgacccacgcgtccacggacgcgtgggcggacgcgtgggcggacgcgtgggtgcaagttatcatttctttgcacggaatgctcttattttaaccatgtatccaaattcagtatttcattgcgacaagggtttagcccatttttcaaccgccaacttttgtggtagtttgaagttcagccttgaactatgaaatcgagtaccaaacgctctccaactttcaaaactagacaaatttggccatcttcctggttccgaaggtggttttctttatttctaaaaataataaaaatctgctttaatctctataaattcacaggtaattgatttcaaatcagaaaaatatgaagtagtatcattttttctgaaaaagttatctttgaggttgaaaatgtactttaccctaattaagcatgacgctctcactgttgcattgccaat

SEQ ID NO: 100600 - DNA, 579 bp, Zea mays
  Clone ID: MRT4577_23259C.1
tcgaagccggccgggccgggacccacacaccacgaattaccctagcttcttctatctctagataagatagtctgatgctagaatccactaataatagctggcttgctggcaagggaggaagacggctttctgtgcaccaacgatctctcggagcatcagcccattggtgcgtacttgcaggatactcaccaaaattactaccaagagaccccgacgatgccgctcctccagcacgttgagctcatgtaccggcacctgtacctgggcgaaatttgagaactcactgccaactaccgcttcatctacatctccatgctcagcgatatgtgcgagtccaagtccatctccgatagtagctacctagtgatccagtatatcgactgcagattcaagggcctgatcttccgcctctaccacagaaccgcctgttatctgacgaggaaacactaaaccgcttgagagcttccatggagcatggacactctgattgccgcgttccaatggaaatgtcgatcttgcttggttaactgtacatggatcactgggtctgccattgatgaagcgatgtatgaattatat

SEQ ID NO: 100601 - DNA, 1570 bp, Zea mays
  Clone ID: MRT4577_2325C.1
cattgggtacctcgaggccggccgggagcactctccgctccatttcgaactcctgatcggccgaccgttgcttccaaccagccccgcctcaggcccccaacggctaccaaatcgccatcgccactttagagagagggagcgagggagctaggatggcgtccagagatgcgggcgccagccccagatccgcgccgcatcgccctggagcggtggcgcccaaggacggcgccgacctgctcagcccgcggttccgttcagccgccgcgctggccgggtgggacgaggagtccgtccttctcgccgcgatggtcgtcgaggacactcccgtccgcgagtcccgtcgcaagaggcgggcctccacctcctccgccggcggcagcgccggatccagcaccaggaagatgaggccgcgtaggcagtctccggccaagatcccgccggtggttctcgcgctcgacgatgacgacgacgacgacgcggcagatggcaaatcgatagtgaatgctgccaccaaggaggaagagaaagttgtcgttgtgggcgacaaggaggcgtccggatctggcgacaaggcggcgtccggatctggcgacaaggcggtggccacgggaaacctgccgtgcatggatcgcctccgggaggagctctcttgcgctatttgcctggagatctgctttgagccgaccaccacgtcttgtgggcacagcttctgcatgaaatgcttaatacatgctgcatccaagtgtggaaaacggtgtccaaaatgcaggcaattcatcagcaactcaagatcgtgcaccatcaacacagtgctctggaacaccattcagctgttgtttcccggtgaagttgaggcaagaaagaattcgacctcaccatgcgataaggacgcgagccgcagcccactcagagctaataggctatcacaaggtggcaatggtatgagaactagaactaggagcaggagcagcagcaccgaagctagaacaagaagcagctacaggagcttcatggaacccggcagtacaacaagcaccaacactggtgcgaacttcatcagcgcacaagtcaacacaagaagcaggaggggcttcgtccaggcctcgcagctgctgttgcctaagaggagcgccagtaaggttggaccaatccgaagatgctgcgttggcttacaggttgcaacaggaggagttcatgaatgcctttgaggagcctgagcaggagaggcagcagccacggaacgccgtgtccacagcacgagacactctgagagccatcgcctcccgagccgtccgcctccgtgctcgaggctggcatgtttaatattattctttcgtcaactactttacacaaacctcttgtttgttattctactgtgtaattttttttaaagtaggctgacccaaatttggatggccatgatcataatcctttggcgcatggaacatttgctgttgtacacagtactgttcaacacatagccatttgtcccatttttttgtatttttgccctttttctagaaaaaaatctgacatttagactccaaaagaaaaaatcagatgaagtgca

SEQ ID NO: 100602 - DNA, 473 bp, Zea mays
  Clone ID: MRT4577_23260C.1
ctcttggggacgggacaccaaaaccaaagggcgaacggactctagcactgtgacacaaagcgggcggtgacacaaactaaaaaaccataaaagggctcggacgaaaccaaaaagggcccccaccttaaacccttaaaacggggccacccttgacccccccacaaaaagcataaatatacgcctaacgacaatttttggaaacctttggtggacggggggcccacaaggaaccaaaccgtcattgggggggcaaaagcaaaaaggcccgtcaggaaggccgcccccccaaggaagggcccgcgggaaagcccacctggaaaggggaaaaagggtttcacccccggcaccgagctcacccagagggctttgaaaaacacaaaaaaccccaagccgaccacttttctttgtggcggggcaaaaaaaaaacatccggtgaaaatggttcaaaacaaaagacgggaaacctcccggaa

SEQ ID NO: 100603 - DNA, 302 bp, Zea mays
  Clone ID: MRT4577_23261C.1
gggcagcacattctaaaccgaagggttggatacaccagccggcaaagttttttaaattcacaggaagggggcccatttacagccctttgaatggaatgaccaaagaatcaactttttatacagaatcagatctagcaggctggaaaaaccgttgtttttaggatttttacagggcttctttgcctgtcggggggttggattctgggggggcctttatgcaagcttacttttccttggcggggcaggactaaaaagggggcgctatcggtttggtaggttggtatgcgggaatattacaaaaa

SEQ ID NO: 100604 - DNA, 277 bp, Zea mays
  Clone ID: MRT4577_23262C.1
cctctgggtgggttttttgggaaaacaggaccttcccaaacccgacatggttattacaaaatcctcttatgagggcccaaagcttaacccccaatttcttgggcttttggactattcttcaacaacagatgccaaaatgcccccggacgagttaccatcgcgcaacgcctccgtctctggtggctatccctctaaccataccagtacccatgaatccttccgcttaagcctcgtcgccctaatggcaacccgacgggctaatcccgattttctcaat

SEQ ID NO: 100605 - DNA, 316 bp, Zea mays
  Clone ID: MRT4577_23263C.1
gggcgcgccatctcaagctcctacgcaaggagctctccaaggagaaagaatgttgtgggcgtacatgcctttccataacaaattttaatgaagtctaagcacaatagtgcgatgcgtatgaagaaaatcaagaggaacctgtatcaatgatgtaaggatcttcacctgatgttggtcaagatggtgatgatgagcaaggtattgatccatcttgggctgctttagttacgccgtttttacgagtcaagacattttatatcattccgtcgattctttgctgctaatagtcctttctttttcaagctttttttaaact

SEQ ID NO: 100606 - DNA, 404 bp, Zea mays
  Clone ID: MRT4577_23264C.1
cccacgcgtccgcgctgaaaaggacaaggcgttgtgtttttctgataaggaaaatcgaatgctaaaggaaaagttgtcaacactagaaaaagagcattttatccaaaataatcagcaagatctcgagctaatcatgcaagaaagtgaggaaatggttctccgtgatattgagatggagccacaaagatcatgtgagatttctgatcgagatatacagtacgaagggctcatcaagctgaatcaggttttagaaattgcctcaaccactgtaaaagaaatagaaacaaaaaggttgaatctcagtgatatccaaggtaaaagagagcaagaaaaacagctagaatgcatcctggtatttatcatgaattggtcaaaggaattaatgagactgaacatagagtgcc

SEQ ID NO: 100607 - DNA, 623 bp, Zea mays
  Clone ID: MRT4577_23265C.1
gccaccaaagttaaaaattagtataaaacatgaatacaaaacagcaaacatcaatatagtttacaaaatccgttggcaaaatatacggattgctcgaaaaggaaggaagcaaacaagctacttttggcatgatcgggggcgtttcccagcgttcaatacgaaaaggaaatctaagttaaaaaacatcgcccctgcgatgatataaacaaaggggcataattgcaggcccataacctgtaaaaagaacgcagcaaactcctcatcacgtagtacaatatgtctgctgcctatccaaatatatgcgagttaggtagggttctactgtcagggtttcaatgatgatccaaataacacagttgcacctcaacaactggttatcaacgctgtttgtaaccaaatatgatgtcaatccagttatggagattaaagctcacatattcacttttaagggcttctttgttgatgggaatgaattcttcaggcaaaccctgaaaactcaaatgcaaagatgtaaatggctcgagcctaaccaagtattggagaatgatttccatgctaaagttgtgagatccgtaataaaaacttagaatcggttttcatccaacgcaccaactgattttgaa

SEQ ID NO: 100608 - DNA, 239 bp, Zea mays
  Clone ID: MRT4577_23266C.1
cggacgcgtgggctgccgcctacgaacacttttgtctactccgcacaggagcctccaccggagtgagtttcctaacagtggtcgaccgtccatcctgacatggcttaacacgacgcacatgcgatgcccgagccacatgacgcacctgcacggctacaagagtccgcgctggacggactcggcatccatacaccagccgtgccgtatcagatgcgacgagatgggtaagtgatctatcg

SEQ ID NO: 100609 - DNA, 3281 bp, Zea mays
  Clone ID: MRT4577_23267C.1
gaccgcatgacgaaatgcctgcaacgatttatatcctttccccatttgagacctggtgattcattgttgaggtgtttcacgcccacctcttgatactgaaaggccgtttgtctctttccaggtgcgtcgtttccttcccgccccagctatctcggtgtagtatgcccataacaaagccagagaccatgtgattcgtcaagtttgccgctgtgtgttgcttgactccagacgtccacgattctaatggctgcaacgaagaggctgaaggttctgatatagggattattgtgtaatactctacgaggaccccgttatattccgtaggtggggtttttcaccttcggcacagcgtcctcggtccccggtcagcactatcgccgaaaaactcctaataaatgaattagttctacacgctcctcagcgagaacaacttagcttaaggacgcgtacacgcaaccacttaatagggacgaaacgggcagagagagcggagggaggagctcaccgccaagccttcgacacgtccgccgccgccgcagtcgtcgttatcgttgtcccacctcgccggcgagccaccagcactgaccacgacggagcggctgcccgcgggccgcggcgggtcaatcgggcggtggagccgctcggttccggccatgggccactcggttgggtcgattcaccagcgatcaagcggagcaatctgggaatctagcttctgtttctggtaaaagatacacctttttctgttgccacgtattgtagtttgggacggagttgattggagttggaagggatggatccacggatgtggagagcgagacgacagacgacaattgtttttgcgcactcacctgcccgggccttggcttggctctacacatggttccattgttcttattttctactctttctaatagttttaaacttatatttttttcattaagtgaatgcttatttcttttttacccacgttatacaggacaagtgtactggtaaaactgaatgaaagggtcttttagtattgctaatgcaattggtcttacaactgctgtgattatggtgcaagcttttgatgaagactcgcttttggtttatatactttggctatgtgatgtactgcaactttgagaacatttgaccacaaatgaagtcatggtagatcaagggccatttcagttcatgatttgatctacaataaaaaaagagaccatgaagcgttttacaactgataactaggtgttcttgataagatcatctgttcctgtttgacacaacatatatcatggttgcatactgtatttaaagaacttaatattcagccgacaacagaagaaaatgaagctacagaaaaaagtgtcttcccaagtaagaattaggaattctgcttgctcatcgtctgtcagtgccacgtttgctcgcctgtgccgatttaccctctctgatgacggcagaaagataaactcattttatcattcctttgtggaggtattatgcttaattgttagggtccgtgcatgcacgcagagcgaaacaaagtgcattttggctcctactctcctagccctcctaccactggcagcattgtataggcataaaaggcactgcgtaagagacctttcaagtttcatctatttttttagaatgttgttaaaaattttgggtgaaggggtccatcaggacacaactgcatggttggttaacactcaggatgcaattgtggagacaagataattgtgtttgctgataatctgtttgcactaactacttatgcgatgaaactgcggagaggtgggcatgattgctgactccctgtatcaggcattttgacttcctcttgcgttctctgcgaagctagcgaggcgggcgacagcaggcacttctccggtgtaggcaagattgggttcaaaggtcattctccgacacgctcgactcgtggcagcgtcacacattggaccaggggcggtgctcgaggacgaaagcgctcaccatctacaactctacagggctgacagagtatgatccggatggggtggatgcgagggcgatcaaagagatcattgagggggttcatgtgatcaggcttggcaagtacagactcactacctggttatcgtgaaatttctcggatagcacaaagaagctacgtttgatggattagtgcttaatttccatggttattggttgattacacctctgaaaagcttgatttcaacaaatcatcgacttttaaggatctttcaaaatcagttggtgcgttggatgaaaaccgattctaagtttttattacggatctcacaactctagcatggaaatcattctccaatacttgcttaggctcgagccatctacatctctgcatctgagttttcaggttgtcactttgctcattatggaaatatttatcattgcttcctcaaaatccgagcacataactattattttcaaaacattattcataaatttgtcaatacataatttctattgtcgtatttcaccacagttcaaaataagggatctcatcatattatttacattgtgcagtgtggcaaatttgaccatacagatcgtttgttccaaagcattgagagcgcctacataaatagcttgttaaatacaagtgacaccaaagaacttattccaaaatccttttacatgcctgactgtcttgaaaattcaaatttatgtcatcttagtgtcaagcgggatggggaacctataggcgatgttgctctccctccatgggcaaagggtttgcctgaagaattcattcacatcaacagagaagcccttaaaagtgaatatgtgagctctaatctccataactggattgacatcatatttggttacaagcagcgttgatagccagttgttgaggtgcaactgtgttatttggatcatcattgaaacactgacagtagaacactacctaactcgcatatatttggataggcagcagacatattgtactacgtgatgaggagtctgctgcgttctttttacaggttatgggcctgcaattatgcccctttgtttatatcatcgcaggggcgatgtctcttaacttagatttccttttcgtattgaacgctgggaaacgcacccgatcatgccaagagtagcttgtctgcttccttccttctcgagcaatccgtatattttgccaacagattttgtaaactatattgatgtttgctgttttgtattcatgttttatactaatttttaactttggtggcaaaaaaaaaaaaaaaaaaaaaaaaaaaaaaaaaaaaaaacacaac

SEQ ID NO: 100610 - DNA, 439 bp, Zea mays
  Clone ID: MRT4577_23268C.1
aaaaggggagagggaacattgtttcaataataatcaacctagtcacatctcctattttaaacttgtctttatctttagatgctatggattacaaaataggaaaagtatgtactgtaaaaaacactttagggaaacaggtcatacaattaggatttgatcaggagcaaaaacattgtacccttgatccaagttcatcaaaattgcaaatttggttgcttctttagcatgatcaagttgttcttgggtaactcactgacggaaaaactcaaggaaaaaaaggaatgggaatgataatgccaactccaaacgtggtacccccttgctgctacatgcaaatcataatccgaaagcataatgattcaatcacccaaacactgcaaagaacatcttgaagcagttttacttgagtcgagtctacacgccaaaactcacatgccag

SEQ ID NO: 100611 - DNA, 248 bp, Zea mays
  unsure (1)..(248): unsure at all n locations
  Clone ID: MRT4577_23269C.1
tangtggtttcggctgcactgaagctggggggggggcaggattgaccataggctctggatagacccccgtcagtaaacgagaaatgaaacaaagcccgggaagagggacagcactggaggcgcagtacagcagggaagcttgaaacggtagaacaaggccgttaacatgagcacgcccaccggtgacaggctattacagagccccctgaaaaggatcggggggaacaccaagcctggcagggaggggg

SEQ ID NO: 100612 - DNA, 296 bp, Zea mays
  unsure (1)..(296): unsure at all n locations
  Clone ID: MRT4577_2326C.1
tgccggagccgggcccctattgcgggggcgacccacgcgtcctttttttcatgacgtgtgctgatttatttcagcacgcaaggggaaatgaacgtaccatgcatcaaccctaatgggattagtacttgatgcaatctatactcactgatactgccgtcacgactcagagagaatttctatgccatattgatagattgcgatctgcgnatccgctcctgataccttggtaagctatgcccagcatgtacacacgcacttcttcaacctgtgacaagcaaaacctgcattcatgaata

SEQ ID NO: 100613 - DNA, 597 bp, Zea mays
  Clone ID: MRT4577_23270C.1
aattcggcacgaggcgagtttttttttttttttttttttttttttttttttttttgtttattttttttgtgtgattctttttttattatttgcctaaatttcggcagccgaagcgtgcagcggggtgaaggacgagaaaactctattgtagccagctctgaaaaaatttcaccttgaggggaaaacttgcccatcaccttgcaatatattgaaagctaggttgttgctctagacaaagccctagccgggcatgctgatttctgcgccctggtagcttctcgaggacacatttaccggttttctgaaggttggttgcccgcacggaaaaattgggaatagaccaccctttttcttgggggcggcagatccggcggaaatcccaagccttctccatgaaatttacacctttcttattctgggctttaatacccgcacgttgacgaagatgaagcacgactaatctgaaggatatcgaagctgaaggaggacggcctgaagcttaatagctgctataatagactttcctgcaaaaaattctggacagatccttgtaatataattatggaaaaaaaacttatgtaaatttgtgcatacctt

SEQ ID NO: 100614 - DNA, 265 bp, Zea mays
  Clone ID: MRT4577_23271C.1
aaaaaaaaaaaagaacaaacttaaaaaaaatttaaaaaaaaaaaaaaaaaaaaaaaaaaaaaaaaaaaaaaaaaaaataattatcttaaaaaaaaaaaaaaaaaaaaaaaaaattttttctttggcggtcccaccttaggggggaaggtggcagatttccataaaatgggggggggtttgagccttcttttaaggggccaaattcgccttatgggggggcgttttaaaattaacgtggccgccgttttaaaaactggtgacttgg

SEQ ID NO: 100615 - DNA, 1492 bp, Zea mays
  Clone ID: MRT4577_23272C.1
cggggagcatgctctgcctcagggcgtgcgtgtggtggtgggctcaggggagtccatggcggtggacgaggagtgcgacatgggcatgagtttctggttcccgggagtctggacgattcgggaccggagtgccgtcgccggcatgctctggaactcgagcaaagcgggtgatggctctggtgtcagtggtgttgtatcagcgtcgagcgtcgatggcagcatccatagaggcaacttctctgaagtgaagtacgagtacaactacacgatggtggaggaggcgaaaaagcattgtctccaggatcccgcatcgagcaagcccaagaagaaggttaaggggtcgttcgtcgctcctaataactacaccgatcatgacctcgagttccatttctacgacactaaaggcagcatggtgggtggtggacgcgcctacccggttgctatcggctcggcgatggtctatggtgatcagctggccgccgacgattccttctcacggaaggccgtggtcgacatgaatacggaggagctgttgaacgtcagctacgacatacgtgagagtgttccacctgcgggctgggtgactcccaagaacgggtcgtactcggtcatccttgaagaacggagaatggcagcagagggtgtctttgatccgaagacgggcatcctatccatgatcgcctgccgagagtacaacagctcgacgacggactgccagatactgatcaccgtttatctagcctcgctgccacgcggccgggcgcaaggccatggaaggggagcgatcagcagcctgagaaacaagacggcggcggaccctctcttcttcgagaaggtcgacatcatgttgtacgggatgtactccgagcagatctcggagtcgatctcgaggatggacttcgagagcatcctgctggtggtctcgacgacgctgccgtgcgtcttcaccgtcatgcagatcttccacgccaagaggagaagcgaggcagcagcggccacatcggtcaccatgctcgtcgtcctggcgctggggtacgtcgcgcctctggtggtcagctccgaggctctgtttctgagcaggaggaggcagtacgcgccgctgctgccgttccggagctacgtgccgtacgagctgagccaggcgatgctgagggcgcccactctgatcgccctgctgctacagctgcgcctcattcagctggccttgtcggcgcggaaggcggacgccgagcagagcaaggccgagtcgtcagcgtcgcgcgccgagaggagagcgctctggctgtgcgcgccgctgtacctgatcggcggagcgctgaccatcgtcgtccacgtcgtgaacgcgctccgagcagcgcgggagaactccctcaccgtccgcatcggcccggagccggcgacgctgtgggaggacctcgtgtcgtccgcggggctggcgcaggacgcgttcctgctcccgcaggtcgtcatgaacgcgctctcgcccggcggc

SEQ ID NO: 100616 - DNA, 268 bp, Zea mays
  Clone ID: MRT4577_23273C.1
ctcaaatcggctgattctgcatctggaaactgccttcatcttgaaagaaaagctccaggtcccttctccagccacccagccccaagatggtgatgctgctgctgctgctttccgcactggctggcctcttcggtgcggcagagggacaagcatttcatcttgggaagtgccccaatcctccggtgcaggagaattttgacgtgaataagtatctcggaagatggtacgaaattgagaagatcccaacaacctttgcacattggacgct

SEQ ID NO: 100617 - DNA, 129 bp, Zea mays
  Clone ID: MRT4577_23274C.1
cggccggaattccgggtccgccccacgccgtccggcttaatagccacatattcctagtgcctactgtatgcgacagtgcagctatagaacactggcgtcacagcagagttttttgacacctgctagaat

SEQ ID NO: 100618 - DNA, 592 bp, Zea mays
  Clone ID: MRT4577_23275C.1
gtgtatctgggctagcacatgctgttgctgctaatcacacacaccatttgccccacatatgattcaaaacctgtatcacaaaactaagaccaaccatgatctataccaataaccctgacctaatacattgactgaagctggagattactataagtaatattgctgttcaaattgcacatgaaatcacagctatacttgaaattataataatggtacgttgcaataaagccaaaaaccctaacttcaaccatttcttggtagaggctttaacatcagtaattgatcgaactgaagagcagaacccaacactactcactgcttttaagaccagcctatatccaatgctccaaacgatatgatcctaagacatatgagcacatactaacatatactaattcaatattaagctaaaatcgaaaattagagacggacactcttctataaaacatgcagaatttggtatccttcttaataatgcaactagcaaccagacacacgatgctcctatctaggttcattggctgctagcattcattacaaaaatgctaaaagaactaaaccaagagagcatgcttccaaatatattgacaat

SEQ ID NO: 100619 - DNA, 400 bp, Zea mays
  Clone ID: MRT4577_23276C.1
agggaataaaacttaaaaaggtcctttcaggggcaaaacaattggttcaaacccacttgaaccctggtttccataaaatttttccttcccgttaatcgggttttaccaaaggcagcgcacaaggttctaaactttgacattcttgggttggggaatccccccctgatcatttagttgggaaagccttttaggatcaactttgcatttactatgatgggcattttgctgaaaaaacctggccttggactttactttttttttgaccggtttttccccagccttgaatttccccttttccttcaaaaaaaagggatcaaataaattgttcctgacccgtgtcccctcccaaccattcacacagttccaaacttgggcccttgttggtggaaaaatccgtaaa

SEQ ID NO: 100620 - DNA, 342 bp, Zea mays
  Clone ID: MRT4577_23277C.1
cccacgcgtgcgatttcacagaagatgtctgcgagcgtttgaccgggaagccagcacgtggatgggggaatcgactcgatagattcggctgcttgttgaattgcgtatggcctgacagtatcgaggtttcagcagtcagagatgtaaatgcacatgcagatttttgtgatgatggctggcggtccaatgcctagatccttgagggaagtgatgactatgatttagaccaactactaagaacacctaacagcgacactgtgtcttcaagggacaagacactcttggcaggggtagtctttaattgttctcctttgattgcaaaattgaggcaagtgctttgat

SEQ ID NO: 100621 - DNA, 513 bp, Zea mays
  Clone ID: MRT4577_23278C.1
cttgtccttttcccctgttccagaccagaatcaagaacagttcgaagagcactttgtggcctcctcagtgggtgagatgtggcaggtggtggacatggcccagcaggaagaagaccagtcgtccaagacggcagctgttcacaagcactctttccacctcagcttctgctttagtctggccagtgtcatggttttctcaggagggccattgaggcggacattcccaaatatccaactctgcttcatgctcactcactgaccctccctccctcctgggctccaggtcacaactcccaaaggagatgcaggcatggctctctgcctctgatcaccatcactgtatctcaaggttcagcagcagagataccagttgccatcagtgctaactgactgcctctccaggttcggagtttcatctcccagggccagagacagcagacccacatccttctctcccacacctctcctggttttgttcaggacagcagattagaggcaggaggcaatgacaat

SEQ ID NO: 100622 - DNA, 590 bp, Zea mays
  Clone ID: MRT4577_23279C.1
ggtaccggcgccccttctcgagttttttttttttttttttttttttttttttttttttttttttttttttttttttttttttttttttttttttttttttttttttgggaaaaaaaaaccaaaaacctttcttaaaaaaataacaaaaaacccccccccaattaccgccttggtctggggaaaaaatttttcccgggtgttgggcccggggtttaccccgttgccctggagaccggggacaaaaaaaaaaagggggggggggggaaccaacctttttttttttggggggaagcccccgggaggtaaacttttaaaacaaggggcttgaagaaaattttggggaccccccccacctttttgaaaaccccctttaaaaaatttatggaaaaccggggggggcaaaggggccagggtccttttgctttttggggggctggggcccaacctcacccaggggggcaggggcccccgggaaacccccgccgggttggggggaacccttcccgtttggcccggggaaaccccgggggggggccccaaaaaaaccggttccggaaaaacggaacccccggggggaaccttttccaaaa

SEQ ID NO: 100623 - DNA, 368 bp, Zea mays
  Clone ID: MRT4577_2327C.1
ttttgtttttttttgtttggttttttttttagggggcaaaaaaagattttttcttaggaagattaaaatgggggggccaccggaaaggtgcaaaaagaccattttttttacgacattaaaaacttggcaaacattacaatgttttcccccgaaagactggctaaaccaagctggtttaaacatttagcctgggtagccgcccccggggatttttcaaaccctggtagacccatcggggtacccagggtaaagggggttttcctccgcacttcaatttaagcttgtacaggacaggatctggtttttggaaacccggatgtcgggcttgagggcctgcacaaagggctttgacttgggcgggcccgggg

SEQ ID NO: 100624 - DNA, 252 bp, Zea mays
  unsure (1)..(252): unsure at all n locations
  Clone ID: MRT4577_23280C.1
ggggggggggggggggggggggggggngggggnnncncccacagcgaaggtaattaggggcactctttggaaagaatttgaatccctgagccccttcctaaatctgggtacctcttaaaagggccgccctctttttttttttgtagttccaaaaacggacagtgatggaaatccgacagctattttaaagttgagataaaagacaaggacaaggactaaaaaatcggacaccaagtgacagtccggggtcac

SEQ ID NO: 100625 - DNA, 310 bp, Zea mays
  Clone ID: MRT4577_23281C.1
atcatgggaagggcttaattttcagtattggtttggtgactctacaaagagcgaataatcaaataaacgatcaaaaggaaaatccggaattaaagccagggcggcattctaagttgataggcaacacaaccagattgctattgtgaggtatgcacactatttaaagcactaaaacaaaatgctttttccaaggatggttaccaaggttaaacctgggttcaccatgaccagaggcaccctccatcgttccaaagaggaacaataataaccacaccatggcttaacggcaactgacctagacttcgagggc

SEQ ID NO: 100626 - DNA, 427 bp, Zea mays
  Clone ID: MRT4577_23282C.1
gctcgtctccctcctccccgttcctgattgcgcgagacgcgcagggaggggaacgaggaggatggcgtcggctccctcgccggcggacacccgcctggatgtggatggaaaccccatcgctcgcctcaccatctgcatgatcggagccctcgaatccatcggctcccacctctgagagaagataatgggcgagacgcaccacaccgccctcgctgttgacgcctactgagactagatccgccacctgggcgaccccgtgtcgccggacctcgacgaggggatctgcattccacggtcttaggatagaaaacgacgccagactacaggtgctcatcaagaaggccgatctgaccatagaaatggccacgatgtgcgcgacggccgactacaagactcgcccacttgacgccacctacaacaacttcat

SEQ ID NO: 100627 - DNA, 309 bp, Zea mays
  Clone ID: MRT4577_23283C.1
agtgaaaatgggttgtttttattaatttattatcccacgcgtccgcggacgcgtgggaaaaaaaaaaaaaaaaaaaaaaaaaaaaaaaaaaaaaaaaaaaaaaaaaaaaaaaaaaaaaaaaaaaaaaaaaaaaaaaaaaagggggggcggcccaaaaggaacaaacctaaattacgcgtgcaagcaacgtaaaagcccttcaaaagggtcaccaaaataaaattcacgggccgtcgtttaaaaacgtcgggacgggaaaaacccgggggtaacccaactaaaacgccttggaaaaaaaccccctttccc

SEQ ID NO: 100628 - DNA, 1464 bp, Zea mays
  Clone ID: MRT4577_23284C.1
tgggaccctcgaggccggccgggatctgattgcaccgggaacaacctcgctctatcggcaagtcccgatgggcgatggccggacaagagcatcgctgccggaggatcgtgctgttcccgttgccgttccagggccacatcagtcctatgctccagctcgccgagctgctccatgcgcggggcctcgccgtgacggtcctccacaccggcttcaacgcccccgacgccacgcgccacccggagctcaccttcgtccccatccacgagtcgtcgttccccgacgaggtcacgtccctcggcaccgacatcgtcacgcagctcctggccctgaacgccgcctgcgaggcgcccttccgggaggccctcgcgtcgctgctccgtggtggccaggacgtcgcgtgcgcggtggtcgacgggcagtgctactcggcgctgcgcgcggcacaccggctgggcgtcccggcgctcgtgctgcggacagacagcgccgccacgttcagcagcatgctcgcctacccacggctgcgcgacgccggtttcgttcccgtcaaagaggagaggctggacgagccggtgccggatctcgagcggctccgagcgcgggacctgatccgcgtcgacggcagcgacacggacgcgctgtgcggcttcatcgcccgcgtcgccgacgccgtccgggcctcggcgtccggcgtcgtcatcaacacgttcgagaggatggaggcgtcggagctggccaagatccagcgcgagctgtcccgtccggcgttcgcggtggggccactgcacttgctgtcccaggcaccggcggagcagagcctgcacgcgcccgaccgcggctgcctggcttggctggacgaccacccgccgcgctccgtgctgtacgtgagcttgggaagcgtggcctgcgtcgaccgcggcgcattcgtggagatggcgtgggggcaggcccgcagcggggtgtcgttcctctgggttgtccggccgggcttggtcggcggcgtgccggaggttccgccgctgccagatgggttcagcgaggaggtacggaacagagggaagatcgtctcgtgggcgccacagagagaggtcttggcgcacgccgccactgctgcgttctggacgcactgcggatggaactccacgttggagagcgtttgcgaaggcgtgcccatgcttgtgcagccgtgcttcgcggaccagatggtgaatgcgagatatgtcacgcatgagtggggtgttgggcttgaggttggggaagagattgagaggggcagggtcgccatggcggtgaccaaactgatgaccggggaagacgcagctcagatgagggggagggcttaccatctcaagatacttgcatctgctgctactagtttgcccatagatagcctaatccattacatatcgtccctgtgaactccgaaaatttgtcatgccaaattgtcaaatgctaatatgttgt

SEQ ID NO: 100629 - DNA, 322 bp, Zea mays
  Clone ID: MRT4577_23285C.1
tggatgaccaacacctatccttctcgttgatcctccttgtatcacagcatagcgcgctgctgcccgtcggctgagattagtgattgcatgaccgtgcagtgcgactgtggctgcacctgctcctgcatgggctcatgcaagagcatgtcctgtcacgtgaagaccggcgtgcccagctgcattaagagcacgaacctctgcgccccgaccaccaacggcagggcacgaaggttcaaggcggcctccgagggcgagagctgaaacatgaactcgtgcaactgaggcccaagctggggatggtcctgctgcagataaaactgag

SEQ ID NO: 100630 - DNA, 661 bp, Zea mays
  Clone ID: MRT4577_23286C.1
ggcaagtcccgatgggcgatggccggacaagagcatcgctgccggaggatcgtgctgttcccgttgccgttccagggccacatcagtcctatgctccagctcgccgagctgctccatgcgcggggcctcgccgtgacggtcctccacaccggcttcaacgcccccgacgccacgcgccacccggagctcaccttcgtccccatccacgagtcgtcgttccccgacgaggtcacgtccctcggcaccgacatcgtcacgcagctcctggcccttcatcgcccgcgtcgccgacgccgtccgggcctcggcgtccggcgtcgtcatcaacacgttcgagaggatggaggcgtcggagctggccaagatccagcgcgagctgtcccgtccggcgttcgcggtggggccactgcacttgctgtcccaggcaccggcggagcagagcctgcacgcgcccgaccgcggctgcctggcttggctggacgaccacccgccgcgctccgtgctgtacgtgagcttgggaagcgtggcctgcgtcgaccgcggcgcattcgtggagatggcgtgggggctggcccgcagcggggtgtcgttcctctgggttgtccggccgggcttggtcggcggcgtgccggaggttccgccgctgccagatgggttcagc

SEQ ID NO: 100631 - DNA, 680 bp, Zea mays
  unsure (1)..(680): unsure at all n locations
  Clone ID: MRT4577_23287C.1
agtcccgatggccggacaagagcatcgctgccggaggatcgtgctgttcccgttgccgctccagggccacatcagtcctacgctccagctcgccgcgctgctccatgcgcggggcctcgccgtgacggtcctccacaccggcttcaacgcccccgacaccacgcgccacccggagctcaccttcgtccccatccacgagtcgtcgttccccgacgaggccatgtcccccgacatcgtcacgcagctcctggccctgaacgccgcctgcgaggcgcccttccgggaggccctcgcgtcgctgctccgtggtggccaggacgtcgcgtgcgcggtggtcgacgggcagtgctactcggcgctgcgcgcggcacaccggctgggcgtcccggcgctcgcgctgcggacagacagcgccgccacgttccgcagcatgctcgcctacccacggctgcgcgacgccggtttcgttcccgtcaaaggcaagtaaagatagaccgaccgaactcgcactggatcgtgtcggatagatcttgcaacgcacaggcactgcatgtcactgctgattagctagttgcagaggagaggctggacgagccggtgcccggatctcgagccgctccgagcgcgggacctgatccgcgttgacnggagcgacacggacgcgctgtgcggcttatcgg

SEQ ID NO: 100632 - DNA, 736 bp, Zea mays
  Clone ID: MRT4577_23288C.1
ccggccgggaagccgccgccacttcttgccttcttggcttcttgtatgcatgtgcccgtccaggtccaggcatccaggctcagcgtctagggaccagccccagccctggcggccggcgtggcggcacacagtgcccggcgcctccgtccacttcccggcccggagcgacgttggccccggcgcctcgctcatccgctttcgccttccggtgcagcacaggcgagtagcgcttgcgacgacccggcccgtcggtctccgctcccttccatcaaggcaagcagtcaggaaggcaagcaaacaagctatgctagatttgcaattttgcataactgataactgacaccttgaactctatgcggctatgcggcagtagttgtttataatgtagttgtttattagttgattttgtcatgtggtttttggccccctgaattccgtccgccactgttttagattaataacagaacacagacagcgacaatctttaaaacaaatataaacatagttcgtacataactcagattaaataacatggatacaaaaaatagtgtgagtatagctcgtacactagtcacctcaaacaacatgaacataaatcggtagttagattaaacgtgaacagagacactgaatcatgaggtgtgtatctttcgcaagaactagatttttggagacctctcgaacagcgcgtgtacgtagacgctgtgatggagaaactattgataacgcaacaacc

SEQ ID NO: 100633 - DNA, 1643 bp, Zea mays
  Clone ID: MRT4577_23289C.1
ctcgaggtcctgccgggatactcatcgcagaccgggttcttcccacatagagagagagagagaatcaaaatcactttgcgtgcagcatcgattgggtcggaaatcgagggtttggtaagcgagatcgccgccggtgacagctgacagggacgagatggacgccggcggaggcggcgtcttggtcgccgttctctgcatgctgctggtcttcgccatcttccccctcctcctctggcgccgccgctccgatgccgccaccgccgataaccaccgcgtcccgccccagcccctccaggaggatcaggtgctgcacggtcgcgcggcggcgcgacggatgcgtcggaggcctggggctgccggagcaggctcctctactgcgtcaactagccgcaatgctgtagaggacgacgcggagagtgacgatgaggaggtccccgaaggtcgcaacgtccccagatcctccaaaaaggagaagaaaaggcaagagcgagagatgcagcgtcaggccgaagaacctgcacgggattcatggaggagtaaacaagaccgatacgatgaaatgaggaggaagaaggatgaggagcgtgaggcacaagagaggcaattggaagaagaagctagggcgcggaaagcaaaggaggaggctgctgctgctttagagtttgagaaatggaaaggggccttctctgttgatgctgaaggtacaacagagagtgagacacaagacgatggtcagggtttgctccacaactttgtggaatacatcaagaagcagaagtgtgttcccctagaggacctagctgcagagttcaggatgcgaacccaggactgtatcaatcggattgttactctggaaagcatggataggttatctggtgtgatggatgaccgtgggaagttcatctacatctccactgaagagatgaaggcagttgcagagtacattaggaagcaagggagagtgagcatatcacatctggccaacaactcaaaccagttcatcgatctggagccgaaggcccagtacgaggtggagagccagcaggatgacagtgcagaagcaggcacagaagcatgagaattccttgtgacctggcaccatgtcgtgctcaatgatgttttgtagtgtgatgacttaacatggtttgagttgggcactggccatataatatatgcagtagtcggtataaacatacttgttctgacatgctagataccattaccccatgcagagaactcaggcttttgttctatcatcatgattgaaaatcatcggttgaccttggtggtgttagagaggaggtaggtggtgtttgagtctagcagcaagagatttggcaatgattctgtagatgacaaagactttgctcggagacaaggcagacttgtagtcaggttcacaaatcgtcctattagtaatatatagcctttgcagtgccggttgtgttcttttatgtgctttcttttcgtgcatttttactcaatttattgttgggaaattccccacggtaagaagcgaagaccttcggggatgagagaatttctaggggttcgcgtttataggcgtacacttttaccctttgtaagctagggtatatttctgaatattccatcacagataaagagcatcctagaccttttac

SEQ ID NO: 100634 - DNA, 263 bp, Zea mays
  unsure (1)..(263): unsure at all n locations
  Clone ID: MRT4577_2328C.1
actgcacgcaagcggancatgaagagaccgtgctgagctgcaaccaatggcgtcaggaacacacaacacgagggaaaagcatcaggaggggcgaaagaaccggcaggcaggacacaacgggccagatgaccctcgcgacagccgtgggcaggcaaaagagcaaaaaccttgcgaacggcttcaacctgatctctgggaccatagaggcacagcacttcccagccgcacacatcaagatcagggagggagccaggggcccaaac

SEQ ID NO: 100635 - DNA, 411 bp, Zea mays
  Clone ID: MRT4577_23290C.1
tttggctgatttagtgctcgtttatgtgcctgtttatgtgcttgtttatctgcttgtggatgtgcgggctgacttttatagagttagggtgcgtaggtgggtgggtgggtgagtgagtgagaggaaaagttaaggtggtagtagcaggtagttattactaacaaagaaggcttaagtacgctgggggcgcgggcgccttggaatggtgcggcgaggtcggcggagaatttgatgctggggaatgtggtggtggtgttgggtaagtgtaaggtgtcgtcgtatatgttgcttggggaggcggctatgcttcatgttcagtcggagtgtaagtcggtggtgtctggtcgggagtgtcatcatgttggtggtcgagatggtcgtagtcttggttcgtcgtagcattataagtgt

SEQ ID NO: 100636 - DNA, 154 bp, Zea mays
  Clone ID: MRT4577_23291C.1
gtattcttccgcggacctacccggctagagctggaggttgttgagcgatccaggtggctgggacccgcatagggacgtggctgcacagctgagggcgaacgcacagaaagccccatgccgaggtttcaggccccaacatacagacccggcgcgg

SEQ ID NO: 100637 - DNA, 433 bp, Zea mays
  Clone ID: MRT4577_23292C.1
cctttgggctgatttatgtgcttgtttattgcttgggcccttagaacacatggcccggctggtattacaagaccgtctgtcggaagtcacgcatctgccactatcctctagaaagacgtcggtctccactcgggtcttttcgcgcattaagcgaatctaacgaaacctccacgtcgtaatgaggtcactaagtatccgatcttataggaaagaagggacgaggtacatcctacgctctcttcgagaaccgtagaaatcatccgcggaccgcaccacctacacgatagggacccgatatcaaatccgtagagggtacttaagccggtcgtcgggaaggcatacaaattatcacggaagtaagtcgacttatgccccgcccggaataaaaacccgccagaggaatccaccgaagtcaagtccgacgagcctacta

SEQ ID NO: 100638 - DNA, 408 bp, Zea mays
  Clone ID: MRT4577_23293C.1
ttcatttcaaaacaaattaatttatacattacaatttattttaattttgaaacaaaaaaactttaatttaattcaaaatgaaagtgttcatctgtttgtttgctgcttttgccgttgctaacgctagcttgttggctgccccagctcatttgagcaccggatcatctactcaaacccgtagccaagatgctcatggcaactatgccttttcttacaacgaacaacacgccactggtggatcaagccgatctgaatctggaaccccatacggaacagttggatcttacactttgaatgtcgctgatggacgtcaacgggtagtcaaatacgttgctgatgctgctggtttccatgctgctttttccaccaacgaaccaggaaccgctccaaaagccccagctgcagttt

SEQ ID NO: 100639 - DNA, 347 bp, Zea mays
  Clone ID: MRT4577_23294C.1
gaggaattgacgacgtataggcggcaaacctatgaagagagggcagttgcagcgaaaataaagagatggatagagtcacatgcatataagagaaacattcttcttattcttgttttaattggtacttgtacagcaattggagatggaatccttacgcccgctatatctgttctttctgcatcaggtggcattaaggtccagaaccagaacatgagtactgatgtcgttgtgctcgtcgctgtggtcatcttaatcggattgtttagcatgcagcactacggaacagacaaagtgggatggctcttcgcgccaatagtcctcctctggttcatcctgattggaagcgt

SEQ ID NO: 100640 - DNA, 455 bp, Zea mays
  unsure (1)..(455): unsure at all n locations
  Clone ID: MRT4577_23295C.1
ttggtatgctgtatttcagacaagagacttgcatgcggaaaggacatcaatcttatgttccgagtgggtggtggacatgttgaagctcacctgtctcgatcacagaaacttggaaagtttttttgatgttttattatctgagggggaacattggccgctctggttgatgccatctttacaaaatggacatttatctgtgaaggtccagctggatccagatattacagatgaaattgaactcaaacacgagcgatttgttgcctttgttgataggcttattctcaaacttggctttagtgaagtggttttaggtattccaggaaatatacagtctgccacatcacaatcaattgatatcacttcacctgtctcttccttgtccaaagtatgggtggctggtgaggtcctttgcacttggacatggaaagggngctgtgcattgaaaacattcttac

SEQ ID NO: 100641 - DNA, 967 bp, Zea mays
  unsure (1)..(967): unsure at all n locations
  Clone ID: MRT4577_23296C.1
gggtggggtttttttagtaaatggtacggtgacgagaccggaggattttcgttactgttttatcgctacaggcagctctatccctttaccggaggcagaaccgcataaataaaataatggagttgacaaaacaaaaacaaaaaaagctgggcaggaccgaggacgcggccagggcacgtgatccaagattccaaggtgcgtcgcggcgtgtcgtcggctcgttgcctccctgctggctgcctgcgtagatgacggtccttgctcgctcccgacccgtcccaactgtacgtagtaatcaggaactgaatcgaaagacccaggccaatcatcatcttccttgctgaatgaatcagtgcgtaccaacaacaattgtaatacaggaacagcccaggccagagctaaagtaaggtactggaacggctagcagtgcgggcgcgagctgaggagcgggaagtcctgcggcgtcatccaggcgtaggtgaagcgcacggcgcccccgcgcggcgccagcgcccggccgccgcggagcaggcagcgctcgccgtcgacggcgcggatggcgcgcgggtccacggcctccacgctgctgagcccgtagcagcgcagcagcacgcgggactgcgcgcaccggcacgcgttccgcacctccaccgcgtactcgggcttcccctccaccacgcgtccacgcgccccgtcgcgcgctgccgcaccaccaggtcgccgcgccggcaccccgccgtcgtcgtccgcgtcctcgctggtgccggcgccgcctctaccacctctgtcgccgcggcggccacggcggcggcgagggcgacgagaaggaagagaagcgctgttctgattggttccgccgccatggcacctcacttgcggttgcagttgaagttgcaggggggtggcggaagattgtttggcttggctatntacttatttatttatccacgcatctgcgttgggtcag

SEQ ID NO: 100642 - DNA, 421 bp, Zea mays
  Clone ID: MRT4577_23297C.1
agggaaataaaatttctttgaaaaatgggttgccaaactaatttcgggcctgtatatgcatatctttcgaagacatttcgtcatatgtgtatatcctctgaaatccgaaccatatcccaaccaaattacatatcaacatctctgtcgtgtatatgtacatgagaaagaatccccttcgccaataatcccaacggcaaatgcatatttatcaccagcgtagcgtttagttggaaaaaaatttgaagaacctgtggcctgcctttctagcttagctactccgtgtcgcagtctcacgcttaccaggcaaccagagcagtaaggccagccaagccgagcagcagcacggcgctccaagatgaagctgaaggacccgccctggcggcgggcgacgccggctttccggtgagctccggacgcgtgg

SEQ ID NO: 100643 - DNA, 529 bp, Zea mays
  Clone ID: MRT4577_23298C.1
aaactatcgaaattcttttctctttttgctccaacaatttacattaacaaaaaatttccttctgttgaatttctttgccttgatgtctgggatggatttctttgtcttgactcttgagtatagtgtatttctgactctcatttgtcaattttgttgaattttatgctcataagttgagaaacttttattataagtgtacactgttttattttttaatgttgttcgactgattactgcaaggaaccttgtggaggtattgaatatgcttgcttgatggattgaagatccaactcgaatgccttctaacttcatatcccacgagtctatgattacttgtggcttgctgaagatggcatgaagatacaggcgattattgcttgttctgtggctcatttccttttacttagttaacttcctattaggtagctactgcaccagcaaacctgtcaacatattattttttactacctcttaatgagattgacaaattgttttggaatcttcaatactggaacagattgtttatggc

SEQ ID NO: 100644 - DNA, 424 bp, Zea mays
  unsure (1)..(424): unsure at all n locations
  Clone ID: MRT4577_23299C.1
tcgagncggccgggctcacacatcccgtctctcgcgagtatcggcggcgtcgagcgcggcaggctagagcctcgttgctgaggaggggagatgcgcggtatggtcgatatgtctatgatgtcgctgcgcgcgcagccgcccatacaccaccgagctccggcctcgatgctcctgctccgtcccgaaccaatccaccgcgagattacctgttctttgctgttcatggttttcgtatgcttctttgtctaccacttattcgcgtccctgccgccgcgaggccgtgttctctttttccccttcttgctaccacccccccccttattctctcttccctttcccttcaattacacgattttttttttttttccccaggacgggggcccctttttgtttttttttttttttttttcttttctcttttttt

SEQ ID NO: 100645 - DNA, 119 bp, Zea mays
  unsure (1)..(119): unsure at all n locations
  Clone ID: MRT4577_2329C.1
attattttactctgnggcaaccgattgagctgaagcgggggttgtgactggttgtgataatggctgcgttcgcctgagcatgtgttacaagtctgtcggatttgatggcattccgaccg

SEQ ID NO: 100646 - DNA, 663 bp, Zea mays
  Clone ID: MRT4577_232C.1
atcccgtcgccatggccgaaaaaacattcacctacgccgaagtctcggcccacaccaccaagaaggacctgcacatggtcattcacgacaaggtctacgatgtcacttccttcgtcgacgagcacccaggtggtgaggaagtcctcctcgatgtcggcggtcaggatgccaccgaggcattcgaggatgtcggccacagcgacgaggcccgcgaaattctcgagggattgaagatcggtgtcctcaagcgccagcccggcgacccggcccccaagaccaccagcgcctcctcctctggcgcctccgccagctctagctcgggcggtgtcagcgtcggtctctacgcgttcctcttgctcggtgccgccgccgcctatggtgtttaccaatacctgcaagtgaacgctgagaagcagtagatcccttctttcatctaatcaaaaataataatggacacattctgaccatttcttttcttcgtttctgtcgcgttgctcgattttggtttatatcttcttgtagattgcttgtggtatgaccagtcatatgtggtacgagaatgcatccaggggaaggactttttactatgaagattactccatcactttgaggttcgggtgacatagaggaagggattgaatgtcttactcaggttgcttttct

SEQ ID NO: 100647 - DNA, 349 bp, Zea mays
  Clone ID: MRT4577_23300C.1
aaaccccaattttgtaataaaaaaaaagccccctgaaggggcccgaagaacaagcgtcaaaaaaaagctggaaaaaacgctttcaaaaaagaaaggcataaactcttctcgaaagacacaaaaaggggggcgggaccgggggcggaaacgggggcgggaccccggggggccccccggggtcccccccgggacctggcccgggaaccatttgacctaaagaggagggaaaaaaagagtggcgaaaggaagggcaaaaaagatccccggggaaaattgtcacacgctcaaaatttccaacaaaaaagccccccaaaaattaaagggaaaaacccgggggggccaaaggggg

SEQ ID NO: 100648 - DNA, 260 bp, Zea mays
  unsure (1)..(260): unsure at all n locations
  Clone ID: MRT4577_23301C.1
accccggtcgacccagcgtccggnagaacaaaggaagcgggatgccgctgcccaggctgctgccgcataaatcctcagaatgtgcttggagttttgcttatgtctagtttgtctgcaaggatatagaactctctgttgccagactatatcatgtttaagtttttgcctgatggttgttgattcgtgaacgatgtttgcagctagctctaatgctgtaacgcgactatctatcttattgaactgttgtcgactacaagcct

SEQ ID NO: 100649 - DNA, 187 bp, Zea mays
  Clone ID: MRT4577_23302C.1
tcgttcttttgcagctctctctgaacggatgggttgctgacaaggacgacagactccactgtcgttaggggaacaaagtacatcaaatggttgaatcggcacattgaaagcttgtataccacaaccaggacacgctgtgctaagaaaacctacctactcacgaatatgttcacttctgaataacgta

SEQ ID NO: 100650 - DNA, 407 bp, Zea mays
  Clone ID: MRT4577_23303C.1
tttgggctgattatgtgctgaggaatcgtggaccaagaggcttacccgagcgttagttaccagtaataaaactgtcgacactttcttcgacgagcatctgcggtgtaagcatggatagaagttaaccaacggccttttatatttgatgggccatcataaacgtagtattgctaggggtcgcttagtaaggaagtatgctgagtgacgcgcagatgatttggtgacgtcaactgcgatacatgaacgtgagtatagctatatttagtcgttagtatagatcgtttagattcagaagactagcaaactgctgtcttacctcggaagtgtggtgagtacgttcccgtattcagacggttacgcagaactctaagttcctgacccctgaccgtagtagtagtaacgattac

SEQ ID NO: 100651 - DNA, 332 bp, Zea mays
  unsure (1)..(332): unsure at all n locations
  Clone ID: MRT4577_23304C.1
ctaatcaaaggctcggnngcatatatncctccaatttccctttttctcccaacaaggcaacaacaatgctntggttccgttaaacaaaacccaaaaacaaaaacacactgaacccaataattctatcccacacaaacttttctttctgtccgttctatccatctttgccgtgtcttttgccatacaccatcatcacccaaaaccatttcctgcaacctgtttcattgctccaccgccgcctctgcgaccgtcgtgccccgcaccccttgccctgctgcatccgcatccgtttccttcttctaaaggaatccttctttcggcatcctgcggct

SEQ ID NO: 100652 - DNA, 278 bp, Zea mays
  Clone ID: MRT4577_23305C.1
aataattccgtgacgcatactgcatctacgccgacgctgaccgttcagactccggtcacttcgcgctcgagtgctacctctctacgaccactggctgacctagctccctacaccggactacctaacaaacctacaactactagacgctacctactattacctaccgactcctgccgacctcgacgtccagctaccctcacttcccaccgacctcccgctgaccactctcagatcgatccactaccctccgcttctgctctgctgtccccgagtttgtc

SEQ ID NO: 100653 - DNA, 159 bp, Zea mays
  Clone ID: MRT4577_23306C.1
cacagtccaggacaccacgcatatcatcagtactacatgctagctagctgctagtaaaacacacaaggcgactagatgatcgatttggctgtcatgaaatcaagcaagcaatcgtgaatcccaaaagcaccaggtcctccatttcatgtcccactcgca

SEQ ID NO: 100654 - DNA, 201 bp, Zea mays
  Clone ID: MRT4577_23307C.1
atggcaatggccgtggatgaacaccattgccgctcgcgcgaactggtgcgcggttgtggctcagaacgtctataccaaactgtgggcattgctggaacgatctctgcactgtttgcttacgtcatcggtgtggcgatcgaaacttggaaagctttggatggacgtgagaacgggcagggcatacgtgcccgcgagcagtaa

SEQ ID NO: 100655 - DNA, 613 bp, Zea mays
  Clone ID: MRT4577_23308C.1
actccatatcccatccatcacggctcgctactgtactgacgatagaatctgcttcttcacctcactagctaccactacttagcagctcgatcgctctgtcctgaataatgaccgctcgctcgtcctcgcagcagatggtcacggcggacgcccctgggatccacgctgctgctgctggcggcgtggaccagcaactgcatcgacgccggtgagatgaggcgaggtgacaccgacagtggcgccatgcctccgcgacgcaaggcgaagagcatcatctccctccgcggcatgctacagcgcagtgcgatcgctcaacagacgctcgacagcagggtgcaccggcaggactcctgcatagtgcctcaagagcatgacgacccggctcggcggcgactgggaactggccaagctcgctaatcatgcccgtatagtggagcctatcagtagcggtgaccatcatccccaccgcagactgcaccaagatcaactgatctatgcacccatagtgtacgcatctcgctcaggtgtatgtcatgctacgtgaacatcagaagcatgcacccgtcgtattagcacagatgtcctatgtaccagagggtcatgcatcataatg

SEQ ID NO: 100656 - DNA, 306 bp, Zea mays
  Clone ID: MRT4577_23309C.1
tgaattatgagctggagtgtaagacgtggacgagtggctgtggcatgcatttaagtcaaattgaaggggtttataaaggtgttctctagctggcttctatctataagaaagaaaaggcagatttctagtgccgaacttccgtatctattcccaggactcatatcatggtgttgtatttcaatttcatcacaatttgacagtttatgctgttcatgctaccttgcttcttggtgacaatgtgtcctcaaacctagatcctctctggtcccttccatttgccccactcaatatccctcttgggcagct

SEQ ID NO: 100657 - DNA, 332 bp, Zea mays
  Clone ID: MRT4577_2330C.1
ggggttggggggaaaaaccccggtttttggggaaaatgggcaggaaaggtttctgggcgggaaaaaaaggattcattttttattcgcccaccaaaaaaaaaagttttttgtttaacttaggggaggggaaccctttttaaataaaagggttggtggaataaaaaggggggccaattaaaaaaaaaggggccagggctggtaaaaacttggggccatttattttgggaattccttgagccttttgaggacccgccccgggcgggggctaaaggacgggaaagggtttaaaaaagccggggccaacttaaaaaaggggtaagggtttttttttt

SEQ ID NO: 100658 - DNA, 620 bp, Zea mays
  Clone ID: MRT4577_23310C.1
ccggccgggtttttgtgccttttattgtgtgcatctgacgtgacaggagcctgttgaagttgattctgttaacattttaaaaaaaaaaaaaaaaaaaaaaaaaaaaaaaaaaaaaaaaaaaaaaaaaaaaaaaaaaaaaaaaaaaaaaaaaaaacccttccccgaacacgggttggaatccgccgccatcgtttaaagcagggaaccctacccgccctaagggacggattgcaaatctcccagccatgacgttaaaggggaggaacgggggacgcaacaagcacgggcgcggccacgtaaagtacatacgctgttcaaactgggccaagggctgcccaaaggataaggctataaagcggttttgggggaggaacattgttgaccaggctgttgggagggacgtgcaggaggcctgggggcatgagggatatgttcttccaaaattgaacgcaaaggttaataactgggtctaatgcgcaatccatgcgcacattgttcgggttcgctctcgggaaaacaggaggaaccgggagcccccgaagcgtttaaggcgccgggatgatggcccaaggccaggtaagggcccaccgcgcccaggtgctgctgccacagaagttccc

SEQ ID NO: 100659 - DNA, 452 bp, Zea mays
  Clone ID: MRT4577_23311C.1
agggcacgggcgttcatatcgtcatatgtgtgtacacacgcatcatgagtcatcttagtagacgctggacagatcccaagctattagtggtttagctttccctaaacaagatagcggtttgactagtcgtagattccgtcaaggaaatcttgacaactttgctctgaacctggcaccttatttatctatctgttcatctgaagtttccagaggttcttttccttgaatcttttatcctactaatttagggagatgctctctgatatttgtcttctgcattcacctagctagattatttgaagggcatccaaatctttgtgcactctaacaagcggtgtcagattccatagtaaaaaaaaaactgaaaaatcccatgggtcacatggtgatgggggacatgctgcatacttaaacacttgaccagtctgcaaatgctatttgtgcaccttttt

SEQ ID NO: 100660 - DNA, 644 bp, Zea mays
  unsure (1)..(644): unsure at all n locations
  Clone ID: MRT4577_23312C.1
ggccgctcgaggcccggccggttcctgggaanaaannnnnaaaaaaaaaaaaaaaaaaaaaaaaaaaaaaaaaaaaaaaaaaaaaaaaaaaaaaaaaaaaaaaaaaaaaaaaaaaaaaaaaaaaaaaaaagggtttttgccctttttttttttggaccccaaggggtttggggtttgaggcccaggggcccagaaaggggaaaagtgggaaacttaaccaaattttttttttaaaaatggggaattgggggggccaagggtttaaaaaaaaaaaaaaaaaagggccccaggggcgggggccctctaaaaaaaagggacccccccgggggggggaaatccaaattaaggtttttcaaacccgccacccccggggggggccccggaccccatttcccccaaaagggggccaattaaccccgcccccggggcggggtttttaaaccgcggggaggggaaaaacccgggggtaccccaattaattcccttggaaaaaatcccccttttccccggtggggaaaaaaaaaaaaggcccccccccaatccccttcccaaaaatttggcaaccctaagggggaaaggaaatttgaaaccgtaaaatttttggaaaaatcccggaaaatttttggtaaaaccccccttttttt

SEQ ID NO: 100661 - DNA, 392 bp, Zea mays
  unsure (1)..(392): unsure at all n locations
  Clone ID: MRT4577_23313C.1
acaaacnncnacanncagaccnacaacaagaaaggggccncccgaaggaaagggcaccggaaggaccaccangaagggnccanggcngcngngaanggacacaccaacagcnnnncaccccnggaaaacaangngaagccaaggaagcngcggaagganngaagncaaagaanngaaacccnccaaaccacgncancnganngacanngacanaaagnagaacnngcnnccaanacgnncnnaaaggnnaaangnnacacacagcgnacagncaangcaaggaggccngcacacagggaacnnncngncnaggacngcggccggnaagaccnnccngngnggaccacagcacngcncaggaaagcngccngcaggagccgggaagnngcaga

SEQ ID NO: 100662 - DNA, 187 bp, Zea mays
  Clone ID: MRT4577_23314C.1
accccctgcgcactctcaaagtgcacgccctcgtgggcattgtgcacacctggttaattcacatcacggagctcctctccctcgaggacggcgcacctgacaacttccaccccgatgagaactcgggaaacatccgcttccctagacaaaacaacgcgaataaacaccacacatcattatgctctaa

SEQ ID NO: 100663 - DNA, 194 bp, Zea mays
  unsure (1)..(194): unsure at all n locations
  Clone ID: MRT4577_23315C.1
ccggccgggccttcccctttcacctcagtgtctcctccatagacaccaggcttcgatgactacgccggaccatacgcgcgtcgcccccttccggcgtgatggccgcgccccaccnanccacccccatcccttcaacgnanccccaccccgcggncgaccacacccaaaacgacccccacctggccccgccctct

SEQ ID NO: 100664 - DNA, 789 bp, Zea mays
  unsure (1)..(789): unsure at all n locations
  Clone ID: MRT4577_23316C.1
ctcgaggccggccgggatgaacccgggatgtctctccactccactcgatcatcccaggatcgttcaccatctcataagctaataagctagttcttgaaccatcgtactagcaaacaaaagatggttcagcggccggctgcagccggcgatcgggcaggcgaagggtggagccgggtggcggaccagccggccgcggcgggaggcagcagcggggggcggtggcgggatcgtcgccatcatcatcagcagcagcaggagctggtgctgcgtcggctgctgccgatcaacaaggccaaggcgtgccggttcaagcgcagctgcttcagcgaggaggacgacgccgcctcctccgccatgcttctgctcgcctgcgtcgtctgcgccccctccctttgatggtgataaaaatactttttatttactttggccgcctgcttgtaactaatcaacatgtggatcaccatgtgatgccatgcctcatgcatgtcagtctgtcgcatcggaaacgttcgctatgtaatggggtactggtcgttgattcgtctctctgaatgagtgtttggcagcaatttctttcaaaaaaaaaaaaaaaaaaggcccctagggccggtgttttttttttcncccccnnacccncctcccccccccggcggcggcggcccctgtgtctccctccttttgcgctttttttttgggggccgggcggggggtcccctttttgggggcccgggttttcctcccccttccccccctttctttcttttcttttggtccccccttttttttttt

SEQ ID NO: 100665 - DNA, 173 bp, Zea mays
  Clone ID: MRT4577_23317C.1
ggtcgcgtgggcggcacggcgtgctgctggtgatctgcttccaggacgtgcacctggtcgcgagagcattgccgagctcgcaactgggagttctgaagatgcacgtcatctgctgacctggtgcaggccatctggtcgtcaccgacgtcacctacttaacgtggacgtgctca

SEQ ID NO: 100666 - DNA, 304 bp, Zea mays
  Clone ID: MRT4577_23318C.1
caagggaaaattccacaactgggggcaaaacagtttaatggaaaaggccagcaatcccgggggggggggaaatgacccacctggcacaggaggggatcccgaaaaagagtggtctagttccccgggggcaaaaggggaaaaacaaacaccccccggttaaaagaaaaaacagggggtttccaaactttttggcctcaaaaccccaatggtaaaaaggggggggccaggggggggaaaaaaaggccggtggtttgggttgggcttaaaaagcgccctggacggcccccccattagacaagggggg

SEQ ID NO: 100667 - DNA, 554 bp, Zea mays
  Clone ID: MRT4577_23319C.1
ctgacgtcaatatatagagagagctaaatacagtttccagctacaggaacacttggttgcagcgccatcaaacaattctaacagcgactcaaacaacaacgccagcagcatcaacaatatgtccaaaattcagtaccaccacatggtttctcatctgacggtgagctgaacctgatcgcatctccagaccagtttattcagcagatgaacatgaacctcgacgaaggccctgttccaatgtcgcgagataaactttagcagctattttttagctacttttagccatttataatctaaacatgagagctgtggggggtaattgaaactaaactttagcacttcaattcatatagctaaagtttagcaggaagctaaagtttagctcatgagattgaaacggggccgaactcacgcactcgatctcgaaccaaccagaccacaccagcgtatcaccatcagagcctgtggtccaagtcgatcttactcggctgaatctgctcaccctcttgctcatactgtcagtgcggctctctcatcctgtattttccaggcca

SEQ ID NO: 100668 - DNA, 260 bp, Zea mays
  Clone ID: MRT4577_2331C.1
ccttgtcaatcgtctttgactttgacagatcttcggtaagcactactggctttttgccccaacggattcctctcttcttcttatcccacttaccgtaagcttgcccacgtttagcgaacctgtctaagtgcttattcactttccacagcttcttctgttccaacttctcttcagggcccattctgtcatagaagtcactaattgaaggttcattcttattgggttgtctagcccacttaggagctggcttcagtactatc

SEQ ID NO: 100669 - DNA, 481 bp, Zea mays
  Clone ID: MRT4577_23320C.1
gagaaggatgtggacggctttcatcctctgaatattggcaagcttgcaatgaaaggcagacaacccctgttcctcccttgcacgcccaagggatgcatcgagcttttacatcggagtgggattagcataaaggggaagaatgcagttgtggttggtcgaagtaacattgttggattaccagtgtctctgctccttctgaaggaagatgccactgttaccatagtgcactcgcgcaccgaggagccagaaaaaatcgttcgtgaagcagacattattattgctgccgcggggcaggctatgatgatcaaaggcagctggatcaaacctggcgctgcagtggttgacgtagggacaaatgctgttgatgatcctactaggaagtcaggttataggcttgttggagacgtcgattttcaggaagcatgtaaggtagctggatggataactccagttccgggtggtgtcggaccaatgacaatct

SEQ ID NO: 100670 - DNA, 777 bp, Zea mays
  Clone ID: MRT4577_23321C.1
ccgggatctgcagaagacaacctagatgagactgctggggctctggtgcctgaagttttgcctgatgaatctccacgtgccatacttgagataatgaccagccattatattcctggaggacacttgctctcacccctcaaggaaaatgttctagaattgaaacaaaagcctaaagtgatggtaaaacaagaagcacctgaatttcaagccaaagtagaattgcatggagactggggctgtacaacctctgctactctggataacaaagataagtgtaccaaggaaatcaagtctgatgaagagaaagacaagatcctcattttcaggagttcaaaaatcagagttaacaaaccatctgctgtgaataagggaactaagcctttacaggatgttttagatgataccggttcaaacttgttgcctacaattgtaaatacagaacatacagttgaggagccagcgaaatttacaggtgcaatttcagataaaatgaagggatcgaaggatggtgcatcaaaaggacacattagtggcaagaacaaaaacattaaggaggaaccttcgcttgatcatggattttctcgtaaaaacagatgtgattctgatgagtacaatggtaaacctcatgccagttcatgtcagttgcaaaacattcccaacaaaacttcgccactggagagggacaaagggaaagtattgcatatggaagatgaaccatctcagtacaaaagcaaggaaaatggagacctgtttagtgcagattccatggctgtcatg

SEQ ID NO: 100671 - DNA, 424 bp, Zea mays
  unsure (1)..(424): unsure at all n locations
  Clone ID: MRT4577_23322C.1
aaaaaaaaattccttcnatttatttgaaaaaaaaannnnnaaaagggggggntttttgggaggaatcggggggttccaagcttgttgattagcaaactacgggggttacatgaaaataaaggccccaacgatgtcattcaaacaggaaggcaacagactttgcccccaaaggggcgtaatcccggagctttccagacattcaggtccccctttatatggaaaccatcactttggcaaatcccacaaacagaagttaaagggcccccagctttgccggggtggcattttttatgtggcagcaaaaagggatccatcccccgttggggaggcggtataagcttcctattccccagttgggggacggaaaaaccagagatccctcccatgctttaagggcaccacccctcccaatggccttgaagat

SEQ ID NO: 100672 - DNA, 1229 bp, Zea mays
  unsure (1)..(1229): unsure at all n locations
  Clone ID: MRT4577_23323C.1
cgcagttcaattatgcagttccaaaggtacacaagggtgattcaggtaaatgcactactctgtgcacatacgcaggagtagatgatatacaaacgatgcactggtagctaggaataccaaaaacgaggatgcgtataaatgtgcaattagcggtttgaaaagtatcagacgagcattgcacgtacagatcaagctatcgcaggtgtcattgaaaagtcaaaacactaggcagcatgaagactatgacatcgtctactctgcctactgacattgaaacaacatggcacgtggacctaagaagcatttgacgcgcatcaatgcgccccgatcctggatgttggacaaaatcggtggtgtctttgctccccgtccatcttgtggtccacacaaactacgcaattcacttccattggttgtaattttgcgtaatcgtctaaagtatgctttgaattatcatgaagttgtgaaaattgtaatgcaacgtactatcaaaatcgatggtataaagtttgtaccgacaataacatgatttcaaatgtgggctaatggtatgtatgttaagcatttgaacgatacaggacaaacacttggcgtaattttatggtgagtgtgaaaggccgtttcatacttcacaaaatcacaccttgaagaatcacaatacaaattgtgccgtgtgaagaaagccgctatcggaccaaacaaaattccgtatgtcattacacacgatggtcgcactattcgttacccagatccattgatcaaagccaacgatactatcaaatacgatttgtcaactggtaaaatcaccgactttattaagtttgaagttggtcaattatgcttggtgactggaggtcactcggtgggccgtatcggaaccatcgtgtcacgagaacgtcatccaggttcattcgacattattcacgtgcgtgacgcttctggcaatctattcgctactcgtttgagcaacatttttgttattggtaaacaaaagacaccgcttattactttgccgaagggcaaaggcatccgtttgtctatcatggaagaacgcactcgtcgtttatcaaaacgcaagtaaatgcgatttgattggaagcgtttttaattcacacacacacatgcataaccacacctctcgcttcattatttgattaaattaaacacttttaaataaaaaaaaaaaaaaaaaaaaaaaaaactagtnctagatcgcgagcggccgtata

SEQ ID NO: 100673 - DNA, 303 bp, Zea mays
  Clone ID: MRT4577_23324C.1
aaatgacttagtgcctgcactgaaaaagaacattttgtatgctatttttctaaaattttgaacctaatttatgactgtaatagatatgtttgcaacatatgaatgacctttttaacaatttaatgaagcagaatggaggataatctaccagttaatgtccgggaatatccagaccttggtaagcaagcactaacatactggtctacttcttcccccaccagggcagcctgacactgaacaacccgactggttttgtcccgccccccggcgcccccccccccctcctcacccgcgccatccccc

SEQ ID NO: 100674 - DNA, 216 bp, Zea mays
  Clone ID: MRT4577_23325C.1
agccaataatgaagcagaccttcagttggagaacggagaacccatctccaagatgggcaactcaaagctctggcgagagcacatgttcagacagtcatacaccagcacgctacgaccaggcccctcatttgagacagaaacctccactgcctggtgcaagcccggtgacatacggtggagcactagccattcattgtgactgctagctatacgcaa

SEQ ID NO: 100675 - DNA, 381 bp, Zea mays
  Clone ID: MRT4577_23326C.1
ccaccccaaaaccccttaaaatttgggaaagccaccccgtatttgggggcggcccacaacctcaaccaaaaaacctttttaatgaatgccccccaaaaaacaagttaaaaggcggcccccccaaagaattttttatagaaacaaggtggtgggtttaaaaaaaccagctggaaaaaaggcaacaacttttggttttgccaaaagggtggggggaaaaacccaaacctgtggttaaaaagccccaaaaggttgctgcccaaaaaaggagccccgtgtaccccaattttccaggtaaaaaaaaggtttttcccctgcttccaaaaaacaaagggggccaaggggggcaaatggtttaaatgaaaaaatttgttttccttaaaa

SEQ ID NO: 100676 - DNA, 447 bp, Zea mays
  Clone ID: MRT4577_23327C.1
gggaaatggaacctcttatttttggggggccccctccctcatccaaaaaactttttttttgaattccaaccaataagcaatctaaaaaagggcccccccaaagatgtgttgttgggaggaggctgctgggtttgtcaaaacaagttggacaaagggcaacaattgttgtagttactaaaagggttgcggggttacccccaaaccgctggtaaaaaggcaacaactggtgctgggtcaaaaaagaaacccgggttgctgcacctagctggctaaatgggagaaaaatttgctgctgcaaataaacagcgaggttcagtgcggccaattggttaaatggaaaaaattgttgttgatgaaaataggcaaaaccctacccggctgaatgggaaaagttgttgctgcaaataacccccagggttcaggggaaattgtgggttaaatggaaaa

SEQ ID NO: 100677 - DNA, 363 bp, Zea mays
  unsure (1)..(363): unsure at all n locations
  Clone ID: MRT4577_23328C.1
tttgtgggggggggggggcgtgaaatgtatatctcggacaccacctaaccttttacaaaaaatttattattgaactggaactcataagaaatataacccagggctccacccatgatgggttcatgggataacactgctgggtttgttaaatcaagaggggtggggggggacaattgatncaccctataaaaggtgccaccgttaggcgcatcatgctggtagaacggggacaactgtggtatctgtgaagaaggcagctaggctcacaccatgtatcttgctaaatggcggtagttgttgctgctgtccataaacatgagagtgcactgctgccagttggttgaatggcacaaactgcttggg

SEQ ID NO: 100678 - DNA, 267 bp, Zea mays
  Clone ID: MRT4577_23329C.1
catacgcgtgttcgactaggccagatttaatgtccgccgattgttctgtgctagggggcacgcgcatcgactgtgatgggtcagactgaactgttaagcctggtcgccatcgttcgtacgtgcgttcgatgcttggcgctgttgatcgctccgtatcatccaactgatggtggtgtatctagaccgatggcttaatgattagagtacataaacaactaacggtgcatggcccatgacttacttatcttaatggagtcatcgattatg

SEQ ID NO: 100679 - DNA, 296 bp, Zea mays
  Clone ID: MRT4577_2332C.1
gaggcccccagcatggagtccccggagcctgtcaagccggaacagggcttcgtgtggcaggaggccagtgagttcgaggctgacacggcgggttcgaccgtggaacgccacaagaaggcccagctggatcggctggacatcaacgtgcagattgacgactcctatctggtggaggcgggcgaccgccagaagcgctggcagtgccgcatgtgcgagaagtcctacacgtccaagtacaacctggtgacgcacatcctgggccacaacggcatcaagccacactcgtgcccacactg

SEQ ID NO: 100680 - DNA, 259 bp, Zea mays
  Clone ID: MRT4577_23330C.1
gagattcatgacgctcacttgttagagcattgcgattaaccgagtatcccggatctaccggcaactgcatatctttgaagcatcacacagtgccctgtggatacggaagatccagctcccggtccttccgaggccaatgtcgccacgatcagcagcatattgctcatactagcagctatacgctgtgaccctgacaaaccgagcttcatctcagccttatgacgacgtctactctaactaactggtgacctgagatccc

SEQ ID NO: 100681 - DNA, 432 bp, Zea mays
  Clone ID: MRT4577_23331C.1
ctaaaccggacttattataaaaaaaaaaaaaaaataaacgcaataacccaccgccatcctccagagctactaaccgtacaatggatgtgatgtttgctagcagcaaatctcgtgttgctgctcgtgttttggtagagcacctgctgctgccgaccatgtgtgggatctagagctggttggttgacgatgtccgtggaatggagtgtagttaggtgggtatcaatgtatgtttggagctaaaccaatatctgcgctcattttagtttatttttgtaatttaaatgtcgtggggtcagcctggcacgattatactgacagatcgtgtttagatcttgctcgtggcctaccgtgctggtcgctagttatgttcgcaccgggctggtctgacccaaatcgtgctttagggtactttactgacaatgacatgattcg

SEQ ID NO: 100682 - DNA, 238 bp, Zea mays
  unsure (1)..(238): unsure at all n locations
  Clone ID: MRT4577_23332C.1
ggcacgcacgcgnacgcaagcaaaggaanncggggcgagcgagcccagcaagcaaaggaagaagaagagggacaagacagggaaaggaggcccaagcgaagaaaaagaaagcggaagaacccgcacnaccccaggagaaaaaaccagacaccacaagcagngccaaggacgcgaacaaaagacaaaccgacccgaaggaaggcacacggacaaaaaccggcaacaggaaggagaagaa

SEQ ID NO: 100683 - DNA, 772 bp, Zea mays
  unsure (1)..(772): unsure at all n locations
  Clone ID: MRT4577_23333C.1
gccggccggtccgggagccaggccgcgcccgcgccggcggccgccggcaagaagaagaagaagaaggagaagcggggcgagaaggcggaggcggaggccgacggcttgggcttgggcgtggcggtggagaaggagtcgtcggacccgcgcgcggacttccgcgacagcatggtgcagatggtgctggagatggggctgtgcgactgggacggcctccgcggcatgctgcgccgcctgctcgccctcaacgcgccgcgccaccacgccgccatcctcaccgccttcgccgaggtctgcgcgcagctcgccggcgcggcggcccctgccgctcctcctgcgcacccgtcgccgccagcgccgtgccagtaccggcgctagctgatgacgatagcgtctaccctgcccgctcgtgccggncgggctgctgctctggtgacagggatagatttctcggagcagaggacaatttttttagccgtgattagtcaggaaactaaagctaatcaacgacatataaatatagcagtaataaagtggtgtgtggcagctagctagcgttaatagactagctagctcgaagcatgtgcttgcacacgtagttgatgattgagttgcttgcttgtctacaagctatggccacaccaatacctggatgggagaagggcgtgacgagatcaacccnagtctacacaattcgtagctgtaatatgtacacctatgttgtgaattgtacgcgtgtttacgtgtctgttaaaaaatagtcttggtttgt

SEQ ID NO: 100684 - DNA, 525 bp, Zea mays
  Clone ID: MRT4577_23334C.1
gcccatctcgcccgccggtttctcccttatccatctcctcacacctcatgtcgcatcctctccccttctatgctccaacggcttacggagcagcgctgatggcgccgaggctgacacggatgcgctgtcaagcgtggcacgggacgtgagttctactctgagcacggcgcatcctactactgggagaatcatggagaagaaccagcggcacgtcgtgcggccccccaccagcgagaaatgtcgggagcgctccaatcatctacctctacacccgcctcgatagcctaccatgtcggtatgagtcattctggagagatgtcgcacgcgtcaagcacgaatggaggatctggcacggcctccagggtgaagacctcgagagtgcgacatgatttggagctgggctctatgcatgaatctgcggaggtaagcatgccggcagacggggcacctgtaacaggtatgaggactaagggatttacagtgatttagaacctgctttatgctacagctccttatctgatgctt

SEQ ID NO: 100685 - DNA, 920 bp, Zea mays
  Clone ID: MRT4577_23335C.1
gtcttctgctcacatccttgttggcttgttgcctttgcaattgcattgcttccaccagtatatacagctgcaacagagtggaggactaaggttcagggaagatgcagcctcatgagaaggttgctgttctgaagcctgttgcctcaaggcctttctccagcttctggcccttcccaaagtttctgcacgacttcaacgccacttgttccccaacaatcaccttcccacaggagagtgagctaatcaggccaaaagccactcggttggcatcgctaccggctaaccttccagcacagatagcagcagcgatagatgccgggtcggataccatgtctgaggaggtggaagagtatgcaaaacatcacacgtatcgtgaccatgcaacagcgtggcaagctgcgaggcggaatggtgagcgcagtcgcctgtcacttgacgggtacagctggaggaaatacgggcaaaagaaagtgaaaggcagcgagttcccgcggagctactacaagtgcactcaccctagctgccctgtgaagaggaaggtggagacgacgccagatggccaggttgctgagatcgtgtatagtggtgagcacaaccacctgaagccgggcaagccttgtcccccgaggaagccattgctgtcgacaagcacagatgctgtgatgtgtgacacgcatggtattgacgacatgacgccgccggagtagagacgaagacaaccaggagttcagattcttcgttccagtacttaaatctagctaagctgctggtttcacaattccattaaagattgctgcctttacttttctttattttgtttacaactccaagtcactcttacagttgtcataccagctgtttgattcatcattcatacacatcaatggcaattgcatgctctttgatcccctaaaaaaaaa

SEQ ID NO: 100686 - DNA, 442 bp, Zea mays
  Clone ID: MRT4577_23336C.1
aaaaaaaggaagggcccaggccatcgagggatggattcatccattgatgacaaaacatgcgttggggcttagttaacatggcccgtttacagggggcagccatggacattgttgggggggcccacatggatcatgagcatcccccggggggggcaactcctacccccctacaatttgaacagggggggtccagaaaaaaaccacactgttaactcgacggacggacaaacaaagggggggatctggggggagaacacatgtccggggttgctaaataagttagttgccggggacaaatttcggggcgtttccccaggcttttttggcaacggggccggcaccggggtcaaaggggttctcggggggccccttgccggggcacatggcctgcccaaaaaaccccaacatggaaaacatggcaggggggccgtttttggccccc

SEQ ID NO: 100687 - DNA, 368 bp, Zea mays
  Clone ID: MRT4577_23337C.1
accacgcgtccgctcctcagactcctcttctcacataccctagctacctgggcggcgtcgccggatctgcgatgggggcgtacaagtacgtctcggagttatggtgaaggtagcaatacgacgtgatgcggctcgttgaacgcgtgcgctgctgggagtacaggcagtatccgtccatcttacggctgacaagggccacccgtaccgacaaggcatgacggactaattctaaggccaagcaaacgtatgttgtttaccgtgtccgtgtgaggcagtagtggcatggaagaggcctgcaccgacagagatcgcctatgcggagaccgaccaccacagtgttacccacctgatgttctaaaggaacaaca

SEQ ID NO: 100688 - DNA, 514 bp, Zea mays
  Clone ID: MRT4577_23338C.1
acttctccggcccacctggggagacaaggactcaactacctgacacccatgatggtcgagtgcgcggggaagatccacatcccgaccgccatccaagacctaagcgggtgtgccacgctgccggacctacgcggacgcgctgaccctgccagcggacaggatcccgtacgtcgagcgcgtgatgaagctgatgaaggcaccgggcgccttctgacttccccaccacgggcagcactggatgaaaccgctgttctggcggctggagtagggagggaaagggggaagacaactgtaatcacttcagccacaagcatgcagaaaggatactggacaggagcaagtcagacattgcagcgaattcggaccatatgtacgaaacggacgggacattgctcaaggaaatgggcatggacgcctatacgttctctatctcttggcccacaacactgccgaagggaaccaaacaaggaggcattcaccccggatgacatcaagtacaacagaaaacctcatc

SEQ ID NO: 100689 - DNA, 159 bp, Zea mays
  unsure (1)..(159): unsure at all n locations
  Clone ID: MRT4577_23339C.1
tcgtcgactccgataaaagcgcagcaaagcaacgcaaagcccactcctctacagtgctctcttgccngccgtgacgagccaaggacttgaacgcattcactccaatgtatagatactgtgattgcctatcatgagcccccttgtctacgccacccccgg

SEQ ID NO: 100690 - DNA, 779 bp, Zea mays
  Clone ID: MRT4577_2333C.1
ccggccgggatcatcatcgtcaatttatccttgtttaatggatcgactgattttgactgacagcccgcaacaagagttaactgggtagtgaacctttgaaagaactgccgccaactaccgtaagcgccctacacacagtatactgcagagtacacagacctcgatcacgtccaacagcagttgagcctcaagttcaaaacgttttggtcgtcagcccaaacccagtccagccttactggtcttagccgcactgcaactgcgtccatcatcttaggctgacgggcttttgggtacctatcagagtacctatcactatcgtcatcgccaccattaccttagtagatattaactaccgcacatctaccaagtgaaacacaacctcagaaacaaataatcatctgcacctctgcacagacacggccgtgccagctcttgtcagtcgcagtaataatcccaccgaggtccgaggcttgggatccatcttcacatttcagctttcagccacagaagcaccaccaaccaagatgaagctgatctcgcgcaaggtcccaaagaccctcgaggatgagaccgtctctcttctccccgaggatcccgaagatatgtggcatgcatacaacctcattctgcctagcgacatcatccacgctcatgccatccgtaaagtaactacaacctcaaatacgggcagcacagcttctgagcgtgttcacactgagttggctatcaaagtcaaatccaccttctttgaccctgtcatctcatcgcttcgtgtctct

SEQ ID NO: 100691 - DNA, 1343 bp, Zea mays
  Clone ID: MRT4577_23340C.1
ccggccggggtccaacgcctctcctcccccttacccgcgcgggatccaacccgcccataagacgccaccgccccgcatctgcccccacctggatacgacccgaccttcaaccccgacgccaggcagccaggcacgcacgcacgcacctacctgctgcggcggcccagagagatggacggcgggcggccggagatgcggcggaccatgacgctgtccgagcagctgtcgtccacgcccgacccggccatccgcgacttcctcaagatcccccaagacgccgacgtcggcgggatcctccacgacgaagatagcccctcggctgtggacgcgcaggggccccgcgccggcaggacgagcggctggaagccgctgcgggaccggctccggctccggcgcgcggcgggcgcctggcagacgccgcctaataagcccggcgctgccgcggcgcacgccccgaccaacagcggcaatctcagcaacaggtacaactacaaccccggcgaggcggcggcggcgttctcccgcaccttctcccgcgcgccctctctgcgcgcgccgtcactccgcgcgacgcccacgttctcgcgcgtcgcgtccacccgcctcggccccgcctcgtcccgctccagctccaggcgccccgcgacgtacgacttccgcgacctcgacgagcgacgccacgacgccgacgccgacgacgggggcgaggaagaggacgacgagggcgagggcgaggacgacgacgacgagggcgacgaggaggatgagaaggaggaggcgcccgccgcgcagatgtcgctgatggcgctgctggagcagacggacagccagtgggacgacgacgaggacgaggaggagagcggcggcggtggcggcgcgcgcaagaaaggcgagggcgacgacgacgaggacgacggcgagggccgggaggaggagatggtgcacgtgtgctgcgtgtgcatggtgcggcacaagggcgcggccttcatcccctgcggccacaccttctgccgcctctgctcccgcgagctctgggtcagccgcggcaactgcccgctctgcaacggcttcatccaggagatcctcgacatcttctgacggatcgatcgagcttgccgtcgatcaccatcgtctagcttgcttccgcttcatatcctagacgaggatgtgagtggccgatgcgacactccggaatcagtgaaactgaacctctcgtagacgaattcgatttcgagctacccagcaccaaaactctgttgtttgctagattttctttttggggatgtcattgatcgttcaagtacgtatgctaccgtacgttgcaataaaatggtatagtatct

SEQ ID NO: 100692 - DNA, 675 bp, Zea mays
  unsure (1)..(675): unsure at all n locations
  Clone ID: MRT4577_23341C.1
ggccgcttttttttttttttttttggtaaaaggtgtagttgtatatattagtagggtaattagtaaacggtgtagctacatgtattctactccagctcttggaagcatcaagcatcgccaacagattagtagtacatccacgaagggatactgatgtaacagaatagtagcttatcttatccccagcagaataccacgcatggagctaatatctggcgatgatgcgtgcacggagcggctgcttcatgacgacggtgaagtccagcgcttccgccatttccaccgccacgccgtccaccggcgggcgccactccaagtcccgcaccatcctcgccacgaagtactcggcgtggtggacgccgagcgagtagccggggcacatgcgccgcccggcgccgaaaggcatcatcttgatctcccggctgccggtgatgtcgacgccgcagccctccccgccgtccaggaaccggtccggccggaactcccgcgcctttgtccacaccgtctcgtcacgcccgatctctgccaccaggaagttcagctccgcacccctgggcaccgtgtagccgccgacgtcggcgccgtcggtctgcacgccatgcgggagcacgaagtggcccggcgggtgcaggcgaaggccctccagcaccacggccttaggtcccggccggctng

SEQ ID NO: 100693 - DNA, 314 bp, Zea mays
  Clone ID: MRT4577_23342C.1
caccggcgtcatgaacatgaagctagcagcacggcccagcagcggacgccacagccgtggctgccgtcctgccgttgtcccctctgccggcaagcaaatgctgctggttcgacggcaccctccgggctcggcgagttggcctaccagggccactgggggtggtggtggcggcgtcccagctggtgccaccgccgcagattctagcgggcaggcaaaagaggaggaagaagaggatcgtgcgagcagaaacacctcgagttttgagccatccatctggggagatttcttccttacctactccagtcctctggcta

SEQ ID NO: 100694 - DNA, 656 bp, Zea mays
  Clone ID: MRT4577_23343C.1
aaaaaaaaaaaaaaaaaaaaaaaaaaaaaaaaaaaaaaaaaaaaaaaaaaaaaaaaaaaaaaaaaaaaaaaaaaaaaaaaaaaaaaaaaaaaaaaaaaaaaaaaaaaaaaaaggggttttagcccgggccaaattaggttggggttaccttgggaggcctgttcccttgccccccccgcattggaacattcaaacgggggaaactcccccccaaaaaactacggccttgattttaggttttgccggggggcccctacccccaagggtttgatccaaaagtccggcttattgtgttgaaaaaagggtttccgaaaaacccccaaggaatttggtttaataaagacccgttaaaattgggggagctccaagcttggaaataaggggggcttggtgggggcccaaaaaaaaagccggaccttttatttttactaaaaacccttgtaaggaattgttgggttttgggggaccaaagttggggtttttgggagggccctttggaattttgaggctcccttgttttgctagctgaccatgtcaaaccgttttaaataaaacattccagtttccttgttcccattaaaaaaaaaaaaaaaaaagggcccctcaacccccactttttgtccctttaagggggggtaaatggccccctgggggaa

SEQ ID NO: 100695 - DNA, 562 bp, Zea mays
  unsure (1)..(562): unsure at all n locations
  Clone ID: MRT4577_23344C.1
tacatcactacatagccttcacctgacaaccatgtccaatggctttactaacctgaccaaaagcgaggatgcaggccaggctgcggctgcggctgccggaaatcctcctcgacgtccatcggcgccgcctgctgcaggccaggctgcggctcacggaggacagcagcctcctcgtggccctgagctggctgcagcggtgacggtgagggcatcgacaccgacacggctggctgcgcctgcacaacgaccggtgctgcaccggcgtctgcgtccacgtctgcaagtggttcctcttcttccatcggctccgggatctctgcctcgtcctggtcacagcaagggtcgcaaacgtgaggccgcgagcaactggtctgagtgcttaaggtgcacaagcacagtgcactcaagaggcgattcagatcaggagagccatcagncgccagttgccgtacctctagattgatcctcttgggaccaaggagtatggggaatccatggatggccacctcagcgaccttcctctttatgcccacggacacaagatcatccatcgttctctcga

SEQ ID NO: 100696 - DNA, 1647 bp, Zea mays
  Clone ID: MRT4577_23345C.1
cgctaactgctcacagtcccagtcacaatggaagaaagggaaattgctagggagtggtacatttggtcaggtttaccttggatttaacagtgaaaatgggcagttttgtgcgattaaggaggttcaagttattatggatgatccacattcgaaggaacgactcaaacaattaaaccaggaaatagatatgcttagacaactctcccacccaaacatagtgcagtaccatggaagtgagctgagtgatgaatcactttccatttgtcttgagtatgtttcggggggttcaatccacaaattattaagagaatatggctcttttaaggaacctgtgattcgtaattacactgggcaaattcttgctggccttgcctacttacatgggcggaacactgtccacagagatatcaaaggagcaaacatactcgtgggtcctaatggtgaagtcaagctggctgactttggcatggctaagcatatatcatcttttgctgaaatacgttctttcaaaggaagtccttactggatggctcctgaggttataatgaaaactgtaaaggctacagtttatcagtggacatatggagtctgggctgtaccattattgaaatggcgacggcaggaagaccttcttggcaccaatacgagggggtagcagcaatatttaagatcgcaaacagtaaagatatacctgaaatcccagacagtttctcagaggaagggaaaagtttcttgcagctttgcttgaaacgtaaccctgcatctcgtgcttctgcagtccagctgatggatcatccttttgttcaggatcaccctgcagtgagagctgcaaaatccagtgtattgagaaacacaccatcttctccagcagatggcagacacacaatgtccaacagggagttgccatctcggaaaattataactcctctgaaggatattggactgggcatgagagattttactggattttccactactgttccttcaccacacagctcctattcctggaagagcaaacatgtctacgccagtttcaccatgctcaagcccgctgcggcagtttaagcaatccaatgtgaggggcatgcgttctccacctcatccaatgctctcccctggtcttggcaacacagtaagttacacccaaaatcagacaagacgcaatccagctcctgccatttcagatccttggatggatgttggccagatgaaactccaaagccccaatatttcccccagaaggttctgagaacgatttaaatataaaaaaagagaatcatgggcgcaatatatccatgacaagttagttattaagagatgttcagtaaggaacttgtttgtgtagttactacaatacgacactcaccagagattcagtacagcgaaatggggctcttgagaatttgtaacaggaagttctgtatatccttaggttttaaggtttgttgtcgcccttgctatatgtagttatacgtgtacacgtcctgatgtaaaggttcacaaaaaatcttacagatgaccacgggatgtaaattcgaaagtttgtgcaaactggtatttctgtgtagtagttaggacttccatggcagaagtaactatgcacttccgattgaatcgagtacaaaaaccagtttcatttccctttcc

SEQ ID NO: 100697 - DNA, 478 bp, Zea mays
  Clone ID: MRT4577_23346C.1
aaaaaacccaggattttttgggggcccaaaaaaaatgggaaataaaccccacctaaaggggggaaaaaggaggggtgggtaaacccgggggggggggccccccctggcccggttacaaagaagatttttggatggggcccgggccaagggggttaggcgacctaaaccgctgacctgaaaaagggggggagagggagaagtcccggcgtttttaaagggcaccccacaaacatttgttctgcaaggggcggggggtcaacccccgataatagatggggaataaacaaaggggctcaagacgaatcctacaaaacaggggataattttgattggcaaccatgttgttggtgggcccccccccccaaagggaaaatattcacagggggcagctcatcaggcgccctttttccttttctccccttcaatcttagccctaaggggggagaccatagcaacccccgctttgggaaggggcggg

SEQ ID NO: 100698 - DNA, 376 bp, Zea mays
  Clone ID: MRT4577_23347C.1
agcagtggtaacaacgcagagtacttttttttttttttttttttttttttttttggtttttttttttttttttttttttttttttttttttttttttggaacaaacgaacaacagttacaatgggcttgcaggcaaaagaataaaaaacccattaacaactagcccaccccccctaccactatggcatccatcattaccaccacccccatgaggcatcaaacgggcaaagcactgggatccatcaacaggggcactgaaacacggcccaagaaaccagaaaagaaaaagagggagaccaaatccttttcacaagcacaacaacccccacaaaacgcaatccttttctcccgcggcccctgggttggaacccctggt

SEQ ID NO: 100699 - DNA, 393 bp, Zea mays
  Clone ID: MRT4577_23348C.1
aagcagtggtaacaacgcagagtacttttttttttttttttttttttttttttttggtttttttttttttttttttttttttttttttttttttttttggaacaaacgaacaacagttacaatgggcttgcaagcaaaagaaaaaaaaacacattaacaactagcacacaccccctaccactaaggtatccattatcaccaccaccaccatgaggcattaaacgggcaaagcactgggacccatcaacaggggcactgaaacacggccaaagaaaccagagagaaaaaagagagagaacaaaaccttctcacaagcacaaaaacctccaaagaacgcaatccttttttcccgcgaacccggggggggaaccacgggttaagggcgaatcttgg

SEQ ID NO: 100700 - DNA, 565 bp, Zea mays
  unsure (1)..(565): unsure at all n locations
  Clone ID: MRT4577_23349C.1
atggatatatgcaggaatacgtccttatcaatacgactcactatagggaatcttgctgcctactatgaaggaccacactatcttgatcaaaccaagtatctacactggaaccctggtgatcattcgcaggatcagtataaccattctacctgtttgatactgactactctcatcaacaacaactactttcatcaaagcaacctgccgcactgaaccccgatgatcatttgccagtaaaaatattactaccagtcaaccagcttgatgaacaaagccgtgcattcttcaagcacacgaactgaagctggctgtttaccagcagctggcggttaacctacgcatccatcctacaagtacaacaatggcgggccttcgtccaagtagatttgccaaagccagctttctactaccaacaacacatcataggcggcagccctcttacagatagatcattagttgccattcaatcatctagcntttgggatgctgccagcctcctaccaacaacacatcattgggggtgccctttgttagaccgctgacgagaccacactaagggctaaag

SEQ ID NO: 100701 - DNA, 405 bp, Zea mays
  unsure (1)..(405): unsure at all n locations
  Clone ID: MRT4577_2334C.1
tcctctagagcggccgccctttttttttttnttttttttttttttttttttttttttttttttttttttttttttttttttttttttttaaaagcctttaaaggggtttttaaaaaatcccccaacctcttgctggggggggtaaaaaacgaacttatcctcttatttaggggaccatcccctttagggggctttgggggggctaggtataaactttttgggcccccccccctaaacggggcaggggcaaaaccaggttcaagcgtttgacaggattgttttgaaaagtcccaatcccaggcgggaaagacgaaacaaagaccgtttggtaccccaaatagcgctgggccccggtttatacacatcaagggggcaggggttgattctttcttaggatcctagggg

SEQ ID NO: 100702 - DNA, 742 bp, Zea mays
  Clone ID: MRT4577_23350C.1
ccggccgggtatttttcactcccaggtcagatcacaaaccaatagtgatgtgtcaacattgataatatgatgttagagaaatagatattttcaatttaatttaatccggaaaatcacagtgatgtatgtgatgacatgtatgtacatatgtgtatcactactcacataagcagtaaacaataataaaatatacacaaatacaaagaacagattgtaccctgcggagggaccgatactcaaggtatcagtgtctccattcacacgagacacctcatgtgtatgttcgatgtagtcgtacgcagtcgatgcagacaaatgtacgcaatgcagtccttcgaacggcgccggcaaggaacctgatcagcgctggtcgagcggacgaagcaagaagatgattgtgtatttacttaatctgtgatcttggttgtgagtttatttaccgacgtcgtttgggatgctcggtgatctacccggtttatatgggctcaagtatgtttacacaactgtagaaagagatgtttttggtatttgtgctcttataaattgggcagtatcgtcaaatagaaccactccctcgtccactacttcgcccatttgctacgatagacgagagctagaaattgagcttctttacggtaggcaaacttgtaatagtcgaagttgtcgtgaagatgcaacctaccaactaccttcttctggtagtgtaattcatggatttcacagaaacaatcacacttggctc

SEQ ID NO: 100703 - DNA, 441 bp, Zea mays
  unsure (1)..(441): unsure at all n locations
  Clone ID: MRT4577_23351C.1
cacatatagaaaaggactcacttatttagagggatgccacatacttcacagaaaacactggatcagtgccctgtagcccgtccgaaaactaacagaggccactctcaangaacgctagacatccctacatgcatgtagctgctggggtagactaagactgacggagcgctccgcggaaaacgtatagactggccctattcatatcataatgcagcgagagcggagcgaatcacaggtagtgacgctcgtctcattcacgaggttcacattatactatgcgatgtggcttaataaattgacgccctcatgcaaaacgcatgatagatgagtgagatggttgtaatctactgcctccagctttgctaaaaatactgagcatacagggccatggctgacgtgactggtgattgagctgctgacattaactagaatgctctcact

SEQ ID NO: 100704 - DNA, 417 bp, Zea mays
  Clone ID: MRT4577_23352C.1
atccttaacttgggattactcaaactgacactcaaaacttaacgaaaatatcaactgaagtactctatacaacctaattagtgaacgacatggtggacatctgccatgattgttattagttctgtaaataggtctaatacctcgcttttaaggatcgagggagtatatctgtgccactgtggatctggttatatatcatggccatgatcaatgcatacatgtactccattgtgttcatgtgcatcactacagaaactgttgaatgatgatactgcacatagacaccacagatattcttcgcatatgcggtgggcgttttgtggacttggaaaagactattcttgaaatgcgccaagatgaattcataggatgtgtagtgcacattcggactatcatgagaagatatggagctagctg

SEQ ID NO: 100705 - DNA, 837 bp, Zea mays
  unsure (1)..(837): unsure at all n locations
  Clone ID: MRT4577_23353C.1
ttccgatcctcatactctcagcttcagttgcaccttgccaacacttgagtcttcttcttcttcctcttcatccaatcaaccccaccgccacaatgattcccgttccccaagcaaccgagctcaaggacctcttcagcctcaagggcaaggtcgtcgtcgtcactggtgcctctggccctaccggtattggcacagaggctgcccgcggatgcgccgagtttggcgctgacctcgccatcacctacaactctcgcgccgagggtgccgagaagaatgcaaaggagatgagcgagaagtatggcgtcaaggtcaaggcctacaagtgccaggtcaacgagtacgcccagtgcgagaagctcgtccaggacgtcatcaaggactttggcaaggtcgatgtcttcattgccaacgccggcaagactgccgacaacggtatcctcgacgccactgttgagcagtggaacgaggttgtcgagactgacctaactggtaccttcaactgcgcccgtgccgttggtctgcacttccgtgagcgcaagactggctccctcatcatcacctcatccatgtctggccacattgccaacttccctcaagagcaaacctcatacaacgtcgcaaaggctggctgcatacacatggccaagtcgcttgccaacgagtggagggactttgcccgtgtcaactccatctcccctggatacattgacactggtctgtccgactttgttcnccaggacatccagaagctgtggcactctatgatccccatgngccgtgacgcaaggncaccgagctcaaggcgcctacgtctactttgcctctgatgcttcatcg

SEQ ID NO: 100706 - DNA, 797 bp, Zea mays
  unsure (1)..(797): unsure at all n locations
  Clone ID: MRT4577_23354C.1
aggcactggntggctcagggcttcatacctgacgccggcagcgacgatacagtcgaggacaccggaagagcctacttcaagtctttagtcagccagtccttcttccagatagcgcacgtcgaccgcaccggggaagagcacaggtacgtcctgtcagagatgatgcacgacctcgcctcgaatgtctcgggcgcggactgcggatgctacctgatgggacgacagcgctacagcgttccagtgagagtccggcatttgacggtcgtcttctgtaaggatgcgagccaagacatgttccaggtgatctcctgtggcgagtccctgcacacgttgatagctctgggtggttccaaggatgtggatctgaagatccctgacgacatcgataagaggtacacaaggctacgagctttagatctgagtaactttggtgtgactgctctgcctagatcgatagggaagctgaagcatctccggtgcctccagcttcaaggcaccaggatcagatgcttacccgagtcgatctgtgagctgtacaatcttcagacgctggggctcaggaactgctatgagctggaagagttgccacacgatctgaagagcctttgcaagctaaggcacatcgatctgctaatggctcctgatgatcctcgccacaaagtctgcagcttgagatgcatgcccaaggatatagggttgctgacgaaccttcaaaccctgtcaagattcgtcgtaagcgagaggtctgtcgtccaccctcacagaggtgggataggggagctggccgatctgaacga

SEQ ID NO: 100707 - DNA, 763 bp, Zea mays
  Clone ID: MRT4577_23355C.1
cattgggtacctcgaggccggccgggataaccctcccccggacatttctggtcgcaccctcctccggccctcccagccgccaagccctctggaaccttcgagagctcgatcggatcggagcccctgccatggccgacgaggcgaaggcgaagggtaatgcggcgttctcagccggccgcttcgaggaggcggcgaggcacttcacggacgccatcgcgctcgccccgggcaaccacgtcctctactccaccgctactccgacgctctcgccgacgcgcagaagaccgtcgagctcaagcctgactgggccaagggctactcccgcctcggcgcggcgcacctcggcctcggcgacgccgccagcgccgtcgccgcatacgagaagggccttgcgctcgaccccagcaacgaaggtctcaaggcggggctcgaggacgccaagaaggccgccgccgccccgccgcgtcgcgggccgtccggccccgacgccatcggccagatgttccagggccccgagctgtggagcaagatcgcgtccgaccccaccacacgcgcctaccttaacgagcccgactttatgcagatgctgcgcgaagtgcagaggaaccccagcagcatcagcatgtacctctccgatccccgcatgatgcaggtgctcagcctcatgcttaatgtcaagatccagagacccgaggcctccgagccatcgcagtctaccccaccgccgccgccgccgcagcagcagcagacatctcctcttcag

SEQ ID NO: 100708 - DNA, 279 bp, Zea mays
  Clone ID: MRT4577_23356C.1
cattaacctcttttttaaaaaagagaccacaaactcgaattaaggacgattcaaaccacaacaaggggggatacagacacaggacatgctttacagaagcccaagccaactaccaaatacacaagaaggaacaacaaacagcaacaccaaaaggcaaggtataacccacagacccattaagcaataagcgcacccgccattacccttaacttaattagtttgaaaacccgaacagcgttcaccctacacccggaataccgccaataaatggaaaagaaa

SEQ ID NO: 100709 - DNA, 811 bp, Zea mays
  unsure (1)..(811): unsure at all n locations
  Clone ID: MRT4577_23357C.1
cccgaaggcgatgttgatgaggatacagtaagaatctctgaacatcataagattgtcactggtttgcgntagttaaaacatatgtatgaccagggtgcagcggcataagaatgaacctgttcaggggctaatgttattcctttttgattggctggtcattgacatcggataattcatgttttgatcgagcgatgcgatgttaagctttgtttgttcacgtgcaccctggtcatacatatgttttaacaagcagcagcggcataagaatgaacctgttcgggggctaatcttatcccatttggattggctgcctcactgctcgttacccgtttgatttgaatttgaggcttgaggacttggttaaagccacacctccctccagtcaaactggtctacgtgctcctccagtcaaactggtaaaaactgttcctttggcggtaaaacctgctacttctccgtccgtcaatttttcaatccaaaggagcttagattagatgtttcagcaccactcgcattggatctgtctgcaatgtggaatgtaaaatgacaaaggtctctttagaatgtaggcattttcgaagaagcatacagaaatttcattggaatttagggtggtcgactgtccagggagcgtcttattcctatgaaatttctgctttattttataaaatttctactttctaaattgacctttcgctattgaaagctcgattgaaggattattttctgaatcctgctctttttttctatgtttttgaactaattcatgtaaaatttatgtactatttttgtgaaattctgcgttacaatg

SEQ ID NO: 100710 - DNA, 802 bp, Zea mays
  unsure (1)..(802): unsure at all n locations
  Clone ID: MRT4577_23358C.1
ccggccgggaatctgtttttaactctcctctactttatcctcatacacaaacaaacaccactcttgcacaaacacagcatacaatctttcataatggctccttcaaccactgaggatctcgtccccgagcccgtcgccgccaccaaggacaccaccaccctccctgagcgtcctggcaccaccctcaacgaggccgagcttcaggagcttgccttcaccgacaagtacagcgcccccgatgtctacatcaacgcaaagaccgatactctctggttcccttggatcggacccattgagctgaagcctcttcgcatggacaacagaaccggcacctttgtcgtcggtctgcgatcagcagtcgccgccagcctgggaaggcacagacaccgcggtacggttacagccgtgaccatggctggagaatggggctacaaagagtatgactgggtcgcccgtcctggcgattgggtttgcgagaaccctggcgtcatccacaccctgtctgtcgaggacaacactgatatcgtcttcactgtttccggcaccattgagttcctcaacgacgatgatagcttgaagtttgccctcgacatctttagctttgccaagacgtactacgactactgcaaggagaagggtatcaagcccaacgatactctgtggcactagatttattataacatgaattatgacctatgngatacgggtgggccgatacaaaattgcaagtacttgtctcgagcattatatcactataccattnanacaaaaataaaaccttaataatattgcattgtcctcc

SEQ ID NO: 100711 - DNA, 348 bp, Zea mays
  Clone ID: MRT4577_2335C.1
tcggagaggaggaaggcgagcggttgcctacgaaggcaagccatcactggcgggtgccaaatgcaggcatgcatatagagaacaggacaggaagtatcaccagatgaggaagacggacacgtgggggcagatctaaaggacatcacgaaacggacgatcgctgccacccaccatgtcctatgatcaggtgctattaggcgccggacgatcgggacagagagcggctcaccacggcggcggggacacggggacgaggcggatactcaagtgcacgcaggggcagacggaggagaccaccagcttcttaacctgacgataccactactactgggacagcttatagcagga

SEQ ID NO: 100712 - DNA, 458 bp, Zea mays
  Clone ID: MRT4577_23361C.1
cttgccgggaagaaatattcctctctggtcggcgcgggatcccttctatcctctgaccgtaccggctgcccagcgattctgccgctccagacacagcggcctcatatagccccctctctgtgtgagaagcggacggattgcctacgcgagccatctatagtggaggaagctgaccactctagtcgcaggaggcgccaatgcctgtaaacgcagtgcgctagaagtaggacttaagacgtatgttatttgtagcacatatgaggactggaaagcatatgctgataataagcaggacatgctcactcatactcggctttctcactcactggttgaggaacaggcacttgtaaccaagtcatagagggtctattactggaagcgatggcaggctattccttgtctgctaccgggcggtatccaatgaacacttttggaaagctgagatagacacccccttt

SEQ ID NO: 100713 - DNA, 257 bp, Zea mays
  Clone ID: MRT4577_23362C.1
ggttggaaacttcgggcggcttaattattgacatacacttatttataagcagtagctgcgtttggaaggcagatgttacaagtataaactaatgttttggcaaaatgcattccactgctgttgctactgtaactaagctacacttctcctgctaaaatggtatcttgcctaagatcacaaaatcctttcccctctcctgtaacatgggcaactcattgtttctaaacaggcaatacagctcccctttttttaatccg

SEQ ID NO: 100714 - DNA, 360 bp, Zea mays
  Clone ID: MRT4577_23363C.1
caactgcttactttttaaacaacataattctcaaacagactttctctctcgaaagatcaaaatgtctcattcctcctgccccaagtgcggtgctgctgtccaaggcgagaacaaggcgtgcggctcttgcggcgctacctgccccgtctaaatccaactctggtacaatatctgtgagccagcacgaatgacttggaattacaagtgagcggaacgctcagcatcgataagggttggattaggatcgaccttcagactgcttctagtacatacatgctctcaataaagataacattaacaacgcctgtgccatgaaatatggatatctatataacttaagagtatcaatggtatgtaatt

SEQ ID NO: 100715 - DNA, 172 bp, Zea mays
  unsure (1)..(172): unsure at all n locations
  Clone ID: MRT4577_23364C.1
ttttggtaatntccgggcgacctatacatcctatatctctacaaacctacaacctacattcttcactttctcataacatctaacaagaaccaattaacctttttcaccaccatccactataacatctaaccatacaaactactaccacatatcaacaacaacatttcctacc

SEQ ID NO: 100716 - DNA, 115 bp, Zea mays
  unsure (1)..(115): unsure at all n locations
  Clone ID: MRT4577_23365C.1
gaacgcgtacacggtgtgtgtaaagctaataaaatgtcntagtgcagtgaattgtaaggaacaaccattgaatcattgtggctgcgctggattaccatggtgagcgtaatggtgt

SEQ ID NO: 100717 - DNA, 415 bp, Zea mays
  Clone ID: MRT4577_23366C.1
caaactgcataatggttgtagttgataaattttcaaaatatgctcacttcattcctctccaccatccattcacagcgttagctatcgcgcatcaatttatggataatgtcttcaaactgcatggatttcctcaagcactaatcacggaccgtgatcgcatctttacaagtgctttgagccaaaaattgttcaaactgcccggagtgaaattgcgattcactactgcttaccaccctcaatccgttggtcaaacggagagggtaaatcaatgtttggaaacatacctccgttgttacactcaagcatgcccatctaaatggaaaagatggcttgcgttagcggaatttgggtataacactagttatcatgcttaattgaaactgaccccttttaaagtgctttacggctatcctcc

SEQ ID NO: 100718 - DNA, 1501 bp, Zea mays
  Clone ID: MRT4577_23367C.1
gggacccttgggccggccggggaaaaaatacttcgcctccgcggcttcctcggctcctcgcacccctcaggcccccacccagcgccagcggtgcctccgtgccgtctcccaccgctgctcgggcttcccaccggccaccgcacatcccggcttgcctccgccactccgtttcccgccgcaccgccatccgagtccgccgcagcctgctccctgctatcaaaccacgtttcctcgctcatcttccgccgccgcagggatacagaggagagagagagagggagagaaaagatgtcatctaagaagaactactataaggagaagttgatgcggcggaaagaggagaaaaaagaagagccagagacacccaggtaccgcgatcgtgctaaggagcggcgtgaagatcaaaacccagattatgaacctacagaacttggttcgtttcatgcagtggcacctcctgggaatgatttgaggctggcagatgctcacaagatctcaattgagaaaagcaaatatctcggaggtgatttggagcatacacatctggtcaagggcttggactatgctctacttcataaagtacggagtgaaattgaaaagaaacctgaggcagaggatgggaaggatacaaagtcaagggcagcaaaagaagatcaggcagtctccttccgcaccgcaactgcaaagtctgtgtaccaatggatcataaagcctcaaagcataattaaagagaatgaattgtttcttcctggccggatgtcatttatttacaacatggaggagggagtaaccaatgatattccaacaactcttcataggagcaaagctgattgtccagttccagaggagatggtaactgtcagtgtggatggttcagtacttgaaagaattgctaaaattatgacataccttcggcttggatcatcagggaaggtcttgaagaaaaagaaaaaggagagagatataaaagggaagagcaatttggcaagtggtgactatggcgagtcagtaaaaccttcccaaactaatggttctactctgaaacatcaatcagatatgccaccaccaccggctccaccccctcggaacaataatttcaatgggaaggagaaacaaccagtccctgtttctagagaagatgatgatgacatttttgttggagatggagttgactatttagttcctaacaaggaaatgagtcagagccctgtctctgatatggatgaatccccacataaccatcagaagcagtccaatttcactgaaccgctgtatggcccagttccaccatctgaatctgctcaagcttggcaacaaccgaacacgtacgatgctgctgttcaagctcagatggcagctgctggatatcaaggtgactggtcaagctatgtgtatgcggaacagcagttgggttatccagaacagtatgtgcagcaaagcacccaggaatacgatgtgttagcggaccctagtatatcccaggatccgaggttcatgactc

SEQ ID NO: 100719 - DNA, 323 bp, Zea mays
  Clone ID: MRT4577_23368C.1
cgtgagcacacgcgtctgagtacggtcagcgcagggcaaacccgaaaatagagaactggggagacaccaggactcacccttgccccccacggcccccgaccagcttttcctcctggaggaggtgcgagagcgaaagttcgatggctttgcccgaaccatccagaaggcctggcggcgccacgtggctgtccggaagtacgaggagatgcgggaggaagcttccaacatcctgctgaacaagaaggagcggaggcgcaacagcatcaatcggaacttcgtcggggactacctggggctagaggaacggccgagctgcgtcagtt

SEQ ID NO: 100720 - DNA, 557 bp, Zea mays
  Clone ID: MRT4577_23369C.1
ccggccgggaccggcaagactgagtcgttgcccgccggtgaataactccggccatgcctggctggacactcgagatggagcacacgtttgagttatctattcctggatcgattctcagcactgcatcacgcaagttcatcttattcaacagtgcccctgttcttatcgcgatcagatatttccagagttcgatctttagttgttgtctgaaccgaccacctccttccctttttatctctggatttttgttaagaacagagctatgtcccttaatagaatttgttcactatacataagtctacaagcttactataggattcttggatcaaaaccaaacggattcaaagatatagtgcgtccaaaatggctgcattccattgtgaccatttctgtcttcagattcagtttcagccatttgggggatatagggcttcaaagtggggccaatatcaatgggttcagacttaaccaaacgagttcaagtgtggctcttttgcaaataagcccagatctcacgttttggattacaaaccttcatgactgcggatcatatgact

SEQ ID NO: 100721 - DNA, 600 bp, Zea mays
  unsure (1)..(600): unsure at all n locations
  Clone ID: MRT4577_2336C.1
catttgaactcatctggaggaagttntgtccatatatccggatgatgtatgaaagtttctctggtgtgatgattcctgttctctatgtaatggaatgcgcattcggctcagatacaatgcacaatttcagggaagattctatggtcgttgacgttggagaaccagccgactgggtgaagatcaatgtgcggcagactgtaagttcagtttgtattgttttgttagtcatgttgtgcagattattatgttttgattatagcctgtaccatgaaatggtttttttacaaggtagctttgctagggaacttccactgagatttgaagttacactatttggttattgctttcctgcagaaagattgctttgaagtttatgcactagttccgggacttctaagagaggaggtgaggaagtatggtgccattcatgtggagagccgagttttgaaacttttcattgacctaagataaatccttccagagataaatggagcataggcaaaaggaattttccttatgaaataaggccatgccatagaggaatttgctaattttttgttctgacggtagcaggtgcatgttcaatcagatcctgctgga

SEQ ID NO: 100722 - DNA, 298 bp, Zea mays
  Clone ID: MRT4577_23370C.1
ggaaaagaagtaataactagggggtacataatgacaatacagttcgcaaagcccccaggaaagcaacaacttttggacagggagttaaattttttctacacataaacaatgcaccttagggtgcgtaagcaaatccaaagataaaagcttttttggggcttttgacctcacgggggtcactgccccgaatataacaacatcctttacctatgatttttgctttaaacaatttattgccgtaatttttaacccttactgttttagggaaaaagtttccttgtgttaaaacacattaaca

SEQ ID NO: 100723 - DNA, 460 bp, Zea mays
  Clone ID: MRT4577_23371C.1
ttccctggtctacccactcttcctccaactcatatgaaacaaccatttctactcaataaatacatcactaatcaattcgcctgctcaactatcaatttcccaatcctctacacttaattttattccttccaccattaatctctactacctccttcaattcttcctgtcccatcctatttatgtctttttcctcttctttctttcttttcttttttacctttttttttctttttactttcctttatatattatttttttttcctctttcattcttttctttttttttctctttttttttttttttttttttttttttttcttccttttcttgtttctttttatatttctatttttttttttattttttttttttttttttttttattttattattttttttttttttttttttattttttttttttttttttttttattttttttttatattttttttatt

SEQ ID NO: 100724 - DNA, 292 bp, Zea mays
  Clone ID: MRT4577_23372C.1
tcccgctcttacattgactcatattttgacttttaatcaaacccttattttaaacgatttgttaatttctacaattgaactgataacatatacatcctctatcatcacctatttcatactctttcaaacactaaatcatgacatttctattattactttcattcatccacatatcttttacacattcttgatcatacataaacaccataatttcacaatccatacttatttcctcacacatcttatatcatattacatctaccaaacaatatttttaaaaatcatttatact

SEQ ID NO: 100725 - DNA, 166 bp, Zea mays
  Clone ID: MRT4577_23373C.1
aggtggatctactcacgatggaccatgctttttattctcggctggcttctctacggagctggtcaagcttaacgaactcaagggtggaaagacactaaggttcaagggccaatcacatatcttcagataggacggacaggactacctagtgaaccagacactaatc

SEQ ID NO: 100726 - DNA, 358 bp, Zea mays
  Clone ID: MRT4577_23374C.1
cccacgcgcatgcagacccgtggactatcatcatataaagcacaatggcgtaccaacaaaccccgtcaaatgattgcaggctgggatgcctcctgggcttactaggtgaaccagtacctccaccataaactccgaatgttcaacagctcctatagtttctcttcttaccccatagccttcaccagcgttgaaccaagcctgggaaaacccaattcttcatccctacacgatccaacatgcagtgacggatggcattttatctttatcaccactgataataccacaatcatgacgcctattacatgaatttcctttggtgcatggacaggcacagaacattcaggtacaacaactacca

SEQ ID NO: 100727 - DNA, 777 bp, Zea mays
  unsure (1)..(777): unsure at all n locations
  Clone ID: MRT4577_23375C.1
gccggccgggtcgggaacagatccgctatagcctccggtaaaatttagggtgtgttcgtcgtccgctatctatagcgtgctagctttcgctcgctatctgctgttcactcccgcgctgccgtcgtccgtcgtctcccgcgccggctcggaaccctctcgtcgtcgcgcccactgtgcagcacatcccctctgatgtacggctccaacgacgacaaggtgttctacccgctccggtccagcttcccctcccttggccgcgcacgctcccccggctccccaaccaatctgcccacacaaagtcgcagtagctcatgctgtcggggctcaagatgatgcgtgtggagccggatgaagcggctttgtatgctggaggtgggcggcgacatgcctcaaaggttggcggcgctgtgcttgaagttgaagacgttgtggtcaaccacgtcgtcgcttccagacccaatctgattttgggcacgcaggcaagcaatttgtctttggttgcttccagacctaatctgaatccctcatcgcactttctcctcacggcaaaacaagattcatcgtttacctgcacatgtaatggaatagatttatccatttcctaagtgagatttaaccatttctcaagtgttcctagccattgttcagattatgtctattctgtacatgtgcgacgagggattcagtanagtgttcctagccatttttgtggatgaaatgatttatctattcataggaatgctttctatttggaaaanaaaaaaaaaaagcccctan

SEQ ID NO: 100728 - DNA, 341 bp, Zea mays
  Clone ID: MRT4577_23376C.1
attcggctcgaggccggcacaccgctgcttatggacgcagcaaggatggtcctcaggtgcctggaatcagccttatccacaccaggcttctgggggttcacgctggcggtgtgcgctcggtaccgctggcgctagctgtgaccctctgcgagtgcgctacggaagcgccgtctaaaactgagccctatccatgtgacataccggacgctgtgaggccagaaacttgtgatccgatacgtaaccgctatctccacccagcgcgcatgacagcccgttgcggggctctagggccgaatttgtccaaagcgcgctgctacaaacgaaaagcttgggctagccgt

SEQ ID NO: 100729 - DNA, 487 bp, Zea mays
  unsure (1)..(487): unsure at all n locations
  Clone ID: MRT4577_23377C.1
gtttgggagccacgcgtgcgcccttgtgactagactactcgtcaagtgagtgacctctccagctgctgctgacttgtgcctcgccgtcgcaatcgcggactttctctagtctatccttctccaatctcccgccttgcttggcctctcgcccactccaagcgcctcaatggactcctatatagtcgccacctaggcactgtccacgatcacagcccaacacgacactactcaccgncaactccaatccaagtaaattaacacgatcacagctgaccttccgacgagcgagcagtgagctagcattagcaacatgtgcggcggtgcgatcctcgccgagctcatacccagcgcgccggcgcggcgcggcgtcacgccaggccacggtaggggcggcaagggtcgtcggaccgcggccaacgacgacgacgacttcgaggcccggttcccggacttcgacgaggactccgaggaagaacccgtgtgcgcg

SEQ ID NO: 100730 - DNA, 244 bp, Zea mays
  Clone ID: MRT4577_23378C.1
ctgtgtccagttcccagcacttgcaatatatcacatagaaatgctcatatgagaggtcccgcgagtgcttgcgactggactcggaccgcgaatgcgctgtcaggatcgaggccactgggtagtgccggacgaggacccatgagtcgcgcctgcctcaggaagatggggacggatggatagaggtgcatggcacaggacgacttacacacatcggagtgcaatactttggtgaggagcaacttca

SEQ ID NO: 100731 - DNA, 388 bp, Zea mays
  unsure (1)..(388): unsure at all n locations
  Clone ID: MRT4577_23379C.1
cttcttgttcgnctgccttgttgaagggaagcaatggctatgaccgncctctctgcggtctattctgctgcccgagctggctcctctgcaactgtgctttcggccacaggcaccccaagcacaggccgaccaaatccccctcctctcaactggcgcgaatccccgggacggcaagcgatctcgatcccgactcaagggggaggacccaaccactttctttctacaccccgcgaaccaaggccacgggcaacgacagatagcgtatcgacgacgccaccccggaagcaacccgctagcaggtgacctgccggtacgtacacatcctccgacacaataagatcccactccaggcagagagccactatgccgacaacgagcgcgccctggt

SEQ ID NO: 100732 - DNA, 833 bp, Zea mays
  Clone ID: MRT4577_2337C.1
gtaattgtcggcctcgagcccggccgggctctaagcccggcacacctctttcatatacaacacaccaaggcaatcccccaacccaacacagacaccatgcgcttctccacagtattcacctacctttcactggccactgcggccttcgccatgcctcatgtcgctcgaacgaaagagcaggatgctctctcggaagccaccgacattgctcggaccctgaacgaggaggttaccggtctcatcaatgaagtccgtggactcggcctcttgaagctcaaggctcacaagtgggacatcaacgaaggtctccaccgctcccttaccaaggccatcgacggcatcgaaggtctgcccgacctgcccaagcaagacaacatcccccaagaggtcgtcgactcgtacggtcctcttgtggaccaggtcggcgaatccttctttggcactctgatcgacctcaagttcctgtcgtaccgcattgtcaagaacgacgattacgcccacgcggttgagcagttcgaccaggatacctaccagttcgtccgcgccctaaactccaagttccagggcttcacctgcgagctccacaacaaggtcggcagcggcaacatcatcgggcagctgttgagggaggtgtcggaccacctcttccacatcatctttgacgctatcgagggcggtaactgcaaggccgcttgagggtggaagaagtatctccgcacaacgaaggatagggtaaggagtctggatgtatcaatagccaaggaagtcgagcgaacatggagcgtcgaataagtgaatcagaacagataagcatgcatatctgctatcttggg

SEQ ID NO: 100733 - DNA, 216 bp, Zea mays
  Clone ID: MRT4577_23380C.1
tgggggtgttttagacgaaacggagttgtttaaccgaaaacgagaatggcgcatcacacagggtgaatgtgtaaagaatagcttgcaaaccaccaagcgaatttggccaaacgggagtgttcggtcacaccaaaaagaaggacgagaggcacaaacaaggaatggacccatgctacgggtatagtcgagaccagtgacaccaacgcacgggaagag

SEQ ID NO: 100734 - DNA, 307 bp, Zea mays
  Clone ID: MRT4577_23381C.1
agtcttttccttttaggtcggtttcatcctccaccatcgtccttgtgctaaaccgaagcttctccagccatagcttcggagtcggtccatccttcttctagatcacactttttcataccatgcacgccttcatcttaaagccgaagttcctgtgacagtatactatactggaacacatgttacttgtgtttttgaggaccttcggatgatgaaggccaccaacacacaccaaggaaatcttcgtcaacatcgatattgaacaacagttgtggcatagcataagttttaattatttgcgaagcatgaa

SEQ ID NO: 100735 - DNA, 313 bp, Zea mays
  Clone ID: MRT4577_23382C.1
attatatatagcgactgccgatcgcaaagaaacccgcttaacaccacgagggtgcggctggatgccttttttatagtggctcttaaaatgaacgtaaccgccaggcatacaaaaaggtgttgatggtgaaagccagggccgccgccacataaaccggcggcggtacatatgccatatcccgttgagctgacacatcaagagcggctgccacggtcggtcctacagacggcgccgatgcacctagggccgaagggacctgtgccggcgccggttcataagccgcgggggcgatgtcactaccctaattaatagc

SEQ ID NO: 100736 - DNA, 1134 bp, Zea mays
  Clone ID: MRT4577_23383C.1
tccgagataactgttcttatgccaagattcgccctttgactgtttcctttatcttatcttttataggattcttcctgcccgaaagcgttgatgacggacgcgtggtttcaaggtgccatgtcatttgtctacatctgggatgagcatgatgcatattgcccaggcggcagagttctcatctagtgatagccctaacttatacatagtaagttggaatgaccacttttttctactcaaggttgagcatgatgcatattacattatcgatacccttggagaaaggctccatgaagggtgcagccaggcatacattttgaagttcgacaagaatacgacaattcacaaggtacctggggaaaagaaaccttgtagccctgactcaagtggaccaatgaaggattcttcaggttctgagaactctacgactgaccaggacagtgggaatgatactgaagaggaggtgcttgtgtcgaagggcaaagaatcatgtaaagagtacatcaagagtttcttggcagccataccaatccgggaactacaggcggacatcaagaaaggactgatggcatcaaccccattgcaccaccgcctccagattgagttccagtacacccagtcgtccccaaaagagactgcatcagccactcagcttcttaccatggaggccccctttgagttctcatggcctgagccaccgccaacaatggaagtcacactaacacctgccgtctctgttgtgtagcttgtcaccctggtggccaagaacccaaagacatgagacaacggcctgccctgatgttcggcatggagaacccttttttccttggttccctgcgtgaagggggagcctagatgaagattttggttcttctgtttgtactaatttgtttaatatgaactgactactacgggttattcctcctgggcgtaggagcgttctacctgcttttttttttagcggtatcttccctcacctgctcgcttgacgcttgtaatcttttggaaccctgtatgactaatcgaggaggaattcccctttgttataatgaactagatgccggcttatctgtagatgtaacatgataatatggtgccaacaagcaagaagctacgagtcatgaatctgctagttac

SEQ ID NO: 100737 - DNA, 151 bp, Zea mays
  unsure (1)..(151): unsure at all n locations
  Clone ID: MRT4577_23384C.1
tccgtacaataaggcttactcacagaagcttgtacggggtgcaaccacctcttttncaggctgcaagagaaccacatgggatgtacagtgaacgtggctaaaatcctgaactttattcaacttaaacaggtactcatttatgtttgggggg

SEQ ID NO: 100738 - DNA, 175 bp, Zea mays
  unsure (1)..(175): unsure at all n locations
  Clone ID: MRT4577_23385C.1
ttacggttggcgagcaggggcacggcggcctggtacgccgcatttgaacaggcaggggcacatcnaccgtcatcccaggctgctctaattatgcccatagcaagtccctatagtatattattatccgcttacaattccacactccttacaatccataatcataaaatttaaattc

SEQ ID NO: 100739 - DNA, 633 bp, Zea mays
  Clone ID: MRT4577_23386C.1
cattgggtacctcgaggccggccgggatgccctctgcccttttatatgcctgcttgaatcaaggctgcagtgaagttacatctccctatcagagacctctatctggctgctctatgatctctgaatcttgttttggaaggctaacctcgctcgcccatccacctactataatccttctctaaagccctgtggcgctctcccttgtttgctgaccactcccaccaaaatgccaccatcattgatccaggataccacgatgatttccttgaccgtgagggggtcgatccatgctcaaaaaaaaataactagagtaatcgtcgattgaagaaggacactacaccaggatctggtgatcaacataataaaccactctaactgaaaaggctgcaaagtcatctatggactcttcactgcaacaaagaatatgaactattgagctgctgcgacggtgctaatcgccggcgttgtcaatcttgttatataagtatagccccggtgattatctgtcaatactgatgatgactatctgatgctaagaatacatcaaacttatactctatgtaatcacatcgataacatattgaaaaatctgtgacagctggaagatattgtaataataattacgctgtctca

SEQ ID NO: 100740 - DNA, 914 bp, Zea mays
  unsure (1)..(914): unsure at all n locations
  Clone ID: MRT4577_23387C.1
cattgggtacctcgaggccggccgggtcatggcatcttgatcattaattcttaggcatgatctctcagcaatgctccaggaggtaattagaaggcccttgctttgcctgagaaaggaattgtataatcggatggaatggcgtatcatcataatttgcctggtttgctccccaacaatatttatggagatgagatcactattacacttctggcttctagcaacgggtttgggttctgtgctagaacttaacaatgcattggtatcatcagcattagacattcttctcaagcctatgtcatggggaatatccatagaattagggcagagatttcccttttctcatgcttacttcccaagccaacaaagtgacttgcttgcgatactaactggacccttatcttataaaggttttttggacctagtttcttatattagtgccttggttcatttggacaacacaagaactagatgctcttcgcagaaaaacttacaattacaaccatcgaagggattggtaaaatacaattctgcttggtacatgattattagtttccctatttggttcagttatgcaactgctttacttttccacagagaaggctcacaagattatttatcagaaacattatccaaagagataactgctgaatcaataagtgatgtcagtcttgttcagagggcagccttttacctttcttggctgctatgcccttataatcatgatcaacgcgagatgctatcaaacaatattttggaaatatcacattgttgggctaggaacaacaaaaagtgcgtaagctacccaagtactgtgaataataggaggaaactgcgaatacccacagctgcggactctgagaaatncatgtgccagtcaacactataagctcccttgttaaagaatttgatgatcg

SEQ ID NO: 100741 - DNA, 492 bp, Zea mays
  unsure (1)..(492): unsure at all n locations
  Clone ID: MRT4577_23388C.1
ggaccctcgggcctcncggaaacaaatctatgctattctaactcaagaacaaaatggccaccgccccactgaagccgaagtccgtgagtccctcggaacgaagttaggtcgcctcaaggaacaggcgagagacatggcctccaggcaccccgtcgttggagccgtggccgtcatcgctgtcagcgcgcggggcgcctacttcttgtgtgcctgggcagccccagtcgtgggcgtgatgaaggcgcctggatccggtggcgtgctaatatcgcgagcggcgtttctattgaagaaggagcgtgagctttaagctcttgcgcgacggggcgcatctgctgtggacaccattctggagtgactgcgcacgcaataggagagcatgcaggctgtgacctaactggacccctcgcgaatgagggtgcttgtctgccaactaggattgacagctctgcttatgctattgtttagtggaaacagttgatcgaaaattac

SEQ ID NO: 100742 - DNA, 1037 bp, Zea mays
  Clone ID: MRT4577_23389C.1
ttgtaattaagttagctttattattcaaacatgtagcggttgtacgtatttgatgtagagccggaactcttgtttccgtaataaaaaaaactgatcatcaaccaacaaacaaacaaacaaacagaaagaacctctctccctccgttcttggccgcctagcgtcgcggtatggcgaagacgcggaacccaccgggtcctggtctccttcctggcttccaaacgaccaaaccccacggtgcggcacggcaaaaccacccccccggtagccggctagcggtcacggcgcacgcgagcaaccatgcccacacacctccctaccaccaccacagggcacgaacacaggcgccgcgcggcgtgtgtccaaggagagattctgatacatcggcaagaaacatgtttgtgccatcaaggccaggccaggaaacacaaacacccacgcctcgcgggcccggccgccccctcgccccgcccgcatcctgtcgacgacgacgacgacgtcgtcgtcgtcgccctctttcctttcccccacagccgcggctccatacgaccatacggcagccagctagtctagcttctccgccacagttcatcacggcgcaggcgacgaaaagctgccgagccaccatcaggcaccagcagaggggagcaagcgagcgaccacgcgggggaccgcgccaccgagccactcccctccctccctctctcttcgcctccggatctcgcatgcgcggtggccgccgccgccgccgcgcccgacggaggagggcgaggagtcagtgagggcgctggccggcggcgtgatggggggagcgcagctggtggggagatgggtggagtcgtacacggggatgtcgccggacaacatcaagggcctgctgctcgcgctctcctccagcctcttcatcggcgccagcttcatcgtcaagaagaaggggctcaagaaggctggcgcgcccggcatccgagcaggtgagggctaatcgaacagctctggccctggctctgcttgggtgggactatgctttcgcggacgggtg

SEQ ID NO: 100743 - DNA, 581 bp, Zea mays
  Clone ID: MRT4577_2338C.1
aaagaaaacaatgcctcatcatttatttcacatcttgctaaacacaacaatgtgcactgtctctatttccaaaccagctggatagaaaacgaagaggcggaataaaacccagctgcagagaattttatatacacaataacacaacagcaagctcgtgccacgcgggatacaatacaagtggagaaccaagaaaagaacccgagctacttggcggcagcgctgccattggaggtggaagcagcagcaggctgcagcaggaagtcgaggagacgcggttgaagagcttgatgtcctgttgctgcggcaggtgtcccgtgcccggcagcccgggatcaccttcaccgtcgccttctccccgagcttccctcccatcttgtgtgctttctcgaccgggtagatctggtcgaactcaccccagatgatgaacacctcctgaggtagaggagtcagctcgaagccttctttggcagtgatccctttgactagcgccaccttctcctccctgttgtccgcgaagtgtttctgaaagaggtcgcggaggaagcacttggggatgtgtttgaaggggcggtaggcgctca

SEQ ID NO: 100744 - DNA, 330 bp, Zea mays
  Clone ID: MRT4577_23390C.1
agaaagccaggattttaagcaataaataaatactgaacagcttcaactagtgacagggatacaattgcacactgacataacttcggacaacgaggactacctcagctcaggaggaacctgctaatccgagccggtgggcctctcactaatcctgcactctgaacactcattctgtatgaaaccgctgagccgtctctcgctcatgctcctgagtagccgatgcaccaaaacacagagacccacctgttggaggtggcggcgcacttggtgagagcgcagcagaccatccaacagggaggctgatgggctcaacgatagcctactatagga

SEQ ID NO: 100745 - DNA, 210 bp, Zea mays
  Clone ID: MRT4577_23391C.1
cgacacattgggcccatataatcccaactaaccaacacggtcaacggacagtgggcgacaggaccggacaagccacgctggctctcgcctcactcaccgttccaatgaacctctaccaggctattacttacgggaacgtcaccagctaaccaactcgacttgatgacgccggctaccactacccataccggcacatgaacttgcgcaccc

SEQ ID NO: 100746 - DNA, 125 bp, Zea mays
  Clone ID: MRT4577_23392C.1
tataaggtaagctggactcacctataagtaccggaacagtctattcccgcctcgaccggagcgtgcgtcctcaccaattccctacgcgaataggccaaggccctaggcggaacttcccattctct

SEQ ID NO: 100747 - DNA, 619 bp, Zea mays
  Clone ID: MRT4577_23393C.1
tggaccccgcgtaacgaccagcaccctcgatccagccggccaaccgaggaaccgagtgcgaaccaaccagaccccagccgcatgaagctattgctggcctgtacaggctgaagagcgagcaccaagaacgttgtggcatgcatccgtccgatgaccatcctgcttgtgcgacatatgaacgtacatgcacctgcatcggccggtctatcatggctcgggacacggacgtgcatgcgatgtgtatcactataccaggcaacttcgcctccttttattacacctaggggagggtgctgggatgatgaaagactattcttgaacctggaactcttgcaccatctggtctttttagccggatgtatcgcatacaccatggtgatccaaggaagaacctggagctgacatccgatgaaagaaaggcgctgcgttgcattactatcagcgaacactggcatgtccttgatctattggaatctatgatgagccattgactccagggcattgcaatatggcggtggaaaggctcgaggattacctgcactaacagggcttataggtctgtcatattgctattgtggtcattgggcacttaagcttgcacctgattgggttgtgaacc

SEQ ID NO: 100748 - DNA, 332 bp, Zea mays
  Clone ID: MRT4577_23394C.1
actaggcttctatttaaggtggtgtacatatccgagcagcggcttggcgaagtgggcttagtggcccgatgcaatttcacgcttgaccacctgtgctacctggccaactcctaacgacacgccgatcacccaccttctgaacgcctgatggagcaaggcaggaacgtcactaagtaatagaacactggatactgacaagactgttaagtcaaagacatagaatttcaccgccctccttacgaagatgcgctcttctgatgcccacacttcccaaattaaatcgagagcctttgctcaagattaacctttctgccatagaatatttttctaat

SEQ ID NO: 100749 - DNA, 419 bp, Zea mays
  Clone ID: MRT4577_23395C.1
atgcattggaggagtggatgcaaaagttactttctgacattgacttgtcaagaagtgctcctgttgctgctttttttgagcttgaagctgctgcacgttcatatttccaagaacggaatgggcgtccttctgaacagtctgacaggagcaactggtaatggtgtgcttggagaagctatcttagatcagtccgatgagcttgttagtaatgccttgaatcacaggaaacggaaccttgtattggaacatgatggtaggaatggttcagtagcgtcttataggggagttgtttcagatgaggaccgtgtaactaatcccgggcatgctaggaaagactctgctgaaagtatttggagtgatttgagttctttaagaggaagtgaattatctattccaggggttagtagtttcctttggga

SEQ ID NO: 100750 - DNA, 875 bp, Zea mays
  Clone ID: MRT4577_23396C.1
gaccactaaaaaaaaaaaaaaaaaaaaaaaaaaaaagggcccaccatgtcattgccgccgccgccgtttctgtcctattctgctcttcctgccgatctgtgcgccccctcttcttcatcccgtccctagcagccgatcccaactcccgatcttcgtttcctttgaggcccgtgagggtctcctaggaccgactgcgcaagagattggagtcaccgtttttttcttttgaggaagtgcaaagcattagagaaacgttgccgttggtctaagatgacgacgagatgattgcgctgctccagaactgcaagcaacctcagaagcctttgactctgggcaaccagactgactgatgaaaggctcaaggcccctggtctcagctgccctatatatgcttgaggttgttgagctgacctttacgttttgttcgagtgtgtatcccactgaaataaggtttcacacagaaaggtatggtatagtcgcactcattcagacctgcctagttcgtgctttcatgctggacggagtgtacatcttttatgactcggggttggagggtatttcgtcagcgccattcctggagaggctcgagcttttggattgcaagaggataacaggtgctggggtgagtttcgttgccccgcgtttgagtagtctcactatctccggggaaggtgttcaggggcctgccactgacagcatgtttgggaacacggtataccgtaatatttgagcataccatagtattttatataaaaggacgtttaggagcacatataagaactctatattttaaattatggttttgtcaataccacggtatttttaggatcaagaaaactttggtttgcacgcagctacagtcttttctctctcct

SEQ ID NO: 100751 - DNA, 2689 bp, Zea mays
  Clone ID: MRT4577_23397C.1
aattcggcacgagggaaaatccaaatttctgcaccaccgcggcggaaccaaccgtggcaggggacggccaagggcggtcgctgccttgcctggcgttgacagtttgatgcgaccgcgggagcgtccgcccgaccgccaccgcgtccgcctcagctcccctcgcttccctctaatttccagcccagtagtagggagactagaatcgtcggcgcgacgccttggcagattcgtccgccccgatcccaccaccaccgtgccccgcgggtgacgtcggaccggcggcgatggcaacgtcggcggcggcgggatcgcgcaggaaggcgccgagccctccgaagcaccgccacgacggtacctcgccgctgcctctcggcatggactggagccctcccccgaagagatgggagggaaggaacaccatatggccacacaaccctcaaacaggttggagttactgtgtgatgatgccttcttggatcacccaaacacctgaaactggtgtcacagccgatagctttttgaaatctgtcgttttttacaggatacatgttggtatacaatcttcagaaggctttagctctatccatggaatcctcagaaggtttagtgactttctgaagctatcttctgatcttaagagcgcgtttcccagaaaagatgtcccatcggctcctccgaagcatgctttcttaagaataaattcaagcaggttgcttctagaagagagaaggcatgcattggaggagtggatgcagaagttactttctgacattgacttgtcaagaagtgctcctgttgctgcttttcttgagcttgaagctgctgcgcgttcatatttccaagaacggaatgggcgtccttctgaagtaggtccttctgcaaaaagcagtactaaatcttcctcacattctgatggacctgcttccggttctcttgctgagtccaatgaaataaatcaaggtcttactcgcggtagcagtctgacaggagcaactggtaatggtgtgcttggagaagctatcttagatcagtctgatgagcatgttagcagtgccttgaatcacaggaaagggaaccttgtattggaacatgatggtagaaatggttcggtagcgtcttataggggagttctttcagaagaggaccgtgattcttatcccggccatgctcggaaggactctgctgaaagtattgggagtgatttgagttctttaagaggaagtgaattatctgttccaggggctagtaattccctttgggatggtgctgtggtggatggacatgttagtcaaacagaacatcttactggtttagatatgcatcttttgtatgatatggatgcgcaagtcatccttccaaatgataaaaaacagaagttgactagacttttgatcacaatgcaacgaagaatagggacagcaaaaactgatatggaggatctcatagcacgattaaatcaggaaggagctgttaaagaatatcttactacaaaggttaaagatttggaggttgaattggaagccacaaagcaaaaaggtagagagacactgcaacaagctatcctgactgaaagagagaggattacccagatgcagtgggatatggatgagctccgtaggaagtactctgagatggagtcaaacctgaagaccgaacataatgagaaaactcgtgcggagtcagaaagaacaactgctagtggtgaaaatgaaacattacttgaagaattagaaatcaaacaaaaagaagttgagagtttgaaacagcaacttgtagaagctgaggcaaagtccaaagctgataagaaagttcttgtcaaagaggtcaagtctcttagaaactcccaaactgagatgaagaaagtgttgaatcagtatcttgaggagaagactgatttagagagagttattaatagagataaacagagatcagcacgtacaaagttatcccgagtaaaaattcttcatgagtgtcgactgctgcgggagcggctacaagactgcagtgctaaatttctagcagaagaacaagacaactttactattgatccatcatccttgcctgatgcattagatcttctagcaacatcagacaatagaatacgcctactcgttgctgaggctcaacttttagcacgagatgatgaacaaggctcttctgatggtggcgacgattctgatagtagatcctcattaactatgagcagtgaagatgcaaaagttaccgatgaagatactactaaaatgctttctgatctgctcattgacaatgcgcagctgaggctacgcctcaatgctgtcatccgcaatgctgtaaatacttccgtgaagccagagaaagaaggtagtggcgaggttctccccaaaaagacagtccttaactggttgttggacagatgagagaaccaccaatgtatatttatgtggattagttcttcaaacttacgcggcttgaccaaaattatatgatgagcgtacctatagtgccagggtagcatcaggaattcaggataaaaccttccctccatggagggaaggggagcctggaagcctttgtttctgttgcacgattttttatccacgcatggaagtcacggaggatggtatattagggccacggctttggctcctaaaaaatgactgtctggcttctcttccagaaactctataaaagctagtgttttttaacc

SEQ ID NO: 100752 - DNA, 485 bp, Zea mays
  unsure (1)..(485): unsure at all n locations
  Clone ID: MRT4577_23398C.1
tccgaatcccggtcgccccgcgtccgcccagcgttcggaagcgtaggcggcacgcgttagtcgacctgaaaatcgcacgtactaacagtgcacagtcaatagtcatacaaatgaagagttggacctgtcctaggctgaatgggagatttccgaaagctgaccatgtttatttgacctcgcctccctggggcgactatcatttcattgttggagatatctctatacctacatgttttggagctgtgactactaccttatccctgatttttaatcattagacatttttacgagtttttctcagcatttctgctagatacgcatggtgagagtccgatctgcttactctgtactcgcngttctgataagacttttgctccttgttctacttcttatatgcacatattgttaacatgcttttcaatttgttgagatttctctgcttgattgatgatggcatgctttggtgtttgttctgtggctttgcc

SEQ ID NO: 100753 - DNA, 258 bp, Zea mays
  unsure (1)..(258): unsure at all n locations
  Clone ID: MRT4577_23399C.1
ggaaaaagatttgggtnttttttaatgcactaattaccaagcctattttaaaatcaaaacaatattttcccaaaaagcaacaacacaacaggtgcaagtttaaccctacacttgggtgctgttcttttttaatctctcctgcaaacctgcacttgggctcttccttttaaaaataacaacaccttcagttggggctctttaaccattcccgaacttaaaaaggggccagggactttttccaaccccnnnaattaaccc

SEQ ID NO: 100754 - DNA, 1515 bp, Zea mays
  unsure (1)..(1515): unsure at all n locations
  Clone ID: MRT4577_2339C.1
gtaccctcccggtcttccggatttagacctancggggtgaatagggagcccgggactgatctgtgaggaaaacttaaaaaaaccgccagggaccccagtgcaaagtagtttcccatttaatcaattctgttaatctttttaaatgaccagagaacttagaaaatccataacttgatgaaatcttaatgaaaagttgtcaaactaattttgctagctcctgaatgttatgatctatcatttaaaaatagtaaaccctatgctttctgttctaaattttagagtttaaaattaaaaacagaaacccactaaaccttgtttaattaaggaaaattagtttttcttctgtgctgaacttaagaaaatttgtagatgtttaaaccttatttagacactgtttaaaaatagtaggaaccccagcattgaaaaatatgatgtagttattcatttaaagctattttgtccaaaacttagagaaaatcagaaaggccttagaaattaatgaacagtgattaataatatttttcctagtttacttatgcaacagagaacctaggaaaaatacagagaccattaatttggaccagttttaaattaagatgatttatttagcatcatatagactgaaaatcaattattagaattacaaaactataaccaaaatggttaataaaaatctagtggacttataaccaccagagccccactacaaaaatacagagcaccccagcccaactttttaatagggaaaataaatacaaaatgataataaggcattttcccaataaatcatgaacaaccccttataatgtgataataggcaaccaaaattttgctaagctcatgatgagataaactaccagagaaaaatgcaaacccatgaaaaagaagtaaacccatacctattgctaataattcatgagaaaggccatttaattcaaaataatgcctaccacctttcccttaagcaaaaagatgccaaacttcagaatgattgctcttgcacaaaatagaagctaagaaaaatcagaaatctgttgtttgatatttttccaaatatagtggtagtagaaagcacccctttggctagaaaacttggaaaatcataacaaaataattgtaagtattaatggctagaaatttgtgcaaattcatgttataacacctagatgccagcaaaaatatgtcttaaggaataaccttctgttaaatggtagttgtagttcaaaccaccccttctgccctaatatttaataattttatctagaaagaactacttactttttaaaccccaaattttgagacagaggattatacaccagtaaaaagctactgtaattttttcagaatttttcaaaatttatggatataacttgtagttcaaacctgtcttaaaagcataaaggaaataagaggaagaaaggaaaataataaacctcactccaaaaagctcaactagaaatcctattaattctcactaaggctttaaaaggaattcagtggaacaccgaaataccc

SEQ ID NO: 100755 - DNA, 190 bp, Zea mays
  unsure (1)..(190): unsure at all n locations
  Clone ID: MRT4577_233C.1
ggcggcgagcctccgcctacctccacgcgctcctcctgctcngctcctggcgcggcgccgctcgtgttctccgtcgcctccggtactccggaagcgcgacgcgctaccttgccgcgcgagctctcacgagcgcccaaggggtggcctatgagcgagcccgagggccgaggagccagtatgatctgactgt

SEQ ID NO: 100756 - DNA, 194 bp, Zea mays
  Clone ID: MRT4577_23400C.1
cggaaagactcacgcgttcgcaaacatgttaccttcgtaatcatcctatataataagaactgcagaatgatctgctgtcggttgagatgaaaaggcgttcgccttctattaaggatgtaaatggtacaaaaggatgtaaatggtacagatattatctgttcgtatttaaatttaatccggtttgagattatatt

SEQ ID NO: 100757 - DNA, 431 bp, Zea mays
  Clone ID: MRT4577_23401C.1
aaaaaaaaccccccccaagcaactttaatttttgggggcgccccacaggaacttaataaaccgggacttccaaacccaaaaggggctgaccccaaacccagccaaccacttagggtttgctgggcggcccaacaataacggtttttaaacttcgaccccaaaccgattgaccccaaaaaaaaactggctttgttgaccccaaacaagcaaaaaaaactttttgaattaattttatcaagggaacccttgaacagtaaagcagcatcccttttttttttttcgccttcctcgtggaaaaactcggggttttggacccactcaaaaaagggtttggtttttttgacaaccggggagtcttttccagttggaaaaggagggttgaaccagcccaaaagggtttcctcctccaggaaatctccggcgaaaagggt

SEQ ID NO: 100758 - DNA, 263 bp, Zea mays
  Clone ID: MRT4577_23402C.1
ctcctcccttttttttttttttttttaaagcacgtcaagtttggctaatatatattaaataaaaagcctaacccgcgccccctttcccaaatatcatcacatttcaggagacatacttccataatgtatctatacactaagaagcacaccacaaacgattcccatgcgactttgcataaggtttttcgtgcacgacctccccttaacacggccaaaactccacagtataatcctaacccgcacgccctatcaaaagctatcat

SEQ ID NO: 100759 - DNA, 276 bp, Zea mays
  unsure (1)..(276): unsure at all n locations
  Clone ID: MRT4577_23403C.1
ggggggttttttttagcttaattgatatgtgactaaattactattattagaatagaattcaattccaattatccaaacgggctgtnatttgaatttgaaacgaagagattntctgatgatttaaaagatggtgttttgtgtaatggcatacaggggagggagcaccgttctggattctcacgcttagcaagcagctgcacgcagctacgtgtgcaggggtgcctactggttgcctgctggctgacagtcgggagatgacactggctctccttgcgg

SEQ ID NO: 100760 - DNA, 463 bp, Zea mays
  Clone ID: MRT4577_23404C.1
cgacgctaacggacaatagcggctgtgactactgtccctgatggtacacctgctcctcgagaataccttgatggcttgctgaacaatcatgtcggcgatagcagagtacaactactctgagatggctgcgacgctctaattcccactgtctagcatctacttctcgatagtcaacactgaaacgcacacatagtgcattttttgacttgtcaatgctgtaatcgggatgtgcaccataatttatgttctgcgccagtactctaatatataccggagcaagaagaatctcatccgcgtacctccccttgatatgatacccctgagcgtgatctcatgtgggatacatgctacagaaatatgtcttgccatgaggactgagaacttatgcaccatttatgcttggactctcatcctgaccgccacgcaaatgctctgggcggtcgcgctctagtgagctcgcaca

SEQ ID NO: 100761 - DNA, 276 bp, Zea mays
  Clone ID: MRT4577_23405C.1
gttcgtctcagttgctgtggggaagaggatggactacctcgaggtataccagaataactaaatattgagctctatacttgccatagactctgatgaaccgcttgatgtcagcaaggccattacaatgtacgaggtgataaacgaaagcagataatgaaggagaataatatgccatcaaaatctgataagcttaagccccagatgaaaccccacaaggagtcatcgaataacagggcttaggtccacgtctttcagttgacacagtttttgagagct

SEQ ID NO: 100762 - DNA, 549 bp, Zea mays
  Clone ID: MRT4577_23406C.1
ggccggggaggcgagggacgagagcagtagcagctcctgatcttctagcttcttcgttcatgggattcggcctctactaggattaggggtgcttcgtttcatccgatccccgacgacttgacctgattctgatctcgacgacgatgcggaagggggatctagggcatcctgctggtcgccgccttcgccatcttcttctccctccaccacgaagagcgacttctccttccgcgagtcgtgacaccacctcaccgacgaggacttcgccatcgagtacgaagacgaccgactgcccgccggcgctcgattccgatgtcagcgatatacggaaagcccgagggatttgtcgttacatttcaacgccgaacgatgatcaccagctgtcgcaccatggcctactcgacgctgactcccactattatgaggtgcttgctgagagctgacgtgctctcttcctaactatgatgatatatatagccatctcatggagacccaatcgccatggttgatgaccgacgttgatgagcctcgtaccacctgggcgaggta

SEQ ID NO: 100763 - DNA, 285 bp, Zea mays
  Clone ID: MRT4577_23407C.1
ttgtgtgtttgtcctactgcctgctttgagcttggctagcttggtctcccctccacctgcatcggtgtagtacatccgagggcactccatctcttgcgtcccgtaacccctccaccaatgcaacccaatcccttaaccccgctccgtatccagacttcgaagcttccacttctcccggtctcggtcccggccccggctccggagccctgttcttggtactgatgacaaggactgatgggcgatcatctcgcgttgatcgttgacctgctgctgacagagtcgacg

SEQ ID NO: 100764 - DNA, 280 bp, Zea mays
  Clone ID: MRT4577_23408C.1
aaaaaaaaaattgggggacaaaaaggggggtttccttttactaatgggaaggaaacccctttggaacagaaattttttacaaggttccctaaaggggaatcccaaaattccgcccgaaacccccttgaataactgatttaagtttacccgacatacccaaccggggaaacctttttgataaaatttttggggctccctggattcttgggccataaaaagtttgaacctccgggggcccaaaaaaaaaaaaaaatggcaggttttaattttacccccccaa

SEQ ID NO: 100765 - DNA, 459 bp, Zea mays
  unsure (1)..(459): unsure at all n locations
  Clone ID: MRT4577_23409C.1
gggtgaaacaaattgtatgggccccaaaacgggaagagggctcgcccaaatttttaccgaaacacgggaaaaaactccggtgaaagaagggggacagcaacaaatttttgcccaaacccgtaaagaaaggggggggggggggaaaaatttttttacaaaaacggggggggaacccaaaccgaattttaaaagaaacacggaaccaataattagaacggggttcgacttgacccccaatattgaatttttggaagcggggggcttggacttccatttccaaagtgcgcccaataaaaaaaggggccgcccgtagcaaatcgaagcgagggagaggttttgggcccattttttcttgacntgggaactgggaaagggggagggccgggggggttccgggggctggaaaatggggtttcggtttggcatgctaaagaggaaagcggtttggtcgttgggggc

SEQ ID NO: 100766 - DNA, 1253 bp, Zea mays
  Clone ID: MRT4577_2340C.1
ccgcgcgtggcccgagctatcccgtgagtctccgtccaatcccttgcgctcaatcttctctagcatcccgtggacctccctgacccatctaattgaactatcttgccgtgaccaggccggtctcctcgccgccgacgagcatccccgcctgcgcgcgtggaccgaccgactccggccatctccgacggcgttccgcacaccgttgtgatccccgcgacctccccttcgtcctcgaccacttcaccggaacagtctcgccgccggtaagcccctccgcccttttcttcgccgcggctactgtttaaggtagaagaaggacctcgggttaggttttgtagaacccgaggggttttctgtaatgtcagtgactcatgtgaatagtaacctaaggactgattcgcgaaggaaaacttagaaaaccgccagggaccccagtgcaaagtggatttccatttaatcaattctgttattctttttaaaatgaccagagaacttagaaaatccataacttgatgaaatcttaataaaaagttgtcaaaccaattttgctagctctggaatattatgatctatcatttaaaaatagtgaaccctatgctttctgttctaaattttagagtttaaaattaaaaacagaaaccccctaaaccttgtttaattaaggaaaattagtttttcttttgtgctgagcttaagaaaatttgtagatgtttataccttatttagacactgtttaaaaatagtaggaaccccagcattggaaaatatgatgtagttattcatttaaagctattttgtccaaaacttagagaaaatcagaaaggcattagaaattgatgaacagtgattaataatatttttcctagtttacttatgcaacagagaacctaggaaaaatgcagagaccattaattaggaccagtttctaattaagatgctctaattagccttatgtagactgaaaatcaattattaggattgcaaaactataaccaaagtggttaacaaaaatccagtgaactcataaccaccagagccccactacaaaaatacagagcaccccagcctaactttttaagtagggaaaataaatacagaatgataataaagcattttcccactaaatcatgagcaaccccaaataatgtgattttgggcaaccaaaaatttgctaagtccatgatgagataaacccccaaaaaaaaaaaaaaaaaaaaaaaaaaaaaaaagtactctgcgttgttaccactgct

SEQ ID NO: 100767 - DNA, 1929 bp, Zea mays
  Clone ID: MRT4577_23410C.1
cattgggtacctcgaggccggccgggactaaacatggacgcatctgaaggttgagacgagagcagcagagcgccaccacgcagcacgcacggacgccatcgaggaaccctagaccatagcacatcacacggccggcgacgcgtcaccggcgactggcgccccctcttcggtccccagcgcggcgacgccctcctgcttgagcaggtgtcctcttctgtctgcttgagcaggtgacttcctgggctttaggtactcgctttcgcttccaaccagcgcgtcctcagccagcgctggaggccgcccagccgcgcctgcgaccgcagaccgcgcgtcctcactcagccagcgctggagatctcctgtccgcccagccgcgcctgcgacagtgcgaccgccctcctgcccccagcactgcaagatgatactgctccagtccccatcgaggttcctgctccagatcctgcaagaccgtgttctcagtggcgagaagggcatggacattgactgtcacacggtagagttcgatgatgtccggtatcatatccagttttctatgaggaatccaaaggtaatggtgttgtcagttgctttgcctctgccacctcctgaagcgattctgtatgatgggctaccactaggtgccattgaagctataaaagcagcatatgggccagttgtgcagattcttgatcctccaaaggacgggtttgatctcacaatgaagataaatttgacaaaacttccgctagatgaagagcaaaggaatactatcttgacacaaattgcatctattagagaggttgtgttgggtgcaccactgaagctcctgctgaaacatttagcctcaaagacagttgcacctaatgttaacaaccttgttgctcttgttcaccgccctaatgaatcatttttccttgctccccaggcagataaagttactattgtgtatccaatgagattccaggactccattgatattgttttagcaacttccttcctgcaggaatttgtggaggcaagacgaacagctgcacttaataatgttccttcttgtatgtggtctccggtaccacctcttgagttaaaaggagtatctgctgatgcactaaatgcaaatgctggctttgttactttcgttgtttaccctcggcatgttgagggtaaaaagctagatagaacagtttggaatttgttgacatttcatgcttatgtaagctatcatgtaaagtgttctggaggattcatgcataccaggatgaggcgcagggttgagtcgctgatccagggcgttggaccgggcgaagtctgatgctgagaagttgaagaagttggtacacggtggatctttcaaaagactgagcctgaagaacgagggggactcgcgtttctgaagggaattggcaaatgttgttgttttccatttggctaatgacttctgttgtgggaagcttacttccgttcagttttgggagcgaaggctcggaaccggttaaatccatgccattgaattttaatgtaaattcgcgttgcttttacatatttactagcctgaaatctctcggcgtatcagttccatgacacatcgcctttgcaaccggagagcctgctgcctgcatcttggtgcaagtagtttgtttttgccatgagatgtctgagtctgatcttttttggcattaataaatgtgttgttcttggatcacatgatgtagtagggagttgaggcttggttgaatcacatgaccactcacggtcacggtacagcatcggctgagttatgtcgagcagccgcattcatttttttataagcttgatggtgtattgttttataagcttcggctgagttacgctcgaaaaaaaaaaaaaaaaaaaaagggcggccgctcgcgatctagaaccggacgcgtgggtcgacccgggaattccggaccg

SEQ ID NO: 100768 - DNA, 307 bp, Zea mays
  Clone ID: MRT4577_23411C.1
gggaaaaagcatttttttttttcttggcaaaacccggtgggaaacatacatttttttttgcccttcgtttaaaccccggaacattatttttttttccccaaaatttaaaccttaaaaaaatcccagttaaatttcctaggaaatcccttttacgggccaaaagggggcaaaattcaaaagggcccaaaacaaaatttttccagtccttccactttgaatggaagctgcctttttaaatcacccccccctttgatgcatgcaacgtcggtagacccttggggccccccttggcaatccaaggaaagga

SEQ ID NO: 100769 - DNA, 399 bp, Zea mays
  Clone ID: MRT4577_23413C.1
cccacgcgtccgcccacacatccggccacgcgtacgtccacgcatgcgcccacgcgtccggccacgggttctcagactcatgggcgccatgcgcactgccatcagcttgatcgtgatgggattcgtccgcttctttatcaagctcatgatgatccacatcaacagacatcatcgacgaattctgctgattcatgaccgtcactgactaacgagtggacaacgtcatctgcctcttgaccgcgcacctctagcataccgaatgcactgtgttgatgtgaacgactagtcccagggtctacctggtactctctcgtgcctgatgtcgaatattcatatgtgaagaagattcacttagatgttaccatgtgcaaacagaattgcatggctagttttcttttc

SEQ ID NO: 100770 - DNA, 297 bp, Zea mays
  Clone ID: MRT4577_23414C.1
ttaaatactggtacaatcataatttcaccaaacttactacccttaggcatacatgtctaatatctccagctgcctaattagtgaactaactccacattaattgggtcttgctaactgtccgctttccgtatggcaaacctgcgctccctgctgcgttaatgtatatgcgccaacgcgtgtggaggatgcgtttgcgttttccgctctcttgcgcttgctctatcactgactccttgcgctcggttgctttgctttgtcgagaggtttcagctctttcaccggtcggctttcggtttt

SEQ ID NO: 100771 - DNA, 964 bp, Zea mays
  unsure (1)..(964): unsure at all n locations
  Clone ID: MRT4577_23415C.1
ctaataaaaagaaaatttgagtaaagagcgatgaggccaactccaagtatcttgttaggctgcatgtcacctctcggcagcataacaagagcccagatcaatctagcaacaacgtacccaaaccagcaagtgtattaaacataggtcccgcataacatccggacatggcaatctgcatgccgtcgcctccattcaccaaagcaaccaaaagttcaaccagttcattagtgatgatgtagaacaagatgatgctcatcacaacaccttcctctccaactgttggtctaccaatgtggctttgctataagaagcaccttctctgcctttctcatggttttgacagctttggccagcacaggacataagtaccctagcaatacaatacttagnnnnnnnnnnnnnnnnnnnnntcttggtatgtgccatgaaaccaactcaacatcagtagcactgatcttatccggtctgcaaacataatcttccaaatcagcctcatcactcaaatccatcttagcagtatagacctgatttnnnnnnnnnnnnnnnnnnnnnnnnnnnnnnnnnnnngatcacagtgacaaatacgaataatcaagtgccaacatataaataagaaaacgatttagtttgcattgaccacaaatccttgacataccatatgatattatcgcaattgagcatgtgcatctgtgcnnnnngagttggcaatttgtatgcaatatgacatnnnnnnnnnnnnnnnnnnnnnnnnnnnnnnnnaaatttgagcagcttaatagttatgtgcatgagatgnnnnngaccttaatagcaatacctgaagcaatccatcgaagtttcatcatatgtggatgcaatatattatacaacacttcagtaaattaataaatatgcaagtcatgctacttcataagaaccaaatataatgcctatcctggtgccgaattcaacagcccggggatcc

SEQ ID NO: 100772 - DNA, 297 bp, Zea mays
  unsure (1)..(297): unsure at all n locations
  Clone ID: MRT4577_23416C.1
tttttttttataaaggaccccccggcttctcctcgcagctctgagtaactgatggggtgcccctcttttttgcgaggggagtgggggccaccgagtaactccaatctgacctgaaagcaccttctccttcccattctccatcagtaatacctcatagagtttcatggccatctctatactcgtcgcagtaatcataggctactgtcctctagcctctggtcgcgtacatacctctctcatatcagcgatacgcactatctcctcagctgntggggggagtgtgtttttttttttttt

SEQ ID NO: 100773 - DNA, 321 bp, Zea mays
  unsure (1)..(321): unsure at all n locations
  Clone ID: MRT4577_23417C.1
gcactaccgggnnggngcaacaaagatttcgactaattatgctcttcgtgcgcttttgtgcgctctgtgagagcgaacattatgcggccatgattgcacgctgctatagtgctcctagttccattagttccacatgaccatcggagcagttactttagtgaaacccaatcctccaactgtgcagcactatacgctccatcacgggtnggctggttcgcgttataccccaagcaactgccccattgatacgccattatctcgacacatacatcagtatgcaaccatctgaacaaaacatcagcgaacacgacactaccagca

SEQ ID NO: 100774 - DNA, 344 bp, Zea mays
  Clone ID: MRT4577_23418C.1
gtattcagcatcctcaccagtacgtcgtgtacggtccgctgctgatcaggcactgcatgggcaagaccaacatctgcagcaagcggtgcggaggatgggcccgtcgggctcaggcgccgccctgtgctacgagggacaccgggacgcagctgccaatcacgggcgcctcaggcgcggtcacatccacctactggccaagaacttctcacatcggcgccgtcgatcacaaccactagccacgctcccctacctgactgcgctacacgctgtcttggctcagactctggggcccgctgtcggctagctacccgctagatcctgggatggcaatgacagactacctt

SEQ ID NO: 100775 - DNA, 141 bp, Zea mays
  Clone ID: MRT4577_23419C.1
ataataaataagcgtaatgaaataactcatacataagcgtactttaaattcagactaaaaaactaatatgaaaaacttatatcatctgactgtattgcgttaatattcgtatcctaacataaattatactttgtatatatc

SEQ ID NO: 100776 - DNA, 1679 bp, Zea mays
  Clone ID: MRT4577_2341C.1
caattcagcacgaggccgcaccggaacctagccgagggcacgagcatacccgtcccgactccgactgcagagcatcagccgaggagaaaagtcgggagaaacgcgcgtgacgtctgcccgcgtcgtatgcgccgcgctgccgtcgccgcgacgacgacgacgaccaggatggcagccgaggagatgagacgggcctccgcctcaacggccacggcggagatgccggcgtcgccggcgccggcgcaagcggggtcgaggtgggcgcgggtgtggccgcgcgcgctccggtggatccccacctccacggaccgcatcatcgccgccgagaagcgactcctcacgatagtcaaaactggatatgtccaggaacgagtcaacattggctctgctccacctgggtcaaaagtaagatggtttaggtcagcaagtgatgaaccaaggttcattaatactgtaacatttgatagcaaggagaatgcccccaccctggttatggtccatggctatggagcttcacaggggttcttctttcgaaactttgatgcccttgcaagccgttttagggtgattgccattgatcagcttggctggggtggttcaagcagacctgacttcacatgtaaaagtaccgaagaaactgaggcatggttcatagattctttcgaggagtggcgcaaggccaagaacctcagtaattttatattgcttggtcactcttttggaggatatgttgctgcaaaatatgcgctaaagcaccctgaacacgttcaacagttgattttggttggtcctgctggcttctcatcagaaacagagcatagctctgagtggttaaccaagtttcgagcaacatggaaaggcatgctaatgaatcgtctttgggagtccaattttactccccaaagggttattaggggattgggtccttggggtccaggtctagtacagagatataccagtgccaggtttggtacaagttctactggtgaattactaacagatgaagaatcggcattgatgacagattatatgtaccatacgttagctgccaaagctagtggagagctgtgcttgaaatatatattttccttcggggcatttgcaaggaaacctcttctgcagtgcgcgtccgattggaaagtgccgactactttcatatatgggcagcaagattggatgaactaccaaggcgctcagcaagcacggaaggacatgaaagttccttgtgaaataatcagggtgccgcagggtggacattttgtgttcatagacaacccttcagggttccactcggctgtcttctatgcgtgccgtaatcttctatcagtaaatggagaggagggattcacatttcctgatggcctaatatctgcgtgaagtggcatgttcaacaagcttgctcaacaacagtttacataaagcaaagatatacgattgtggaaatcattgcccatttccaccaatttgcttgtatacggattatgctgtgtatatattacataacaaatgtattagtatcatttaatgcacgattaatgaaagggcctgagtttgtatttagcgaattttaggttggtttttttccctttttcttctttcagtgcgcttgctagtcaatcccatactataagccgtgatcattttttgtttatgtctcataatataaggcacatctcact

SEQ ID NO: 100777 - DNA, 293 bp, Zea mays
  Clone ID: MRT4577_23420C.1
gttaaatatgctgccatgcttggtctgacggggggggcaatgaagtttacgctctttgccgatcaaaaaaaacgcctagtgcagagactaactgctactggaataataaatgcaattaacagactggtgattaaactaaagaatgtcgcggaaattactaccttgctctactagcaatgtgagcaaagcaaaagggctacacacatgattttagctgaccccaacatgatgaggtgagaatctatttggaacgaaaaaccacggattcacaaggatcatgaccaactttaatc

SEQ ID NO: 100778 - DNA, 387 bp, Zea mays
  Clone ID: MRT4577_23421C.1
cccaaccccaaacaggggttggggctttttttgcattggaggaaaaaaaacttttggaaccggggataagcaaaaaaaccgggggtttaaaaaaaaaaaaccaaaatctgaattctaaaaaacgggcaaaatggaccccaactccttggggaccaacaacactttggggcgggggcgggctttggggggtttaacaaaacccccggggggggccgggcttggacacttttgggacgcccttgatattttttaagggtgggaatcccttttgggggggcaccaatttggcggcccttttttctatggtaaagaaagaaaagggggggttttttttcgccggcccttaggttggaaaaaataacccaaaaaacccgggggggggctctt

SEQ ID NO: 100779 - DNA, 699 bp, Zea mays
  Clone ID: MRT4577_23422C.1
atgctggctgctctgtgccgagcgggggacctggccaccgcgcgcaggctgttcgatggaatgcgcgcgggcgagcaaggcggggaggctggcgccttccctaacgtggtcacctacaccaccatgatcagggcgtgctgtgcgaggaggcttgccgatgaggcgttgtcgctcttcaagatgatgctcgcggatggcgtgcggccgaacaggatcacctacaacaccatggtgcagggcttctgccaggccggaaggatggagctggtgaaggaggtgttcgggatggactcatttaagccggacacgtgcacgttcaatacgctgatggccgcgcattgtagagaagggcggatacaggacgcgaagaaggtgtttgatcagacgatggagctccgcgtgaggcgtgactctgcgagttacagcatcgtgacccgggcgttgtgcgagaacggtgagtttggtcgagcagaggagcttgtggacagcctcttggaggagcttgtggacagccactcgttgcatcttacaatccagtttttaagtacctctgtgagaatggcaaggcaaagaaggcaaagaaggccaggtgagacaatagagctgctgctgcttcctgttcaactggagaagagttgtgaaaatcaaagtgtatttagatatacaatgctagcgaaagaacaccatagtctgtcatga

SEQ ID NO: 100780 - DNA, 420 bp, Zea mays
  Clone ID: MRT4577_23423C.1
cacaacagcacggcgacgagcagggaaaaacaagcgagagagccaggccatcgatgccacacaaaccaaagcaacatgacaaggcgccacacccaacaaccaccggcaaggcgacaaccacaccctggcaaccagccacacccgagaggcaccacaaccagcaacaagaggggggagcacaagcggaaaaagacgaaagccaacgcacagaaacaccgacgagaaccactgcagcaaggcgaacaccaccatcagcccaggagaaggcagacgaggtgcagcagccccacaaccaaaacaggcggccacagccccaaccgccactccgagcgcaagggcgaccctaaccacagcggcgagcgccgcaccaggccgccaggcacccgagcgacaagacgccaacgcgcgccaagaacgggc

SEQ ID NO: 100781 - DNA, 1036 bp, Zea mays
  Clone ID: MRT4577_23424C.1
cctcgccggccggccgggaaaaaatgcacggggactctagagtaaaccccggtgccaccgacggcggcggcgacgaatcgagcaggcgcggcggcggcggcgacgaatcgagcaggcgcggcggccatggcggcggcggttgagagcgtggtggtggtccataacgtggcgaagcggcacaacgtggggacgctggcgcggagcgcgacggcgttcggcgtcgcggaggtggtcgtcgtcggccgccgcgatgtcagcgcctttggcagccatggcgccacctcgcaccttcgcttccgtcacttcgtctctctcgcgctcgcccgcgcctacctcaaggatgagagaggatgtgacatttgcggcgtggaaatcaccgacgacgcgcagccggtgaccgcccacccgttccgtcggagcactgcgttcctcttcggcaatgagggtactggactttcacaaaaagagtgcgagatctgtgacttctttgtctacatccctcagtatggtggtggaactgcatctctcaacgttactgttgcagcttcaattgttctccaccactttggggtctgggctggctttactgaacgaggccgagagggcaacaaattcgtggtggctgaaagaccacaggggcactcgaggggactttactgtacagactcggttgaagcagtggttgaagagcggaaaatgcgaaaagaaaatgcctgcgatgtactcgaggaaaatgggtgcagccaccttcaggaatcaaacggtctagacttgatgtttgcagactagagtatgacaacatgttatcccatctctgatgttaaatctactccctgcatccgcattgatggcacaaagttgcaatacagaacatgacagggcttatgagagagagagagaaaatttatcctgacacacatgtatggttcacatttggttgtcttcttaaaacaagacgcgacaagatattttttttacataatctacaactcacagttatttcaaaaaaaaaaaaaaaaaaaaacccacgcgtccg

SEQ ID NO: 100782 - DNA, 382 bp, Zea mays
  Clone ID: MRT4577_23425C.1
ctatctacttttttacctttttgacggggaagcagatgatatatttgagctgatgcagggaggggcatctatgtacagcgcttaatgggacttaggttgctaagcatacattagggtggtgcgaccagctaaaacttgccacatcaaaaggagaaaccataactgcatgaaaacaccagctttaaattctactacagtgcactacgggctcatccaatgcatattagaaaggggaaaaaaaggcttttagctccgttacaaagaaatctatggattcatgtcccttggtctctactactttgaaccaccagcttgcctgccaaagaattaccaattgtcggaattaaccgaacaagcgagcctggaagccgggtgcctcttt

SEQ ID NO: 100783 - DNA, 721 bp, Zea mays
  Clone ID: MRT4577_23426C.1
cgggccggcccacgcgtccacccaagcgtccgcccacgcgtccgcccacgcgtccggacgagggaggggaaaagagagatggtggaggcatcgccggagtccggcgccgcggcgaccggaggtgcctctagtacggcggcggtgcggaaggggaagtcatgcaagggctgcctctactactcgtcagtgctcaagtcccgcggttacaacccaatctgcgttgggatcccccgctccatcccccaagttcctaactacgtggtggatgaacctaaggaggaggcgacggcgcaggggcatgacctcaggcggttcaggtacgggtgcgcgggttactccatgttcgtggacaacaggaattcttggacaggtttaagaggagcgctggactggtcgcttcaggtgttgcgaagaatctaaacaaaacagccaattatatcaaagaaaatattcaggacatgtacaccgatcgtcgtccaccaaagtagcaaccatgccgagtgattgtcgtcaagagctgaagaaatcgcttgctactggaaactttacatcaggactacctggaaactttactccactctcctcacttgttaaacgaaatggagcttttctgggataccaacttccttttctttacctgcataatcttgtaattttgcggctgtatatgtacatgcaaacaattttttgaagcgaaaaatcagatctcgtttggtgtatt

SEQ ID NO: 100784 - DNA, 593 bp, Zea mays
  Clone ID: MRT4577_23427C.1
cattgggtacctcgaggccggccgggagcctgatttgcttgctcattaccctcaccgcagccatctgggcgtccacactccttcccctcttacttcggcgccgtgcgccgtactcctggtcttcccgccaatctcgtcccctcctcccacctggaaggacccaaccggggtatccggctgtggctgagcggtcttggctactcagggccgctcaacgagcccatcggcaacctcttagccgccgcggagattcccatcttcaagtggacacttcccctccgctgcgagcgcccccgaatcaggcaccaatgcgttctgcatgccgccgtggttcgatatccacgagcttcatatggactctagatctccgatcgaatatactgaggttctcatggctgtagaaaacgtgaactccatgatatacaggatactatgctatgcgatcccccctgagaacatatgtgtttggggatttagacgatcaggtgctctatcattaagtagtgttttgatctatcccgagaaattgcgcgcaacagcagcgttcattgtgagatcttgcataccagacgtctctgactcagaagatttca

SEQ ID NO: 100785 - DNA, 317 bp, Zea mays
  Clone ID: MRT4577_23428C.1
gggaaaacgggaaggtcccatacactctggaaaacttaataatttaaatttcaaaaagggggagaaaaacatttttgttgggctacaaataacaaaaccttcatgtgacccgggcaaatttgaaatttccccattggctggggcgcaggaacacagggatgcatgaactttcgtccaaaatatgttcgccgcccccccatgccaaaaaagcatggtaacatgctgggaactaaccatttaattccgagtttaactggacccgccggtttacagttgtagcaccatggccacagaaacaactgccaggttgcccccca

SEQ ID NO: 100786 - DNA, 598 bp, Zea mays
  Clone ID: MRT4577_23429C.1
ggtaccggccccccctcgagtttttttttttttttttttttttttttttttttttttttttttttttttttttttttttggaatgggttaaacacaaatttttcttccacccaaaaatcatttagtttaaaaacatatatctacaaatccttttacataaaacccaaaaaaaatcctataccttcacctcagggaattaaacattaagcttaatggaaaaaaatcctataacttaaaacccagagctccttttaaaacccagagcttttgaacctagctcctatagcacccatagggctgcaaaccctaaaagggttaagtaaacttgaaaggggggccctggccctttatggaagcttaatagtggactaaggagatggttatttttttggggcgaccttttaatactataaagggtctcctgaaaggactgcctgaccattaaaggttaaccctttttcccaaagtctattttttttttgctttttggcccccaggcgaccctgaagttgtggaccctttatagaacctttggaggtggaaattttcttggggacggcctaaagcccaagattgcataaaaccacactggagccca

SEQ ID NO: 100787 - DNA, 298 bp, Zea mays
  Clone ID: MRT4577_2342C.1
ctttctaacagaacacacgctacatctacctttacctcaacccaagctacaacgaggacagtcaagctcgccctcacatctcagagcaacaacttcaacagcttcccccttccactcttgccagatgcctcatgccattgccttgagctctccggacaccagcacctgaccctgtctgcatacaccccccagctatttaacatatccaaagcctaagttctatatataacggatccaggcctattcttatactcctatcactgcactaggataaccgaacttgtagggtatgaagact

SEQ ID NO: 100788 - DNA, 1151 bp, Zea mays
  unsure (1)..(1151): unsure at all n locations
  Clone ID: MRT4577_23430C.1
ttttttttttttttttttttttttttttttcgcttcaaagaagttgtttgcatgtacatatacagccgcaaaattacaagattatgcaggtaaagaaaaggaagtttttattttaatacaccaaacgagatctgatttttcgcttcaaagaagttgtttgcatgtacatatacagccgcaaaattacaagattatgcaggtaaagaaaaggaagttggtatcccagaaaagctccatttcgtttaacaagtgaggagagtggagtaaagtttccaggtagtcctgatgtaaagtttccagtagcaagcgatttcttcagctcttgacgacaatcactcggcatggttgctactttggtggacgacgatcggtgtacatgtcctgaatattttctttgatataattggctgttttgtttagattcttcgcaacacctgaagcgaccagtccagcgctcctcttaaacctgtccaagaattcctgcctcgacaagttctgaggtctctgttgtccttgttggtgagagcggatggtatgctgcatcctttgcaacatgtgctggagcttgttcagttgccgatggctttctctcgaccaatctgctgtccaccaataactcgaggcccctgcaatatggcaacaacgtcttgccctcgctctcaccaccctggccgtccctgttgtccacgaacatggagtaacccgcgcacccgtacctgaaccgcctgaggtcatgcccctgcgccgtcgcctcctccttaggttcatccaccacgtagttaggaacttgggggatggagcgggggatcccaacgcagattgggttgtaaccgcgggacttgagcactgacgagtagtagaggcagcccttgcatgacttccccttccgcaccgccgccgtactagaggcacctccggtcgccgcggcgccggactccggcgatgcctccaccatctctcttttcccctccctcctcctctacctccgtgtctctccggcgggtgacggcgaaattagctatcgaagcgagaaagagaaactgtcccccggccggggtttttttttttttttttttttttttttttttttttttttttttttttccttttttttttttttttttttttttttttttttttncccggncccg

SEQ ID NO: 100789 - DNA, 352 bp, Zea mays
  unsure (1)..(352): unsure at all n locations
  Clone ID: MRT4577_23431C.1
ttctcgaccgactcttcctcccactcctccttctagcgctcccttttttttttttccctccgcagtgctacccnccggagttctctcttacgggggctggacagcatcatcatatcatcttcccttccttcatggattgatgcttgtctgccctctgcttctgctgcctcctatactccttcttcttatattgataaattccgaccaactgattctacacttctacaatttaaactactatctttctattctaaatatacagatatacatctttaactgttttgagcctataattctatcatgctattttatctttttcatatcataatttgtcaccctaattttttatttc

SEQ ID NO: 100790 - DNA, 301 bp, Zea mays
  Clone ID: MRT4577_23432C.1
caaataacttttattatgtttatattatataaattttttggaaaagaaaaaaattggccaggtacaacaatgtttctattttgtggacgaccaaaaaacagaaaaggggggaaataaaaaaaaatttgtttgaaaagactgtattggccatgttcacaaaaaaacaccttttgggaggcagggggaaacattttgtgtttttgctaacggaataaacggggaaccgatgggccaaacaaaaaaagcgtcttttgtttttagaaaagaggggggtacaaaaatagggatagggtgaaacaaa

SEQ ID NO: 100791 - DNA, 427 bp, Zea mays
  Clone ID: MRT4577_23433C.1
gaaagcactcgcgtttgagctcccagtaaaaattacgagtacaaaaataaatccgtgcaggattaggtgacacgaaactatgtccatgttttacatggactataatttatttaggatttgcaaaggtagacgcattctaaaagactgatttttaagaggacgccatattaaccggtcaatgcacgattgagcgcactgtgagacactcccaccgatctgagctctaaggcttctgaggtcaggagaggccgctccaggcttgcctgtgaactctagggagacccttatgaacagaagctgggccaatctgtgccacagagactgccgcaacagccgcaggatctgcagtggaggtagagtggacgaacgcaaagccagtgctcccactgggctaggtcacatgggtcccctgaggtgctgagagaac

SEQ ID NO: 100792 - DNA, 549 bp, Zea mays
  Clone ID: MRT4577_23434C.1
atggggatgatactcaagattaatctaatgggtgtgcccctgcaggtagatgatcttttctttaacattgatagaaaaaagcaaagaaagagaggatgctttgtatgcggggagaagggccactttagggacagctgtccaactatggtcgaacataaaaaggggaggggcaaaggcaaggcgctaacaagtgtcaaaacttgggatgattcttcaagcgaagaagaacctccaaggacacgcagccaccggtcctcatcacgctcatcacgcaagtgccttatggcaagaggtttgctagaaaaatttgaaacatttgcaaatttaaattgtgagctatcaactaaaattgcgcaattagaatctagtgctccatccactgctaccgatgatggccttattaaaaagaatgaaaaacttaaggctaagttatctagctcccaagaagctattgaaaatttgctaggaaaaatggaaattcttagcataaacaataatgagctaactattaagccagaaaacattggtagcacccaggggcatctttag

SEQ ID NO: 100793 - DNA, 935 bp, Zea mays
  unsure (1)..(935): unsure at all n locations
  Clone ID: MRT4577_23435C.1
cggttacctcagtgagcgccacgaaagtcgagctccagtgactcaccctttcatcaacatgagctcccattcatccaaatttggagcaaccatacccggcctttataaattgagcattccccttgctccgtatgggagttatgaacccagcgcaccactcctcgcctcagatcatccaccatagctcgcgaattccaaattttccccaaatcgaccggaacaccgccgtgaggcatcgcgccgtgtccagccgttctcaggtccgttcacgtccctctgatccatgtttctacatcctctggtgctagtgaaactctcggtctcggccaattgaacgtaccgcaccgtagcttagggaacaccgcgtcgttgtccgggaacgccgccgtggtcatggctcatgtcgaccggccattccttgttgtctccgtccaggtttgcgcgagctccattgtcccagaaggtcactgatttgttccaagtccctggattgaacgcgaccgacttaggtaaaccagaacgggctcacgggagcgcttgttctgtggttgccacgaacagacatggcttaatggcaaaccgatcaaattaaggccttggatgtgttcgggtagcgtcggagatgaagcccatgtactcgataccaccgaagcatatccccgccggtgagaattcgcgtctctggccaagtattcgaccggagcgtcgtcgaggacttgaatcgtgaagaaatagaagtgcagaggcctatatgtgattgtcagtgagacataggaatagtgtttagggactctntactggttattcaaatggcaagggacctttgcgcanaatcacatgcgcgnagcgcggcgtgtncggattccacgtagacttgggccagttggggctgatacggncagatactattcatgcttttatcgntttctttttac

SEQ ID NO: 100794 - DNA, 353 bp, Zea mays
  Clone ID: MRT4577_23436C.1
acgccagatcccaattttacatgcgcgtgattgagtagacatagccacaagtatcagggccacgcaaagttcacaaaacatggccggaggatgtacaatatagaaaaatgggaaaaaacttaggggtaccccagctataatctactatgtagaacaacccgcttacaccggggggtgaaaaacataaaagggctgaacaaaatgcccttcttaacagtggggcgaaatataatggggaaggggactcaccctatacatgacatataacagcggaggaagaggaggattctcacacttggaacgcttcatttgccaccgcctatacgcccgttccgtcaaactagtgcccttac

SEQ ID NO: 100795 - DNA, 723 bp, Zea mays
  Clone ID: MRT4577_23437C.1
gttcctcatcttcctcttgtttctcttgcttctctctcgctctctctatccttcgttggtttgggcacaaaaggcaacaggagattttccaagatcgatcttagggccggcgagggagagagccagcatgcatccgagtggcggcgcgctgtcggtgccaccgggcttccggttccatccgacggacgaggagctcctctactactacctgaggaagaaggtcgcctatgaggccatagatcttgacgtcatcagggagatcgacctcaacaagctcgagccatgggacctcaaagatcggtgcaggataggcacggggccgcagaacgagtggtacttcttcagccacaaggacaagaagtacccgacggggacgaggacgaaccgggccaccacggcggggttctggaaagcgacgggccgcgacaaggccatcttcctcggcagcggctccaggaggatcggcatgaggaagacgctggtgttctacgtcgggagggctccccacggcaagaagaccgactggatcatgcacgagtaccgcctagacgaagacaacgtcgaggtccaggaagatggctgggtggtgtgtagggttttcaccaagaagagctacacgagaggcgtgaacccggcggagatggcggggtacgacgacgacgagctcctccaccctttcccggttccatcttccaccgccggcgcaatgcatatgatcacgga

SEQ ID NO: 100796 - DNA, 259 bp, Zea mays
  Clone ID: MRT4577_23438C.1
attcggctcgagcctcttagacgctctgtctggcggaataaacgctcgatatcttgggggctgaatgcagctcacagtgggtaccggccacagtgactctgcacggcgattgatccgacaccagcatgggagtgggatgctgatccacatatgctcaagccggtatgcattgtggtaacccaagctgggagacactcctgccacttgcattgtattcagggcgatggtcatatgacctgtgacaagaccgatagagggg

SEQ ID NO: 100797 - DNA, 251 bp, Zea mays
  Clone ID: MRT4577_23439C.1
atagtgtgtcgtattacacggggtttggcgcggcggcgctccttctgctggcgggtcgcgccgctgccttttggtgctttgggaaattggtgcgtggattgcgaggaaagttcaggggcacagatcaatctgtgggagtagccaaccaacttcaacatcgtgcatcgattagtcaggttcgtgacccaaagctacatgacgacctagaaactcttggcggctgtgactagctttttgcgtgccggctgttc

SEQ ID NO: 100798 - DNA, 516 bp, Zea mays
  Clone ID: MRT4577_2343C.1
gcccctcagttcgttatgcacgctgccgcttgtaaagtatggtcatcactatgattgactggtcgggttttctgtccttttgtgctgtcaccattacgtgagagaaccccctttgtgctgcaagatgtgtatggttccgtctgttttctgtcctataattgactggttctgcactccccccaatccaatttcagaaaccgaagacgtttgagattgcggggtctgagtctcttgatttgtgcctagagattggtttttcactttccacgaattgttggactgaaagaaaaaagatctataaaagagaaaaaaaacagtaatgatttataacttgcaaaaaaaaaaaaaaaaaaaaaaaaaaaaaaaaaaaaaaaaaaaaaaaaaaaaaaaaggaaaaaaaaaaaaaaaaaaaaaaaaaaaaaaaaaaaaaaaaaaaaaaaaaaaaaaaaatggggggggccctttttaagaaaccaaatttaattaccggtggttggcaaaaaaaaattttttttt

SEQ ID NO: 100799 - DNA, 397 bp, Zea mays
  Clone ID: MRT4577_23440C.1
cccacgcgttcgcacacgttggtccaaacacgcgttttccgctcgcggcttctccaaccaattccgagcagtcaaatacgaatgggagcgtatcacggagacgactccatgagccgagcgctcctctcccacgtcctccaccgtccgccgcacttctcgtacacctggagtggcgatgctgcccgaggcggactgctcgcttctggcatccacccactaagtcgtctcaatagcagcgcggttgaagcctttccaggccccaccgaggatgcgcctgctcctcaagccaggaagagaagactaatttctggtgtacagccaacaagatccggtcaccttagaaattatctaggggcaaatcctaatttggttggactataggattcatatgagacat

SEQ ID NO: 100800 - DNA, 536 bp, Zea mays
  Clone ID: MRT4577_23441C.1
actacagatctccctcctagatcaaatcgcttacgagcagacatcccatccaggcggttattggtcttctcgcgtgcgcagatcgcgattcatttccgagcttcgaggaatcgacggtcaaacattggtgaccaagtgagcaagctcttcaagtcctacaagattgaagaccctgagcatatatttggtgaagatgaagagcaggtagtccatgaggaggtctacaacgaggagtacgagcttatctaagtggcgtctcccagtcagctttatggcgccaaggaataatatttagttcgctttattgttatcatttatttttgtaagatacttactctatgtaataatatttgggacatttatctctatacacttggtcactatatgtgtggttcttctttgacgctcatatgagacgcacccagctttaccccttaaatctgggtgtgacatgacaccaatgtaggtactcaaacacccatatgagacagtcctgtatagtttggcctctaagaaatatatattgattatgatgt

SEQ ID NO: 100801 - DNA, 740 bp, Zea mays
  Clone ID: MRT4577_23442C.1
tgacccgtgactaacttccagcccccagcaatcccacgtcaacaccgcaaacatgggtaaaggacagccaagaggtctcaacgccgcgcgcaagctgcgcaaccaccgccgtgaagagcgctgggccgatctgtccttcaagaagcgcctcttgggaaccgcctacaagtcctcgccgttcggtggctcctcccacgccaagggcatcgtcctcgagaaggtcggtgttgaggccaagcagcccaactccgctatccgaaagtgtgtccgtgtccagctcatcaagaacggaaagaaggtcactgctttcgtccccaacgacggttgcttgaactttgtcgacgagaacgacgaagtcctcctcgccggattcggtcgcaagggcaaggccaagggtgatatccccggtgtgcgcttcaaggtcgtcaaggtctctggtgtcggtctgtccgctctgtggaaggagaagaaggagaagcccaggtcgtaaacgtctcgcctactactgcagtggtggtggtggtggaaaaatatatcacgatttgattcaccgaaacgttcgtacgtcaagcgaagctaccccccgccatgaacgaatgatggaacccagcggagcgatttgggaggttaccggagtcttctttacattggggatattcaatgtgctgtagctcggcatatggaaaagtcatgacaggctttcgtcggttagttagagaatctgactgattcaagcgccc

SEQ ID NO: 100802 - DNA, 2240 bp, Zea mays
  Clone ID: MRT4577_23443C.1
cctcgaggccggccggggccccgaattcccgataccacacgcgtcttgactctggccgtctctattctccaagtcccaatccaccgacgaattccaaaccctgcctaggacctcggcgccactcgccgcacgtcgtccacgtccgcctccaccccaatccgatggggtatgaagagagcaaaaaacatctcctcagtctcagctaccctgagctgcaatgtttgtgcaaaaggtataaccttcctgctaagaagacccactctcagttagcaagttcgctcgcctcgctgcttgaggcatctccatctcctgctcctcctcctgtccaattagcaaatatgaaagaagcatccacatgcaatcatgctaacaacaaaagaggcccatacaatggcagggatgatggtaaaccacttgtgcatgcgaaacatcaaaaaggagatcagacacctgttgatgaaacatctaaaaaggggattgacactggtacgagtatacctccagtttctatgaaccatggaagaccagaatatcatggccatctatcttctgacctgagaactgctcataatttacagtcccaaagtgacgtgggaattgcaactaatacaacaaatctagaatttgttggcaaacatgattgttcacctgctaacgtaattgatcaaatctgtccccctattattcaaaaatatccttctaatggtaatggtcaggcttccactaagttcggccgtatgaatgataacacagaaaagggttgtcggctgtctgataagatatcagcaaatgctgctgctgttcaattttctgtaatgtcagatgagggcattgatcttcttgttgatctgaactccagttcagcaacatgggccaagaacttcatggcagaaatgcacattacccctccgtctgaacatgggaatttctctagcttcattagcagtttgtcaactaaggatgatcatagcactgcgtcaccatctggaaatatcattgttgacattcagaacaagggagctgagaacattgttccttccactgattcatcacttgcttcagatgttggtgagagctcccgttcagtgctctatccagttgatacgactactgtgaactcagtgtcatccacgtctacagtggctggtaccccagttgaactttctgggtatcaggagggtgctccagtggtatgttcttcatgtttaacagctgatgttcagaacaatgtgacatctgatatgccaggtgcttcggataacgaggtgcttcctccagaacctgctgatgtctttttgcagtctgaaagaatcactgcaccagctgtatgtggttcagtgcaaccaattggcaataaatgcacaatgagttctggggatgaggttagaagtggctccaatgaagactcctgtccaaaatcttcaggaaaacaaactggagatgaaaccctaatggaaaatgaacctgtgaaggcagtagcagtggaagaaaatataggtcgtgatgacagtttgtccatttcttatcaactagcctgtaagacagtagcagaactgcctgttacagatgcccagtcgcctgctagttcttctggtcattttattgctggaaattttgacaacacacatccaacatcttccgccacttcggacaatgctattaattctctgacttcaaagttcggtgcagagctagcacaaagtcatgattctacggacaaaaagggacagaatgatgctgaggaggttgaggagttagagagtatgacaccagcagcctatagtgaacctcccagaaatatacaacttagcttacgaagtgcttccgctaaggtcaagccttctacactaccaagacgatcagcgaggcttcttcctaagtaaccgccgtaaatgatacagatgagatccagtgtgagaatagcctcactaccggcttagtcagattccatgaggatgaagggatagaaaacagttaacaagcttagattctaattttgtatgttcttgttaattcttttttgttccagcaactgagtagaacttggtttctgaagcttaggctgcgtgactttttatctcctcgtgtccatcaacatctgttacagttacagtcgtactgtcgagctttcatacactattgtacaaacgactcctacttttacagcatctgtttcctctggtctgcgactaaaaaaaaaaaaataaaaaaaaaaaagggggtctgatttagaaatttaa

SEQ ID NO: 100803 - DNA, 797 bp, Zea mays
  Clone ID: MRT4577_23444C.1
aactcatggacatcaagctatgactgcatcgcattagcacagcgacgggatcctcaagggctggaacgacgatgagagctccagtcaacagtcaacaccagtacagtgcacagtacagagcccatccgagaaggcagcctcgctacgttagttctcaatcatagtgtgctatcctcgagtctgataccaagctcctactctagctttgaatcgtaccatcgaccatggccgtgggttttgctggtagcggcggtggcgaggaccagcagcggtatggcgggagggtcacagcgttcgcggcgctctcctgcatcacggcggccatgggcggcgccatcttcggctacgacatcggcaccgcgggcggggtgtcgtccatggaaccgttcctgagggacttcttcccggacgtgcaccggcggatgcaggccggcgccggcgtcggcaactactgcaagtttgacagccagctcctcacgctcttcacctcctcgctctacgtctcggggctcctcacggccgtgctcgtcgcgtcgtggttcacggagaggcacgggcgccggccgtccatgatcctcggcggcgtcgcgtacctcggcggcgccgcggtcagcggaggggcagtgaacgtgtacatggccatcctcggcagggcgctgctcggcgtcggcctcgggttcgccaatcaggcagtgccactgtacctgtccgagatggcgccggcgcgatacaggggagccttcagcaacggtttccaattcagcctctgtctcggcgctctcgccgccaccgtcgtc

SEQ ID NO: 100804 - DNA, 1183 bp, Zea mays
  Clone ID: MRT4577_23445C.1
aaaatgcggggaaagccctctcgtgcaagcccgtcagtgtgggaccgtgcatttccgtcctctgaggatccgtgggaagtcatctgtgtacggttaagcgtaagtaaaagaaaaagaattttaaaagaacaagaaaaataaaattcagcatttctctagttaaaataaaaaggtactggggacctagttggttgttatcttgtgtttaagtcctttctcagttatccatttgcttaattaagaatgcatgcatgctcgtcctgaacgacctcacaacaagataaacggaatagggaagaactcccatcctgtaaatgtggcctgtagggcctaatcacttagccacctagctacccttctataattctaaggcttcacgtcctaggtctatcctgctcgtcctactatctatccaacattgtttctatcaagttttactttggaaaaggatggtatttatattttattgattcctctgtggtggtacaagctccgataccagatgtggcggaactgcccgaattatttcaacttaagtgcctaagtcccgccttagaggctagaccacacttaaatgggaataacacgtcaatccctcggatctagtccgacgaggccactgacaggatcaagtaccacattctcactcgatggtgagtcacagagcaaatacaataaagcataaaaccatacattaaggagtattaaacttattacatcatcatcagagttttagcaaaagtagtcatcattgttcaaaatgcagcggaataaaactaacgataaataaacagagagatggggaagcctgtcccatcactcctcatgctcctcctcagccgaggtagggtcccactcgactgtccaacctggtggcaagatggacggccaagtcactccagcaaccatgtcctccagagaacctgagatgattatggaacaagcttcatataggccagcaactccctagaatgttctggctatggtggggtaaagaattgtgagcatggtcaccactggcacttgattctctggacagagcagacttggtggctgtgggagagggtcatcactagcagggatacaagaaccccaacacccatgcagtggtatgcgagctcgagccgaattccgagcttacgtacgcgtgcatgcgacgtcatagctcttctatagtgtcacc

SEQ ID NO: 100805 - DNA, 389 bp, Zea mays
  Clone ID: MRT4577_23446C.1
ggggttgtcccttccttcccttttttttggcttttgggcaacaaaaaacacctttttttatacaggaaagggttccaaaaaacacacaatttcaagaaaaacggggacttacttcggccccccaaactcccaaaggttagaaccagtttaccccggctgggttctgtacttcccctcaaacaatgtaagttaagaccacaaaatctacatctggggggactctttaaaaaagcccaccccagttgggttgccagatcaaaacggcatgcccgaggctgggaccctcaagacaatatgaccagcccaaggaatattgaagcgccgggcaagatgaaccccatgacccccgatataacaccccctgcaaaaccattgcagggcaagggcat

SEQ ID NO: 100806 - DNA, 655 bp, Zea mays
  Clone ID: MRT4577_23447C.1
aaagcataaatccacacattaaagagtattaaatttattacatcatcatcggagttttggcaaaagtagtcatcattgttcggaatgcatcggaataaaactaacgataaataaacagagagatggggaagcctgtcccatcactcctcatgctcctcctcagccgaggtagggtcccactcgcctgtccaacccggtggcaagatggacggccaagtcactccagcaaccatgtcctccagagaccttagacttataagaaggccgagcccaccggcacttaacaccatcatcagcagcacaaagctatgaccttattgtagtgaagaggcctagatccttctacccaatcatcagttagttagctccatccacttgatgagcagccactggagtagcctcctcttcagtcaacgcttcatcttgaatcttcactctttctgagatgattatggaacaagcttcatataggccagcacactccctagaatgttctggctatggtggggtaaagaattgtgagcatggtcaccactggcacttgattctctggacagagcagacttggtggctgtgggagagggtcatcactagcagggatacaagaaccccaacacccatgcagtggtatgcgagtagagctcgaggtagagag

SEQ ID NO: 100807 - DNA, 325 bp, Zea mays
  Clone ID: MRT4577_23448C.1
cgagttcctcatcgacgacgtcctgcgcctcgccggcggcggcagcaagatccggatcggcttcgacgtgcgccggcggcgccgccaacttcgccgcccggatgagggagcgcggggtcaccgtcttcaccacggtgctcgacagcgccgggaagcccatgaacgagttcgtggcggccagggggctgttcccgctgctgctctcgccggcgcaccggttcccgttctacgacggggtgttcgatctcgtgcacgtggggaccaccgcgctggccgaatgagggtcttcggcgctgggtcaggcccggactatggaggcgcttga

SEQ ID NO: 100808 - DNA, 768 bp, Zea mays
  unsure (1)..(768): unsure at all n locations
  Clone ID: MRT4577_23449C.1
cggccgggnacccggttccctaccttccctcaaaccacctcctctgcaacgagcgcgccctacgcgacggcgttccctcggctacctctacctcctggacatgccaccctcctcccggcctccttcgcctcaaccctaaccccgcaccttcgaacccattgctgctcccctctctccccggctctaatccgctcctaacttccgccttgtttgctgcaaggaggcgtgcgcgacctccagttccaatctgagcgactttggtggcatggacttcctgttcaccatcgccggcttcctcaccatcatcagctttggtggcggacatgagaggagagaagaatccttcgagaacaccaggcgatccatgcacaaattatcaggaagggtggtgggaaagtgttccacttgccaccaattctcatctctcacctctctatcacatgaaccaacatatttctacaatgtggacattcctctcgagtcatcaaaggatctgaagaaaaggagaaagaactccatgctctgaagtgcttcgcggttgagtcagaacaaggcacagatgggcgcgacagagctgtgggatctcttggcctccggctcagagcaattcgtggagatgtacaggggtgtatcaacacctcaggctgaagaactggtttgtaaggtcaggactgcagtacaggcagactttgntgctcactgtcatcgtccgacactagtgcactcgtagttcggggaagggtgtggctccaaaagggaaagcattcg

SEQ ID NO: 100809 - DNA, 272 bp, Zea mays
  Clone ID: MRT4577_2344C.1
ctcaccaacgccggggggtttttaactcggaaaactgaaaattctggggtacatgggtttgtccacagcagatgaactttttctagcagatgaactttacggcgtaacatgggtttgttaaggggagcccccggggtgggtgaatgggtaagcgaatgcgccggcgcaacctactaattgagggcctcctgctccccctccttttccttccaaaccggaaggatgccttgcccagccaggctttggtagacctaaaacaccagggacttggc

SEQ ID NO: 100810 - DNA, 368 bp, Zea mays
  Clone ID: MRT4577_23450C.1
tacagctgaaacatagctgtacagaccttatgaaatatcccatcctggcatagtgtgtacctctccaggatgggatattccatacggactgtgcaggcacattaggagctgttccgcccgcttagatagtacaggtacaactggccgggtgcgcgcgacagtcctgcattcgattatggagtgggtttgattatatcctgtgcgtctaacatgtcttgtttcaacaagaccaatcggggaggacctatcctacattatttcaaataattgactcggcgtaagatgaagacgaggagattaagatggctgggtctgccatattcgagggaaaggaaacttgcagtctaccatctaagtcgagttatgct

SEQ ID NO: 100811 - DNA, 112 bp, Zea mays
  Clone ID: MRT4577_23451C.1
tggttaatcaaggtaagacatctcgtctaggttaccgggatacaaacggcacatgctggcgtggaagtaagcttgggggtgtaagctgcggtcctagccggtgacgatactc

SEQ ID NO: 100812 - DNA, 736 bp, Zea mays
  Clone ID: MRT4577_23452C.1
cctcgaggccggccgggaccggtttcctacttccctcaaccacgtcctctgcaacgagcgcgccctacgcgacggcgttccctcggctacctctacctcctggacatgccaccctcctcccggcctccttcgcctcaaccctaaccccgcaccttcgaacccattgctgctcccctctctccccggctctaatccgctcctaacttccgccttgtttgctgcaaggaggcgtgcgcgacctccagttccaatctgagcgactttggtggcatggacttcctgttcaccatcgccggcttcctcaccatcatcagctttggtggcggacatgagaggagagaagaatccttcgaggcttgcagagaagacaaacactggtagtcgtagaacccaatgaaattaacttcactagaataaagaagaaaaggaagaaaacgaagaaggtggatcttgatttaactcttaatgagcttggagatggggaggacactcaagaacaccaggcgatccatgcacaaattatcaggaagggtggtaggaagtgttccacttgccaccaattctcatctctcacctctctatcacatgaaccaacatatttctacaatgtggacattcctctcgagtcatcaaaggatctgaagaaagggagaaagaactccatgctctgaagtgcctcgcggttgagtcagaacaaggcacagatgggtgcgacagagctgtgggatctcttggc

SEQ ID NO: 100813 - DNA, 409 bp, Zea mays
  Clone ID: MRT4577_23453C.1
tctagatcgcgagcggccgtcctcgccgtctacagcttactgacgcgcacactgcaaacaactaactggttcatcagagaccaatggtgacgacggtgcctggccagaccgatgagcaagggacgaacgggagtagcagatggctatcaccctgaccaaggcggcacggacggcggagagaccacggtgagtatcgggtcgaccccgaacaccacacgccgatgacgagggactcacacagcccctatacttagccagatacccataggatctattctataaggctgaggacgcaatggcacgactactatacttattgcacagaggaagacgaagcaggccttgccgattcggacatttggtccagcatcagatgagtatcgcacgagcatcaccatgacccatcact

SEQ ID NO: 100814 - DNA, 203 bp, Zea mays
  Clone ID: MRT4577_23454C.1
aataataaaaaggggttttttggcccgaaccggaatgttattattcaggtttttttatttttggtttttataacctggcttattttttctgtggtgggttccattatagggggattaagaaaatgggcctaggctcaagatgctcaattgccacaagaccagctccaataaaaatcatggaatgaccggactcaaaccaaaac

SEQ ID NO: 100815 - DNA, 601 bp, Zea mays
  Clone ID: MRT4577_23455C.1
gccagtactggaggagcacccactggacacctagtttacctcatggagtgaaaagggacgaccgggcggatttttctttttcagcggcccaggacaacgccacaaccacgcaacaaattttctacgtaaacggcccgacgagtaagggactgggacgggacttaacgtacgaggtattggtacttcctgtggtgggaacatactcacacggtgaccagactctacgtggaaggactctaaggtcacggtatgctgaacgttctgaacaacctcctgagtacgatgaaggatcccctacacgattgttggggcggagtcctcatggcaacgtactcaataaagggaaccagctgcaaaatctcgagagtctaggagacccactggaccgttgggagtcaggttacttttgaggagaagggagtaaatgccatctggaacaaaacctacgactgaaaaggaagagccacgacaagcgtcgggatgtaggagaagtcctatcggggctcatagaaccacctgtctcgaaccacgactacaccgtgtaagttatgggagaaggttacctccaaggcctacactagccaaacaactactccaccag

SEQ ID NO: 100816 - DNA, 146 bp, Zea mays
  Clone ID: MRT4577_23456C.1
ccgagtggcgttcaattatccgatccgttgcattttctctatatattttacgcacagagggtgccttctagctgattataccatgtcatacgtgacggattgggccattggcgcgttgacttcgcaccgccaccaatttgcatcac

SEQ ID NO: 100817 - DNA, 1129 bp, Zea mays
  Clone ID: MRT4577_23457C.1
cggcggggacgacggcattgccggcggggacgacgacattgccatactaccccgttctcctctcctcttcccccaaatctggccccaaatcggcggtcctcctcgggcgcggctccatggctggctcctcggcggtcctccaggcaagggcgcggcctcggcctcggatccggcgcaggggcgggcgcggttggccccagcacccgtgcatcccggcgcggcgcgtgcccggccgcccggcctcggcgttcctcctcgggcgcggctccacggctcctcggtgctctcatggatggaagggccccctgccagtgcggggcgaggtgctccatcgttggaagggccccctgcttgtgcttgcgtgctctcagcgatgggatcttgggagaagaggaagcgagagagagggcagggggcagtgatccggaaagggcgagagagatggagcgcagtggcgaggaaaccgcggtcgaggatggaaaggaacgctatagaaggaagccgcgactgctcgaggatggaaaggagcgccgcgggcgggcaggtggaaggcggcgtcactgccgcgaaggggttcaaggcggcgggtatctacagtgggttgcgtgccaaaggcgagaagcctgacttggcactggtcgcctgcgacgtcgacgccactgtagcaggagcatttacaacaaacgtcgtagccgccgcacctgttttgtattgcaagcatgtccttagtacatcgaaaacaggtcgtgctgtgttaattaatgctggacaagcaaatgctgcaactggtgatcttggctatcaggatgcagtggatagtgcagatgctgttgccaagcttctcaatgtaagcacagataacatactgattcagtctactggtgtcattggtcaaaggataaagaagattggaggagtggctattagaataggtgggatggctaaaggttctggaatgattcacccaaatatggcaacaatgcttggtgttttgaccacagatgctcaagtcagcagtgatgtctggagagaaatgatccggatgtcagtgagtagaagtttcaaccaaattacaaattgtcttcctgagaagttagcaactgcccctccatcaccaaagaatgaataa

SEQ ID NO: 100818 - DNA, 2281 bp, Zea mays
  Clone ID: MRT4577_23458C.1
cctcgaggccggccgggccggggaccggtctcccgaccccgaagaccacttgccccctccaggccgaggccgccgccgccaactactgacacagtgacacgcaccaatgaccaacccggcggccggcctcgaacgataacacgccggcccgcctcgccacgctcccaccctcctgcctccgcgcgccacgaccagccgccccagcagcagatgtcgcccccgtccgtcctgctcctccactcccgcatcccgcttcagccccgccccttcaggatgaactcccgggcagctccgagcagggtcgtcgtctgctccgtcgcgtctaccgaggggttcatctccgcagcgccgatcctcctccccgagggcccttggaaacaggtggaaggcggcgtcactgccgcgaaggggttcaaggcggcgggtatctacagtgggttgcgtgccaaaggcgagaagcctgacttggcactggtcgcctgcgacgtcgacgccactgtagcaggagcatttacaacaaacgtcgtagccgccgcacctgttttgtattgcaagcatgtccttagtacatcgaaaacaggtcgtgctgtgttaattaatgctggacaagcaaatgctgcaactggtgatcttggctatcaggatgcagtggatagtgcagatgctgttgccaagcttctcaatgtaagcacagataacatactgattcagtctactggtgtcattggtcaaaggataaagaaggaggcacttttaaattcactacctagacttgtgggctcactgtcttcttcagttcagggtgcgaattctgctgctgtggccattacaactacagaccttgttagcaagagcattgctgtccagactgagattggaggagtggctattagaataggtgggatggctaaaggttctggaatgattcacccaaatatggcaacaatgcttggtgttttgaccacagatgctcaagtcagcagtgatgtctggagagaaatgatccggatgtcagtgagtagaagtttcaaccaaattacagtggatggtgatactagtaccaatgactgtgttattgctatggcaagtgggttgtctggtttatctggaattcaaagtcttgatagcattgaggctcaacagttccaagcatgcctagatgcagtaatgcaaagtcttgcaaaatccatagcatgggatggtgagggtgcaacatgcctaattgaggttactgtaagtggcgccaacaacgaggcagaagctgctaaaattgctcgttcagtagcatcttcttctttggttaaagccgctatatttggaagagacccaaattggggacgaattgcttgctcagttggttattcaggcattcaatttgacgcaaatcgtcttgatatttctctgggagttattccactaatgaaaaatgggcaaccactcccctttgacagattggccgctagcaagtatctcaaagatgctggagatgcccatggtacagtaaacattgatatatcagttgggagtggaggaggaaatggaaaggcatggggctgtgatctgagctacaaatatgttgaaataaatgctgaatatacaacatgagatttatatttgccatggagaaaaaaatcttgtaatgatgaatgggtgcgactaccgtcaggagaatgtagtttcgtgttgcaatggcagccttgcggatgtattatttcacgtgagatcaatcagaccaatatttcataagtgtaataatgtgatgaataacgatgggcgcaataacaacactgacgatgccaccttgttcggttatgaatttctgatgatgagaaagcattggtcagacaaataattttggaattcggtatacaaagctctggtcctgccgtcctgcgtatcaaactgaagctccacttttatatgtcagttggactgatatggtgttaatttcaccactgatacctatatcaattggattccttgacggtttgccagccgcagttctcttgttttaacattttagccttacaaacacaacgtgatgttgatgtagtttgtaacgtggaatgtcagaaataatattgatacaatgttgtagatttattgttttatttgaaattatgtacattgctttagacgaatctcagcaagtcatattcgatttggaaaagccaacgtttctaggttcatgaatagttataatatgggagaataaagatgtgctgttttaaaaaaaaaaaaaaaaaaaaaaaaaaaaactcgaggagagggcgccggtacc

SEQ ID NO: 100819 - DNA, 484 bp, Zea mays
  unsure (1)..(484): unsure at all n locations
  Clone ID: MRT4577_23459C.1
ngagctttcttcataccacacacacacacacacacacacacacacacacacagaacacaggcgncgnccgctccngaatggcctacgcgacgcagcatcggcgccgagccatncttggcctggccgccatcgccctcctcctggggtctcccattgcagccgcagccgccgncgccgccgggggcgagggcgacaagcnccccgcgggccgganctacgcgcactgcgcggcgctcccgncccncggcgccaggctgcactggacgnacgacgccaagacggggncgcngnccgnggcgancgnggccaagccggcgggcgcgggcggagccgggagggagaagagggcgaacaacccggcgggcgagggcaagaagggcgcgcaggcgcagaaggcccacaagagccccggcggccccggggggggcgacggagaaaaaagcnacaacgaggaccggggacaaggggggggggcgccggggaa

SEQ ID NO: 100820 - DNA, 814 bp, Zea mays
  unsure (1)..(814): unsure at all n locations
  Clone ID: MRT4577_2345C.1
acctaacgggcggggccgcaccggaacctaaccgagagcacgagcatacccgtcccgactccgactgcagagcatcagccgaggagaaaagtcgggagaaacgcgcgtgacgtctgcccgcgtcgtatgcgccgcgctgccgtcgccacgacgacgacgacgaccaggatggcagccgaggagatgagacgggcctccgcctcaacggccacggcggagatgccggcgtcgccggcgccggcgcaagcggggtcgaggtgggcgcgggtgtggccgcgcgcgctccggtggatccccacctccacggaccgcatcatcgccgccgagaagcgactcctcacgatagtcaaaaccggatatgtccaggaacgagtcaacattggctctgctccacctgggtcaaaagtaagatggtttaggtcagcaagtgatgaaccaaggttcattaatactgtaacatttgatagcaaggagaatgcccccaccctggttatggtccatggctatggagcttcacaggggttcttctttcgaaactttgatgcccttgcaagccgttttagggtgattgccattgatcagcttgggtaagttttgacaaaagtggcacatatttttttattatcgatcactataggtcttcagtagtagtagattcatcgcaatcaaggaaaatgactttgttcgactattaattgatctggtccttaaatcgtaaaatctcatggcatatgtttttaggaggtgtcagntctgatttttaccttcctctgatgcatttgatggcagtatggcactatagaattgacttctc

SEQ ID NO: 100821 - DNA, 1417 bp, Zea mays
  Clone ID: MRT4577_23460C.1
gccggccggcctcccactctttccggtcgcttccccaacccccctcctcttctcacttccccagagtccgaactacgagcgagcggctgcgattcccagcgtccgagcgccccggcgccggtctcctacgcggggaaggaccggcctcggactgctacggcgccggatgagcgagcaagtctgtttcttgggcaagctatcggtcgatgtggcagcggagtagagtactggacgggcggggccacatgaggttcggctccggaagggtggaagacgagatggcgctcacgaggcagaggaccgtgagattccatgatgagagggcgaaggcaaccatacctattcaccagaagcagcatgggctggctgctagcaggctcggcttgggaagttcggggaagaacaaggtcttcgtggcaggagacgacttgtggtacaacaagattattgacccgtcgagcgacttcatcttgacgtggatatacgtcttccgtgtgtcatgcttcattgctctgttcatggaccctctgtacttctatgtgcctgaaatcgattacaggcaaacctttcattgtgtcaggaaggatacacgcctagccatcatcgttactgtgttccgatcaattgtcgacctcttttatgtcatccagatgatgataaagttcaggactgcatatattaatccaagctcaaacttaggggtttttggtcgaggagatctcatcacagatcctaaggaaatcgcaaagcagtacttgagatctgactttgttgttgatttggtggcttctttgcctttaccacagatcattatttggtctgtgataccagctatcaaatattcttcgtctgagcatgggctggctgctcagcacgcctggcgccgcctgaggaggaggaagatggccaaggacctgagtctgagggagtcgttctcgtccacgggaccgtacgaaggcgatggcgacgacgcctcctcccctgaacagagtatcacacttaggagaggagccggcagcatcatcagggagctgcctaagttcaggaagccatcggagccggatttctcggcggagcatgacgactgactgactggcggaggactgagtggctgatacattgtttgttaaggcaaaagattggtgcttctgatcggttgttcatactgtacatacatatgtagtggtgcttgtcattgtattgtagggatccccccgtagattagaaagattgcttgtgtccgctggccgagcagattttgcttcccgggtcagggctctaccattcttttttcttcttttcttccaagtgtgaaaattgcagcaggatgtactgttgtctgtttctcttacaccggtctggttgttgattctgtgaaattttgttgtgtgacccccgagactttgttcctttttcc

SEQ ID NO: 100822 - DNA, 233 bp, Zea mays
  Clone ID: MRT4577_23461C.1
ccacgcgtccggcgcggcgtctgcggctgtccggcaggccacttgcaaccgcctcaagagcatgacaggccggctcggctgaaacgtcagcagggccaacacacccaacaaccccagcaagtgccgcatcagcgccgactcgcccagcacccacacacggcgactgacccaagaacaactgatccatggaaccacacgaggaagacgctcgaccgctagacggcaccgtacga

SEQ ID NO: 100823 - DNA, 205 bp, Zea mays
  Clone ID: MRT4577_23462C.1
ctcgccttcccttcccaaccagcccgcctttttttttttttggccttttttctggaagcgggggccacctggcagaagcaggcaggcccgaccaaatggcgcctttaggaaacggcggaactgctgccgcgggggcgtccaacaccctgtgggtgtcgttcggcgagatgctgatcgacttcgtccccgacgtggcccggctgtc

SEQ ID NO: 100824 - DNA, 706 bp, Zea mays
  unsure (1)..(706): unsure at all n locations
  Clone ID: MRT4577_23463C.1
aattcggcacgaggcaacctctagcaactcccttgttcctggtggctggcgccctacacgacttccccctccctgcaccctctcagcgcccaagccctcctccatcccctccgctcgacaccctccccttccctggcgtcttcccctaggcagccagccaccgccatgggaactcatctccctagagctcggctcccctgcaccttcaccaatttcgtcggtttcccctagtctttatcgacctcggcgtctactgagctctggtccatggcgcccatcttcttctccatttgcgagaccctgctcctctgcacctgtgcacccattccatggatgtgtcgttcctttcctcatccatggcgcccccatgccatttccccacctccgacaactgttgtatccgcggctgaccagcagcagggacgctggcttgggacaccaacagctgacacaggaagctctccagtagggcgccccttcccagccaacccctgcaacgcacggctcctgctcgccctgttgatgctcgacataatgcctaggacgagcattgcgttgcatacaaccaacgtttcatccaagtgacccatcctccacaaccaaggtccctcgtcatgccccctgncaatcgcgcaccttgntatcccacgccttggccttgctattccttgctatgtgctcaccatttcgtgccccgtcacagtct

SEQ ID NO: 100825 - DNA, 1999 bp, Zea mays
  Clone ID: MRT4577_23464C.1
ccgggtgtgttccgatcattgtcgacctcttttatgttatccagatgatgataaagttcaggactgcatatattaatccaagctcaaacttaggggtttttggtcgaggagatctcatcacagatcctaaggaaatcgcaaagcagtacttgagatctgactttgttgttgatttggtggcttctttgcctttaccacagatcattatttggtctgtgataccagctatcaaatattcttcgtctgagcatggcaatgacatgctgcttctggttgctcttttccagtatatcctaagattatacctcatattttccttgaacgataaaatcgtcaaaattactggggtgtttgcaaagactgcttggcatggggctgcctacaacctgctgttatacatgattgctagccatgttttaggagcgttgtggtaccttctatctgttgatcgtcagattgcgtgctggaaaaacttttgcgatgaaactgattgccacactcgatatctatattgtgatgtaaaaccagattcaatgtggaatgggacctcagtcttttctacttgtaatgctaagaacagtaccaaatttgactttggtatgttccagccactgttagcaaacaaaactcctaacgagagcttcctgaagaagtatatctattgcctttggtggggtttgcagaatctaagttgctatggccagacattgactgtgagcaccttcattggtgagacactgtatgctatattattggcagtggttggcctagtcttgtttgcccatttgatcggaaaagttcagacctacctgcaatcaatcaccgcaagggttgaggagtggaggctaaagcagagagatactgaggagtggatggggcatcggcaactgccccatgaattacgggaaagagtgagaagatttgttcattacaagtggctcgcaactcgaggcgtggacgaagagtctatattgagtgccctacctacagatcttcgccgcgacatgaagcgccacctttgcctgtatctcgttcgtagggtcccacttttctcccagatggacgatcagcttctagacgccatatgcgagcgcctggtatcgtccttgcgcacacccacgcgtccgcccacgcgtccgggcgacccagtgaccgagatgctgttcatcatccgcggcaagctggaaagctccacgacagacggtggccggacgggtttctttaactcgatcaccctgaagcccggcgacttctgtggcgaggagctcctcggatgggcgctcgtccccaagcccaccgtcaacctgccactgtccacccggacggtgaaggcggttctcgaggtcgaggcgttcgctctccaggccgacgacctgaggttcgtcgccagccagttcaggcgcctccacagtaggaagctgcagcacacgttccggtactactcccaccactggaggacctgggccgcgtgcttcatccagcacgcctggcgccgcctgaggaggaggaagatggccaaggacctgagtctgagggagtcgttctcgtccacgggaccgtacgaaggcgatggcgacgacgcctcctcccctgaacagagtatcacacttaggagaggagccggcagcatcatcagggagctgcctaagttcaggaagccatcggagccggatttctcggcggagcatgacgactgactgactggcggaggactgagtggctgatacattgtttgttaaggcaaaagattggtgcttctgatcggttgttcatactgtacatacatatgtagtggtgcttgtcattgtattgtagggatcccaccgtagattagaaagattgcttgtgtccgctggccgagcagattttgcttcccgggtcagggctctaccattcttttttcttcttttcttccaagtgtgaaaattgcagcaggatgtactgttgtctgtttctcttacaccggtctggttgttgattctgtgaaattttgttgtgt

SEQ ID NO: 100826 - DNA, 454 bp, Zea mays
  Clone ID: MRT4577_23465C.1
tctttcgctttgcccggttcgcgtacaggttgagcagcaaggctagcatgctcccaataagtggaggaagcacatcgacctcctttgaccggacactgtggttccccagggccgcatccaccgactaccttgacagatcaatggtcggagactactcaggtccacccaatgcgtctaggaaagcacggggaacacctgcaattacagtgggactgtgtcggaccagaacctgcccaaaaatgatgatcaagaggtgatcaagacccggatgaagggcttccaattgaagtgcaacccgttgcacacctacagcgaggtgttccggctcgaccggttccgtgagtacgatctcatccacggccgctaggacattcttgccactcttggtgctctgtccgtcgagtggatcaccggcgtaaactggcagaacgaccccaaggtggagatcttcgac

SEQ ID NO: 100827 - DNA, 293 bp, Zea mays
  Clone ID: MRT4577_23466C.1
agcgaactcggtgcccgaaagcagtgccagcgccacgatgtgaaccccggacaaagatgcggggagaagaggcgtgctgaactgggcttgctctgtccacgacgctccaatttgccatttggtagtagtacatgttggtagtggtcatcttgccgtatatattgccctgcccttataaaggcacgacgaactgtacccgtggtcatcttgccatgtcctagttttcaatatatttatgacagtagtagatgctggtagtggtcatcttgccatacacccatatttagccacaa

SEQ ID NO: 100828 - DNA, 602 bp, Zea mays
  Clone ID: MRT4577_23467C.1
cctgttttcatctattgtactgttgatggaaccttatacaagaaaaaaaagaaagaaaatcattcgaatcaagtgtaccctgtctaacttgaacaaaggtggtcttgataaaaaccaaaaataagtcttccatactgacttgtaatgaacaaaatgtatctttccctctaatctaattatgtgtagtcattctgaaatctcataaccagtcattgaactataagtggttaagtctgttctgaagagcttgttttattattatatggctttgctttggtttcagctcactcttttggtttggtagacccagcaaagaataacaaacaaaaaaaaggaacatgaacctgtttcaaatatggtaatcaaacatgaatcttgaaataaatgtggtgtgcatcttgtgctgtctttaactactaaatcagccggttctgtttctttttttttccatagtagtaaaaccatgatgttttcaattgtccctgtatttgccatgtttttttgcatacatctttcatgtacataatatccttggtcatatctgtattctgtaatgacacatttaacagatgtgaactactcaatgcaaaggtacttgcttt

SEQ ID NO: 100829 - DNA, 103 bp, Zea mays
  Clone ID: MRT4577_23468C.1
gcatatgcaggactgtctcctgcgtttatcatgggctcttgttcactccaaacacccacaagatgtgcaccaagggatagccatgcttgaatcatctttgcct

SEQ ID NO: 100830 - DNA, 328 bp, Zea mays
  Clone ID: MRT4577_23469C.1
aacacataaggatgttctttcattcttcttttttgttcccttgttgcatcaaattgtgccttaaccacgtcgatgtgctgccaaattgtcaatccctgatacggtcaatcatggatggaccgactgcaatataaatatattataccacaaaaaaaaaaaaaaaaaaaaaaaaaaaaaaaaaaaaaaaaaaaaaaaaaaaaaaaaaaaaaaaaaaaaaaaaaaaaaaaaaaaaaaaaaaaaaaaagggggggccgcccaaaaggttcaaaccttacttacccttgaatgcaacttcaaagcccttcaaaagtgtcaccaaaattcaatt

SEQ ID NO: 100831 - DNA, 322 bp, Zea mays
  unsure (1)..(322): unsure at all n locations
  Clone ID: MRT4577_2346C.1
ctctgagtggttaaccaagtttcgagcaacatggaaaggcatgctaatgaatcgtctttgggagtccaattttactccccaaagggttattagacctgagcagcacaagaaggatgctcacaggggcctgcgcagaggttatggaggagtgtttgtcacttctcaagaagactaagggggggtaaactcatgctgtgtcatgtcacaactataaagctgcctaggggattgggtccttggggtccaggtctagtacagagatataccagggccaggtttggtacaagttctactggngaatgactaacagatgaagaaccgg

SEQ ID NO: 100832 - DNA, 332 bp, Zea mays
  Clone ID: MRT4577_23470C.1
gacaatgctagagtccatctatctaggttttatgctggtgaaaaactttgaagtaaagaaagtctgttagacttgtacttggtccttttgtcatgcaacattttcaggaagatgtcgacctcatgaaaagtttgaattttgatgcctaccggttttcaatctcatggtccaggatcttcccagatggcgagggaagagtcaatccagaaggtgttgcctattacaacaatctgataactacctgcttcggaaaggcattacaccgtacgccaatctttaccattccgatctccctcttgcgcttcagaacaagtatggagggtggttaaatg

SEQ ID NO: 100833 - DNA, 1266 bp, Zea mays
  Clone ID: MRT4577_23471C.1
ccctgaaagaaccactgacgtactgcataccatgatcattggaaccccatggttgggccatcagatgttaggcccatgcaaacaatgcaacctgctgatttccatcatagccattgggcacatgtgccccattcttatgctcaacccaacagcaacaatgagcagccaggaatcccttttggaacaagggctacacgggttgatggtgatagccaacgtcgaatatctgttgtttctccatcttacttcagcaatggatctagacctcccagtgttcctcctctgatgcctcagttcatgagggcccatggcagcatcaatgaacaataccaacagaattcatcatctagcctatttgctggggcacataggtcaggaggcatgcgacctgcgccgacacctctaccagagaaccccaccttttccttgttcccaccgggttcatccggccatagttcgatggagactgatgacgctggaggaagccagttctatgcctgggagcgtgaccggttcgccccatttccgttgatgcctgtggactgcgagataagctggtggacctcacagcagcagtctcatagcacatcagagccttcatctgctccaaggaggctattcgggcaatggctcggcgtcggcaggtcgtcccctgaaaatagaccacccgagggctcttcgtatcggcaaatgatgcctgtggactgcgagacaagctggtggtcctcacagcatcagtctcatagcacatcggagcctacatctgctccaaggaggctattcgggcaatggctcggcgtcagcaggtcgtcccctgagaacagatcgcccgagggctcttcgtatcggcaaatgcactcgccacggatgtagaccatcgctgctggcaatccaatttaatttggaacccgagatgcttgtaagaaacgatgggaaacccattgtattatgttaggccaggctgggccgtaaaactttgggacgatgttcgaggggcgagaaacaggaaatcatccggctgagaggatattttgatttggtttatgtgaattctatctcgtacatatttgaaatcaagttgggatgttaggagtcatgctgcaattctgttgatcgacggctttcaaatgctattaaatttacgttgcaatggtacctgttgaaccgaagatggttttatgttcgtgtcgcatgtgaaggattacctttcatgcggttttcaataggccaaaataaaatcttaattaaactaaaacaaacgcgtgg

SEQ ID NO: 100834 - DNA, 143 bp, Zea mays
  Clone ID: MRT4577_23472C.1
cccacgcgtgcgtccactcatactggaccttgtccctcaccatagcatatatcactcacggagccttaacattcaggatgttgaacaacaacatcatctccattgcctacatcattggtacaggcatgattaccgtaaaggat

SEQ ID NO: 100835 - DNA, 242 bp, Zea mays
  Clone ID: MRT4577_23473C.1
cagagacacagagaccacatagcccagtgattaaaccccggtttcactctggccccaggagtggagcctggccactcctgtttggttctcactgggaggcccactggccttggatcatctcctcatgcacacccggagttttacctgcttgcttgctttcctggactgctgtctgcaagaaagtaactaaaacatgaaaagtaaacctccagcttccacagtatattacctgccgttgcatg

SEQ ID NO: 100836 - DNA, 579 bp, Zea mays
  Clone ID: MRT4577_23474C.1
tttccgcccccgcccactcctgggggggcgggagtgggtgggacctcttcccgcgccgacgcagccgccatggaccccgtctccaatgggggctaaccccgctcgcgggcgccgacccggagatctacgacctcctggagcgcgagaagcggcgccagcgtctcggcatcgagctgggtcgcggggagaacttcacctccttcgccgtcatggaggcgctcggctccgcgctcactaacaagtactccgagggcatgcccggcgcccgctactacggcggcaacgacgtcatcgacgagatcgagaacctctgccggtcacgcgcgctcgctgccttccaccttgacgccgcgtcctggggcgtgaacgtgcagccctactcgggctcccccggcaacttcgccggctacaccgcgctgctcaacccgcacgaccggatcatggggctcgaccttccctccggcggacacctcactcacgggtactacacggccggcggtaagaagatctccgccacctcgatctactttgagagcctgccgtacaaggtgagcgccgcaacggggtacatcgactacg

SEQ ID NO: 100837 - DNA, 522 bp, Zea mays
  Clone ID: MRT4577_23475C.1
tcttctttttgtcaccactcctgtcacctcttcccgcgccgacgcagccgccatggaccccgttgccacatgggggctaaccccgctcgcgggcgccgacccggagatctacgacctcctggagcgcgagaagcggcgccagcgtcgcggcatcgagctcatcgtcttcgagaacttgacctccttcgccgtcatggaggcgctcggttccgcgctcactaacaagtactccgagggcatgcccggcgcccgctactacggcggcaacgacgtcatcgacgagatcgagaacctgtgacggtcacgcgcgctcgctgtcttacgccttgacgccgcgtcctggggcgtcaacgtgcagccctactcgggctcccccgccaacttaggcgcctacaccgcgctgttgaacccgcacgatcggatcatggggctcgaacttccctgcggcggacacctaagttacgggtactacacggtcggcgggtagaagatctccgacacctcgatctactttgagagcct

SEQ ID NO: 100838 - DNA, 261 bp, Zea mays
  unsure (1)..(261): unsure at all n locations
  Clone ID: MRT4577_23476C.1
attcatgtgcttgttatgcgcccgtgccctttgcccggcgaggcgagcgcacccttgttgtcccctttcctctcctcaatagcttgaatcatttggaaacaactcaattatttaagttggcctcactctatctagagtcaggggtggacagacagggcggncaaagtgggccctggccccctcacatttttaaacctcttatacctaatgttaaggatagaaaaatagagaaaattggttgggctaaancagtcttgtatg

SEQ ID NO: 100839 - DNA, 395 bp, Zea mays
  unsure (1)..(395): unsure at all n locations
  Clone ID: MRT4577_23477C.1
aaaaaaaattttggggcccaaagcaacccagacgacgatggaattgattatttatcttatttatcggggcacaagcaactccctccgggccgtatattttttttttaacaagcgtggccaaaaaagggtgggacgaaagggggttttttttacaaancgaaccgcacaccggggggagggatgagggggaaaancaagggaccccaaacgcgggaccnnaacnggggcgcgaagggggcccngggggggcccacccccccccngcngaagcggaaggccccggcgagganggcggagggcacggggcggacgggcccaaaaagcggcagggggagggcccgcggccccnggagcgggcngnggaaggcgggacgacggggggggggccgngcccc

SEQ ID NO: 100840 - DNA, 382 bp, Zea mays
  Clone ID: MRT4577_23478C.1
ccgggagtgcgtgttctactgcactgcagcacttgcgtatgtgtgtgtcttgcctatgcccagcaaaaaaaaaaaaaacaaaaagttcttcttgaggcaaaagaactgcagttttgtacaaaaaaaaaaaaaaaaaaaaaaaaaaaaaaaaaaaaaaaaaaaaaaaaaaaaaaaaaaaaaaaaaaaaaaaaaaaaaaaaaaaaaaaaaaaaaaaaaaaaaaaaaaaaaaaaaaaaattatccgggggtcaatttaaaaaggaaaactgggttgtggtgggaaaaaattgggtttgggggttatttgaagttggggaaaaaaaagggaggccttaatttttttaaaaaaaaaccgcttttggtttggggttggttttttcccg

SEQ ID NO: 100841 - DNA, 404 bp, Zea mays
  Clone ID: MRT4577_23479C.1
gaggggaaaactggaagcctttttttgcgggttgccccattttttttttttttttcccccatcaaaactttttataaatttaattggcccatcaacttttccaatgttttaaactttggggaaaacccaattttcgttacatttaccctttaaacccaggggaaaacccagttttaaaaacccatttgtttttctttttttgcaacagatgatgtttaaaccactttgagcccaaccatttggggttttaattaataatttaaaaccacgggggcccggggggaaccttttttggtttcatttggaaaacatgaacttcttttacaattggtcaatttttatcacggtttttgcaagttgggttgcagggattccggcaattaatttgccgggggaccttcctt

SEQ ID NO: 100842 - DNA, 722 bp, Zea mays
  Clone ID: MRT4577_2347C.1
tgaagaatcggcattgatgacagattatatgtaccatacgttagctgccaaagctagtggagagctgtgcttgaaatatatattttccttcggggcatttgcaaggaaacctcttcttcagtgcgcgtccgattggaaagtgccgactactttcatatatgggcagcaagattggatgaactaccaaggcgctcagcaagcacggaaggacatgaaagttccttgtgaaataatcagggtgccacagggtggacattttgtgttcatagacaacccttcagggttccactcggctgtcttctatgcgtgccgtaatcttctatcagtcaatggagaggagggattcacatttcctgatggcctaatatctgcgtgaagtgttcaacaagcttgcccaacaacagtttacataaagaaaaaaaattcttctcccttgcaggttatccataccattgcccattgccttcgtacatgggctgttttacagaaggcggagttgcgacctatggttgtggaggctacgcaatacttggtgcgggtggccaaggactttttttcccgggcacatgggtggcggtctagtcttcggattgattaccattagagtgtgtgggttataaactttttttcaaagctgtgtgcttattaagcagaggctggaagaaatttcaagggcgtgtatctcctcgatgtaatgtgcttgaagttattaataaaatctt

SEQ ID NO: 100843 - DNA, 400 bp, Zea mays
  unsure (1)..(400): unsure at all n locations
  Clone ID: MRT4577_23480C.1
ggaatgacaacgttttttttttttgcgcgttactttttgggggcaaaaattcaacacatacctgctcaagggcaaatctgagnaggaggaaaacaatgaaaaaaaaatggtttttctaacatctaccatgttttggatgaagggaaaaaaaaactgctaatccgggcttttgaccaattctgctataaaatgggtcttggttttgaaaagcggggccacaaaatgctgcccagcaaccataggtgcccagccagccagtacaacataagccctacccttgctcggggccgcgtcataaaattttggctccccgagacccaaaaggcgtcgcccctatcagcgatgtgctttccctgacctggaacgaaccccggtgcgtggagcgcttttatacgcccct

SEQ ID NO: 100844 - DNA, 391 bp, Zea mays
  unsure (1)..(391): unsure at all n locations
  Clone ID: MRT4577_23481C.1
gcaagagctgntaactactcggngnaagggcgtatctagcttggcagttgatcagtatacaattgagcttaaactcttcatatgctgaatcctgggaacttttctgtaaaaggcatttcgtgcatcaaagataaccaatgtcctgngnaaccttaggttttgtgcagagaaaatgttgctaggtgtcagggattgcccctggctattgtaaccattggaagtgttctatcataccatgaattcgaagagcagggatgggnaatctttctacagccaacttagctggcagttagctaacaatccggagctgaattggatatctaatgttctgaatatgagcttgnnaatgatctcccgagttatctgaggnaactgctnnttctgtactgca

SEQ ID NO: 100845 - DNA, 315 bp, Zea mays
  Clone ID: MRT4577_23482C.1
caaacatacatcaaatataaatatacgctctcaaatatctagtacttataatgtgataggatcacatgtattgttgatatgccagatggtaggcttcattgatgtctttaccttatcttttacaggttaaattttggaatcgcaggaggttgaactcatgacctttggacagcctcagataggcaatcctgcatttgctggttactttggttaaccaagtcccaaaaacaattccgtgtgacccattaaaaatgatattgtgcccgaattaccaccgtattattattacctaagtgaatggacaatccaccactt

SEQ ID NO: 100846 - DNA, 1141 bp, Zea mays
  Clone ID: MRT4577_23483C.1
ggcctttttttttttttttttttttttgataaacaagggcttccattgctaatgacatacatggatgttcacaaatcttgggctggatttactttagagctaagctgcaaatttatttccaggtatttacaatgttctaagttccttgtggacgacgaaactaggcaccggtgggatatgatacgcgcgactacatacactagactgctgctctgcaaaggaagggacgggccaacgggggttgtactgagactacacttgggagctgctctgcacgggccaacgggagtacacaccatacaaaggaaggccggtactgacgtccctcagatccaccatgctctgcgggccactgtactgaagcgctttccgctctcctccactgcatcagtgccattgtggtgctgaagcctttggctttcttccgccaatcgatgaggcaccggcacttggtttggtcgtcgttcgtgatggccgacgtggtggacgtggcaggcttcttgatccaggcccaggcatggcggaggcggcgccgccgaagctgctctacattgccgtagccgacggcggcggccggcgggcgttccggtacacgcgccccgtcctgcagagcaccctccagctcatgggctgcaaggctcgccacgccttcaagattagcaagaaagtattcagtgtgatgaggagtgaattcttggatgcatcgaagtcggatagggctatcaaagaagaaaatgctcctagcctgggcattggggaagatgctaatatggttaacacagaaattccagacgcaagtagcagcagcatgcccttcgaattgtacatgacgcagacaacaattcttatttcaagagaaaagtttctgaatattgtgtgtgatgcactctcttcttacaagtatgttggaccaaaccagaaggctgacttgcttcttgcttgcagaattaaggagaaaaaggaatcagtgacagtactcttgtgtgggacaagcgggtgtggcaagtccactctatcatctttgttgggtagtagattgggcattacgacagtagtttctactgattccatacgccatatgatgagaagctttgcagatgaaaagcaaaatcctcttctctatgcatcaacctaccatgca

SEQ ID NO: 100847 - DNA, 2922 bp, Zea mays
  Clone ID: MRT4577_23484C.1
atgccaacacgcgcccgcgcgccctggcgtgtgcttttgggtccaggaacacccctggcaccaaatggtggacctgggtcctccccaattcaaaaatcgaactcctacgctccttcggtccttcccctccccatcttcccaaaccgccccacgcttcatcctcgcaagcctccccgaccccccagctcaacgagatccggcgagcgaattccctcttccccgaccaccagatcgcagcgatggagccggatcgggtcgccgcgggggcatcctcctcgccgcagccctcaccagcgccggccatgttcctgccggggcaaacgcgagaccatgagcggggagcggtcgactgcgcggatcccggcggagacctgaatcccgcaccgccgccatcgcctcagcaggctacagttgaggatgccgcggtgggcggcgatgtggagcaggaggagccaaagaaggaggcgatggcaggagtaggggaggctctccgcagcttcatggaggagtttggggatcaaggagaggactccattatcttgtcaccgcggctgcaggagatttgtactcctgaccgccccactgccctgcgcttcttagggaagaaatataataacctcatggagagatacaagaagcaggtggtcaagtgttctgaggagtgtgaccctagatataacggcttgaagaagaagtacacagacgagtgtgcagagaggcggcgtctgtacaatgagcttattgagctaagaggtaacattagggtgttctgcagatgcagacctctgagctccgatgagctcaaccgtgggtgtttatctgttgttgagattgacccatcacaggagagtgagctgcagtttgtgcccagtgaaaaagaaaggaagccctttaagttcgatcatgtttttgggccagaggatgaccaaggaactgggaaaactttcacaatggaaggggttccagaaaataggggtgtaaattatcgggctttggaagaattgttcagaacgtcagagaaaagaagtgcatctgttgcatacacattttccgtaagcatcttggaagtttacaatgaaaagatcagagatcttcttgatgagagcaatgatcaatcaaaaaggttggatattaagcaaaatgctgatggaacacaagaagttcatggtttggttgaggctccagtttataacatagatgatgtgtgggagaaactgaagtttggtgctcaaaatagatctgttggctcaaccaattctaatgaactcagcagccgctcccacagtttggttagggtcactgttaggagcgagcatttggtgacttatcagaggagcagaagccacatgtggctggttgaccttgctggaagtgagagaatagctaaaactggggtagaaggagatcggctgaaagagtcacagttcatcaacaaatcactatctgccttgggtgatgttatatctgcccttgcctcaaaaaattcccatattccatacaggaattccaagttgactcatttgctccaaagctctttaggcggcgattgcaagactctaatgttcgtgcagataagtccaagctctatggattcaggagaaactctcagttcactcaattttgccagtagagtccggactgtagaacatggccctgctgctcgtaagcaagcggatccagctgggagtttgaagttaaagcagatgactgaaaaacttcggcatgaggaaaaggaaaatgcacagctgaatcaaagcttgcagctgatgcaactgaagtatgcttctcgtgagaatgtcttcaggacactaaatgaaaaggtgaaggatgctgaacaagcatgcagaaattatcagcaacggattagagagctggaaaatgaattaggcaatgagaagagggcttctagggattctgctagatcctcaaggcccccacttgttcctacgagacagaaacaacctcacggaaggaacgcgccaccttcaggcccttctagatggaggctcaaagcccccacaatccacaacaaagagaacattcctgtgacgatgaacaaatcaaatcctggggatgaccctaataaggctgttggcagagcaaggcgcgtttcacttactccggtgattcgacaaatccccatccagcccaagaggcggtcttcgatagcaatactaccatctgtgagagagcatctttctgtgctaaacgaaaagagagcagcgtctcgactgtcgcaagccaacatggcaagaagatcactcggggcatttggcttgaatttgggtccaggaacacccctggcaggacatggtggacctgttgacgccaccccagacggagcaaagttcaggagatttgatctaggaagcagcagcagcaagttcacgagccctcctccgaatgtcaccccgcagcggaagatgggaatggcaccggcgggaggtcctccaaacgcagccaagctgtgcttcagcatccagaaaagagttactcctgcacatgttcgggcaaaacctggtatgggcatctttgacccagctcttcgtgagaatatggttgtggggagaaccggcaacgcgctgcgggtgctcaacggcaagaggagacagtccgttgtctaactctggtactgcaaacgtttggacgttcgaacggagctgcagtgtggtgagaatgatggtgcctttcagcttgttcttagtgaaaccgtgttaggacagaagatattcttctcagcatccgtaaatggattttgattggctcttactagttgataagaaagctatgttaacattgcccatgtgaagtcgttgattatatttgttcgtcacaaagaaagctatgttatggaagtcgtcgattgtaataaaaaaaaaaaaaaacctcgtgctagtgcacttctaaaccatgttcgcggaa

SEQ ID NO: 100848 - DNA, 157 bp, Zea mays
  Clone ID: MRT4577_23485C.1
aaaaggtttcacacttacttacccttaaatggaagttcaaacccctccaaaagggtcaccaaaattcaattcaagggccttctttttaaaacgtctaaactggaaaaaccctggctttacccaatttaaaccctttgcagaaaatccccctttccca

SEQ ID NO: 100849 - DNA, 178 bp, Zea mays
  unsure (1)..(178): unsure at all n locations
  Clone ID: MRT4577_23486C.1
ggggggggggggggggggganaaccnngaacgngttgacnagcnnaaattttgtaaaaagtataggggnnnatgtggaaaatagncataganntactgtaggcttgtacccntnnaaaacacgcgaggagagagggaggagcacacnttggatataattaagccggggaataggtggc

SEQ ID NO: 100850 - DNA, 436 bp, Zea mays
  Clone ID: MRT4577_23487C.1
aaacaataccccctctgccagcgacggaaaaataaagggtgccttacacttgcatgcgttgcgcctccctactgtatgtgggcgtgcaatacaaaaagatgcgcgggagctctaaccaccatgaccacaacgccatggttttgatgcgcttccgttgaaatgcatctattgggatgggaggcgcttctaaccgcagggagacattccgtgcggttataatgaagaactgcctgcggaatgtcatcgtcaaaatccaagagaagcataagcaggggtgctggggataagacaaggcgctactactgaaagctatgacgactcttttggcctctctcccagaggatgactgtcagtatgaagctcacgagcccacggtaccaatccggcagcctgcttctgatgctctgaagaagagcactgcagcttacatgccaac

SEQ ID NO: 100851 - DNA, 618 bp, Zea mays
  Clone ID: MRT4577_23488C.1
ggaacaaaagggaaaaattacgtgaaataaatcgaaaaaatatctcacaataaacagattctgatgcagaagggagctaataagttcagccaaacacatgttcatgagaggttttaaagttcattgacctctttgcctatattacactattccaagggagagggctaaattgattttaaagagaagcaacctggaacacaaatgcgttgaaccaaatggaataagcagagatcttcaaaaaccaacaaccggaagctgcaggaggagctgagtatcttcaaaggaaatagtcaggtgtccttcgggttacatctggctctcctctcctcggtgctggttcaaactgaatgaacgtgtggttcctgcagtcatcgacctcaagaattgaggccatgtttccacagcgatagcaatagtttggtgcactgaatatagtaaccactttttgctcgtgtgcccaattgaatccatccataacgagctgatgcgctcgggcgatcagatttaagttgttagtgtgattgaattgttccgaaatatcctgaccaaatgtatatccagcaccacgaggagagattccccagccacatctgtcatcaggatcagaccataataagt

SEQ ID NO: 100852 - DNA, 218 bp, Zea mays
  Clone ID: MRT4577_23489C.1
ggtttctgcacttaatttttgggcgacaatttcaagggagtaacgtggtagtgatttcgctccctttattatgatgaagttgtggcttgtatcaatgtcgtatctgcaatttgaaatatgtatatatgccatgtccgattagcaacaaaaaaaaaaaaaaaaaaaaaaaaaaaaaaaaaagaaaaacaaaataaaagatccaaagcataacaaacaaa

SEQ ID NO: 100853 - DNA, 134 bp, Zea mays
  Clone ID: MRT4577_2348C.1
cgcatcgcatcgagatcgtggctgtaccgtgcgatactctactgctcgatctccatggtcgctgcgctcaggtgcccggcatccgtcagggtctcgtgccccgctgcctctgggctcgccaaggtgcgccatgc

SEQ ID NO: 100854 - DNA, 419 bp, Zea mays
  Clone ID: MRT4577_23490C.1
gattccattgtttattactttgtctaaaaaatcttaccaactcgggtacaaatcagagtcataaaaactacgagcccccacatcgactctcctgaatcgtgcgccagctatcataaaagtacgttggcttatcgggaggacaccggagactacacacaaaacaaaccatgcactatcgttactatgcccccaaccccacccatacgaacacaaggacaccttctagcattcacattaagacctttggcaacgcccgcacagaatcataaactcagatttctttgcactgcccggcaaatactgacctagaaatttcaccaccatgataatgctttacgttgaccgctctaacacgtttgactataacttataagccacttggtgacaaaaatccatcacctaagcaaccacggacttga

SEQ ID NO: 100855 - DNA, 292 bp, Zea mays
  Clone ID: MRT4577_23491C.1
caggagagtgcctggcaaaaagatcaaatggggctgggacttctcattggccaacctgcctttccccagaaggagtgatttttctatcggcacaaagcactatatggactggtaatggttacaggttcagagattacccagtgaggccttattcctcccgtccccccaaaactgacacctttgttagccacctccccacccacatacatttctgccagtgttcacaatgacactcagcggtcatgtctggaaatgagtgcccaggcgacgaacacaagctatgccttgtcct

SEQ ID NO: 100856 - DNA, 2173 bp, Zea mays
  Clone ID: MRT4577_23492C.1
ttatttttttttgaacataattcgcatgccatgtaattagttatttttttttttttttttttttattttttttgcatagcttcttaggcatagaaacgggccacccactctttgaccaaaagacacttgtatctcaaaaggcgagaagagacaaccaaggttaatacagttacataataatatggttttttttttccagacgacccatataccatgttgctatgtgctagcagcatcctagctctaaaactcccaccccaaaaaaataaatagcctaaagaatggaaatggtacgtcgtcgtcgacccatcctttcagtatgtacagtgtaaaccccaagcggtaatcgctactctaactgtatgatggttaagattagatcaaataatgaaatgatccgagaaatcagtagcacatcatgacagcagcaacccagcgaccggtaacgagaaatccggtaagtatatgggatgccgttggatttacctgccattgcaactggcagtgaagtttagaggctcatcatcaccattcgcggcaaccaccacaactccagttgccgctctcgacaggctctacacgcctcggttcccagggagagcactaccggtgtgtgcggaggtcacggacagaacatctgggatcaggtggcggctgagtgttcgtgccgttgtggcacgctacctcttcaggcgtgggaccatttgttggcacgttcatattcgaagctccatcttctgccatgaaagacgtaccaccaaaaccaactcctcgttggacaaagcttccggagccgttagcatcaccttgcagaccagtagctatcccaaacgcgttgtcatcaagctgtgcgtcgtcagcctcaagcagctcagtgaacgagaaataagtctggggctcacgctcacactcgtccggcacaaagctgccacggctagtgcggttctgctggcgattagaagtgaaaccaggtggggcagcatacgcggttcctctcgaaaaatcccaccccagtagtcctgaagcgcccacgctgtcagcctccgaaaaggaaatctcattcgtgtggctgaaattgatgtttccattgcctggaggtgtattctggttctggacataatactcattcacagatttaccagcttggtcaaggtatccagaagttttagctagtgctcttcttatagacagcttctggctacttcccggggcaatgcttgccgtgttcgctgataaatcaacatcccctgtctcttccccgattggttcaactattccatacgaagcaagcagtgggtcctgatctgctgaagcagaagtcttcccactggatagcatagttgacaccgatgatgttgcaactgtttgctcactaaattcgggttcaggctttacataattatctgaatgaggacacggggggatggccctcctccggcacctacagcatcggtatccaaccaactcaccaatcctatcttcttcaagttgcaaggaatcaccatgaaaccaatttttgcacctctcacagcgtacatacaggaattccggagaatatgctttgtcacatagacaacattttggttttattgacgaacctataccatccttgcttttaaggattacatcattcgccctgaactcgcttccatcatccttgtcgttcttatttttcttccatatgagaccgaaatatgtgatcgcttgaacttttttagccttcgttggtttttcggactttgactttttagcttttgtcttttggacactagtgatgttctgagttaccactttggcgggtggctgggctttcacatttagaactggctgggttgtagcttccacatttccaactcgttgtgccttaacctttgtgactggctcggcttccactttgggggcaggctcagccctcgtgccgaatttaaccttagagacatttctgggagcggtcactggctgttggccattattcttctgtagatgctggatataacttgcatttgtattgtaactagtgagcataagatttcgcttctggagacataacttgcatatcaaactggaagtagtactgcctcctttgctaacaacagatcttgatgtacactctttatgacaattaccttgacaagagctgcatttaacaatatccctgcatgtgcggctcgag

SEQ ID NO: 100857 - DNA, 536 bp, Zea mays
  Clone ID: MRT4577_23493C.1
cccgggtagaacaagacctcatcctgaactacattaatcatactgagcgagcgtttttctagaacggtggcacaatcagtccgcgcctgaggcagtcgtgcctccctgcctcgacattgcgatgaccattggacgcacgaagaaaaagctctaaccatagcactacattctgcaggctggtgaaggacacgctcgccatacgcataacctgactcacagttatggatatgccaccaccccgtgcccctacttcaatattgggtgatgtgcccatgggagtctaccacaccgtgtcacactatggcaagctgacggctggctccgcagaacagggctaggaatatggtgtgtcagcaactacgccagaggcaaacgcatgatccgcgtgcggatgccaccggcgatgtgtgtatatatgctactacatgttaacagatgctactagagacctgacacaactcccgactggagtaacggggagcaagaataacactatgaactggatgtatgcacacgataaaaaaaaaaaacaaaga

SEQ ID NO: 100858 - DNA, 188 bp, Zea mays
  Clone ID: MRT4577_23494C.1
acgaggatggcgtccacgagatcaaggacgctgctgccccaaactaatctgagaagggtcagtgagatggattcagggttgcgacccgcttctgctaatgctgaggacacatactaggacagcactttaaacatgcaccctacgggccacaactttgccctatcgacttccgaccccaactaggatgg

SEQ ID NO: 100859 - DNA, 240 bp, Zea mays
  Clone ID: MRT4577_23495C.1
gatctcggctggtgatttcactagtccgcgcaggtgcgaagcccggattcagcccgctgctcccctctcctctcccgtcgtcggagccccggcgacccctcttccaagccgccatcgtcctcacctccagcgccacttcctcttctccaccactcgacccagcctagcagcgagtcggcggacgggaggatgatgggaagcaacaaccccggcggcgcagggggagggggagggggaggg

SEQ ID NO: 100860 - DNA, 617 bp, Zea mays
  Clone ID: MRT4577_23496C.1
gggattggtcgcggccggcgggggccgggatccctaatcccagcgcagcacaaacaaacaccgcgccgccgccacagctttgccctacagaatccttttactccgaagattctcaagacgcccctgatggctccccgcgtcgcctccgctctgctcttcgtcgtggccgtcctcgtggcctccgcggcggcgcaggagtccatggcgcccgcgtctgctccggcgccgggaccggtcgctggcgcggcctccgctccggcctccgctgtggccgtggtgtcgtccgcactgctgtccctccttatgacggccctgatgcagtagaagtatcatactagatttgagcgggaatttggttcagtgttgctattcctcattctttttgtatcatatatgtctgcgacatctctactacttattaagaaggtaagggtagtctgccgttctgccgttctgcgatctcagccgtccattctatcgtgtaaatctcagccgtccgatcccgcagtccatcccgcgcaccgcagcccatgacatacggcaaatggaaaaccctaatcttcagcagttccgtggtctccagcgccctcgtcgcttaccagccgccacccgacccg

SEQ ID NO: 100861 - DNA, 857 bp, Zea mays
  unsure (1)..(857): unsure at all n locations
  Clone ID: MRT4577_23497C.1
cgggaggcccacttgtgaagtagattgttgatgtaaatgtcagagccctctagactccttactctaaaaatgtgaaatatgcttagatatctgcaggtgaaacatgcttagatatctgcaaggagtaattttatacgagaaaaataagtgcagtgggttgttgtgttttgcaattgcaaaagggtctttgaagaagccagtaaatcgacggtggaccggtggcgcagggcagcggaaaatgtcgccctttggggtgtgagagagactggttagacggtgccgctcgtgagggcacgtcggatattgtgagcaatgatgacggcaaagttttgctattgtggagcctagagcgaggacacttatgctgaagttgatttttttttgttgaaattgaagttgacggtactcatgggtgatgacagtgacgacaggagaggtgctgagttgagtgagcggtatagtttaccgtaaattagccatgttcttaaaatagccgatcataataagggatactattatcatgtctagtattggaattatttgttacccggagtagcacggtagatctaagttgactttttttatatggttgttatttttagctagccataacggcgagaaaagtatatagcccatcacctgaccgccactgcgaagaagtcagaacaccatagtcaaatctggtttgtttgggnggtgtcggacgtgactgttggtcaagatgatagatgaacctgtgcgacatgtaggcatatgtagcagcgtatgtgccgaagggcgaccaggcccgtgctcacctaatcggggatagcacggcaggtgcgtcggcgcgtcgcatggttatcctaatttgatta

SEQ ID NO: 100862 - DNA, 381 bp, Zea mays
  Clone ID: MRT4577_23498C.1
cgccgtcaggctcctgcgtttgatttcactgactgctgatactgcgcgctgcgggccaggctactatgcaagactacaattgtccagcgcgctctaccgcgccagacgccaggccgaaacccgccaccggcattggcccaaacatttgacgataccagctactatgccgactagggacgagtggagctaagtgctattttaaaaaaagcaggtacatcgcttacggcaggttcacacaggtctacctcatccgctaaaagcagagccggtacatgctggcgcttaacgtgatatttaatgcgaaactgtataaacaacgatttcacgcgcacctacagaaggagatcgagatacaacttagtattgaacaccctaacgtgc

SEQ ID NO: 100863 - DNA, 415 bp, Zea mays
  Clone ID: MRT4577_23499C.1
aaggctgaacatgtaggtgaaaatcgcataaacacggcaaaagattcacagaccaaacgctgttgacattgggaagtagcacataggtacaggcggcgcacagcatgcaatgcaacatacaacgctgcatgcatgtgtgcacgtgtagttaaacgagctaatcgccgctagaccggatcaaagttagagacagcgactacagcgccgacgatgtggacaagcacgacacctccggagacgatgctgaggaagaagctcttgatctacggggagatcccggtcgcggacttcatgacctccgctcgagcccaatgtcgagctaacgtacgcgaagcatgcgacggcatagttctcatcttgcgtcacctaagttcaatgcactggccctcgctttacaacgccttgactgggaaaa

SEQ ID NO: 100864 - DNA, 135 bp, Zea mays
  Clone ID: MRT4577_2349C.1
aaacgccaacacgcaacgccagaactctgctatagtgccacctaaatgcaatcaacaggccagggactaacaacgacttgactctaaaaacccagcctacacccaactgaatctccccgcagcacaccccccttt

SEQ ID NO: 100865 - DNA, 498 bp, Zea mays
  Clone ID: MRT4577_234C.1
ggaaacaaaaaacaaccttggtacaggcatcaacgttccatttggaaaatgggtcccatacgggccattttcccttggccagattctaaactaacctcccacgggattttaaaaccaacaagaccagatttatacccccaagggagccggagccatttttttttatagacccaaaaaaaacggctagtatgtaccaccgaggggggaaaaaattccccttgccctatgccccaactttaaaaggttccccatcgggatatggctctgggggggcccgtcccccccaggggaccccccagggggctcaaacaaggcagggcggccaatgctggctgggaaaggccttgcaggcgtaaaaaaaaacactttgcacgagcggccctagcagattgccagaaacaaaaaccccccccagcccgggcccaaaaagcacccggccaggcagggccagcccaaacctcccctcctgggggcggcccttaacgacagggggccgga

SEQ ID NO: 100866 - DNA, 230 bp, Zea mays
  Clone ID: MRT4577_23500C.1
gcacattcataccactccatatcttttctataatctcacctaaatttaattcactcttctctttttttcaacttaacaaacttataaaacctttccgtttcccaacatattcatctttcacaacatccaccttttaccaaatgtctttttaactaaaaatcccctacttatcacctttcccaataattacacatcctgaatccctattacaactccccctttttcttatc

SEQ ID NO: 100867 - DNA, 209 bp, Zea mays
  Clone ID: MRT4577_23501C.1
caactctcatgacagactgcaccagcctgtgttgcaaacatcactgccccgcttctaacaggaagagatactcttttggaggtcttgcaggtaccaggaccagagccccttctacccagggcccttccaaaggcaaagcacagagtcacatttgggcgtggcatgagagggaaataaacagactatacggtagtgggagggaggtttca

SEQ ID NO: 100868 - DNA, 555 bp, Zea mays
  Clone ID: MRT4577_23502C.1
ccgaaaggaaccccccgcgtaaaccgccctaattattcccaataacccggttccaatgccggggaataaacacctgttacaaaatcaggtgttgaaaaccacgcgttttttcccaccaaaccctcttaacccgatacccggagcaccttacgggaaaccacgggataagggcaccccactggccggaggctgcggcctcaaaaaacttttttaaaactagttaccctggacgccatccccgccctcatagaactcaccgccgacctcttgggggcccttttcgagcgccccttggtcctcccgggcctaaaaaaactgaccttaataaataccctttccgacgtaccatggcccaaaggcccgcttgggaaacatgaggtggaacttgtgggcgatgcgggagaacccctccacaaaactggtggagttggagatcaggcccacagaacgctgccccttggccaggtcgcctccaggcacaaccctaggaggctggtatttgaagccggacttgaagccccccggtcaccaatccacgaactggatggcgcgttt

SEQ ID NO: 100869 - DNA, 587 bp, Zea mays
  Clone ID: MRT4577_23503C.1
gattatcacaccaacccattaatttattcaatgatcttattatcacgaataacacatgaacacaggtaaagacgtaaatcaccacacgaatactaaaatggcgttgatcacaacatatatttcaaacactcacctacacacctatccgcggacgtcggtgatgctttcaacagcaagggcgagactgacggtctaggcacatcggcatgcggagatgcagactcgtccatggcgaggacgaggaatgacgacaaactccagttcaaactattcatcacgcactcagcgggtagcggataagaacagggtagcagagttggcaacgagcaccaaggagacaacgacgacgttgttgttgaagatgatagtgatcactgaagttgaagaccgacggacacgacgagaccgcagttgcaagcaaatttttgactacattttaaaacatggcaagcccagcaagcctcatagcgagttgagagtagcgcccgacgacctggtggaataggatgttgtcgcgaccagagggaacaaggatggcacaacgtatgagatgcaaactatcagcgacgatggcgcgtcaaggctgc

SEQ ID NO: 100870 - DNA, 722 bp, Zea mays
  Clone ID: MRT4577_23504C.1
cctcgagtttttttttttttttttttttttttttttttttttttttttttttttttttttaaaagcacattccttttccattaaaatagagggaaacgccatttcaaaggccccggggcaagaacaagcagattaaaaaaggcaactcctaacactacaaacaccattttgcgaacagaaggaaccgaacaaaagcaaggtttttacaagcagaaacccagaggaaaggcccaacaacggggacaacaacaacgggagatcaagccctttcccccctgatgcggcgcgcgagctggatgtccttgggcatgatggggacccccttggcggggatggcccaaaggttggtgtcctcaaaaagccccacgagggaggcctggggggcctcctgcagcgcgggaacaggggaggactggaagcggaggtcggtcttgaaatcctgcgcgatctcacggacaaggcgctggaagggcattttggggataaacagctccgggcttttttggtacttgcaaatctcccggagcgcgacggtgccggggcggaagcggggaggttttttcaccccaccggttgccggggccaatttgcgcgccgccttgggggccaattgtttggggggcgccttgccccccgtcaacttgcgcgccgtttgtttcgggcgggccatcggaaattcggtgcttggcgcaaaaatgggcaacccgagccggcgggggatt

SEQ ID NO: 100871 - DNA, 745 bp, Zea mays
  Clone ID: MRT4577_23505C.1
ggtccaaagaggggaaaccccatcgagatcacatctcgtcccgtctatctcatcatcaccacacatcttatccatgttgacaaccatgaaatggaaaaaaaaagaatgaaataaaaaaacaaaagtacgtagtagtagccactaatgtaacagtaacgctgtcaggttccaaggacgacttatacagaggcatgattgaatattgcagcagctaataattaatgatgcgaaattccatcacctaaacaaactcctacatgaaatgacaatgacatataactgagcagatcaatggagagcagtgcgtggtaagctcgtacaccgtacctcactagtagctaatcacgctcatcactccctcattgcttcgcttccttgctcgtcctcgctctgcagccgctgggcaggcggcgcgaggaaccccataaacccgttgccggcgccaaccagatgaccgaagccgacctgcccggacatcgtcgacggctggtggatcgcgacgagggggtcgagccaagcgcgggcagacgacgacggccagccgccgccactggactgaaggggttccccttgggagaagatcagctggccctgcaggtggtctaacccttgccgtgggccgggcacgccgaacatgtaactgtcgccatttccggcggccccgcgcccgtcgtctcccgcgccgctgttctctggagcatgccacggcggcattctctggccgtgcgcctccggccagccttgg

SEQ ID NO: 100872 - DNA, 372 bp, Zea mays
  Clone ID: MRT4577_23506C.1
gggtctgcagaaaaggttttcactgccaaacaatgcacaagccgaattttacatgccatggtatccttctccgtacaaatcgaaagaaattggcaccaaaattatgtacttgcggggtgtctatctaccattcactcactcactcacgccaagaagaaggatgcagttttggagcagaacgcaacgcaacagctacctacctaccttttgcagttcaccgtggcgcgggcgctacacttggctctccaggtccagctgccggccggaggacccggccaccaccttggcgccggccttgggcgcctgctgcggcggcgggagcacggtgcgcgcgcggcagacggggcaggtggcgcgcgcgcagagccaagc

SEQ ID NO: 100873 - DNA, 567 bp, Zea mays
  unsure (1)..(567): unsure at all n locations
  Clone ID: MRT4577_23508C.1
gccggccggtccgggtatcatgcacagttcgatcctgaattccggatgaacgttggcggcatgcttaacatatgcaagtctatcgggaagaggtgtttgccatgagggaacggaggacgagcgcgtaataacctgcccttgcgtaggngaacgacaactgtaaacggttgctaataccccgtaagatgagaccacaaacccccaacagtaccactgccctctgcttgtatgaagcttgcttaactaggccgatatggcctccctcgccgccgtatctgtgaagcctgtggacgtccatggtctcgccggcaactccatctccggaacgaagatcgacgtcgcttggtcgtcggaccactatcattgacatgtactgctgatatgccggaggagactaggacgcggactataccgaatactttgacctcaacatacgtttgcaacaacaccgaacagtgataactctacggctctgactggccctcacactacaactcgttacagagcaagatcttcctgacgatctgggatgcattaccctggagaagcctgctgactcgagttcct

SEQ ID NO: 100874 - DNA, 187 bp, Zea mays
  Clone ID: MRT4577_23509C.1
gcgtacgaccgggcgttccagacccactcctgggattttttgcaaatctccatagagaacattcactgcaagatttaatagctgatgcgcgcaacctacatcacttatggcacccagatggaccagactattactatcaaactaaacgcgcctgcgagcacgccagatggacgactagaacatgctc

SEQ ID NO: 100875 - DNA, 640 bp, Zea mays
  Clone ID: MRT4577_2350C.1
aaatagtttcagcaacagttatagaagacatgtagatgtgcttatatatagttatatcactcttccagtccaaaccacaatatacagcaatccccctattggtaagagctaaaacgagcctcgttagtcccagaaatgttactgaatatcataatataccatttccagcagaaactcattcttttttcagagtatctgaacgttaaacacagaagaacttccgcaataaaatatctttactgtatgacatgattaaagaaataatctatggtaactcaatccaaatttaagtcatcatggtacagttgcaccaactttgactctgactgttctaaacgatggcatgcaaagagattaggtaggtggcaatcagaagtaaggcagtaaagtcgagtctaggcaggccaggcagcctattttgaaaccattagtgcccatgattgcagtggagggcaatagcacagaagtcatctctggtgtgcaaatatatattagttcctaacaatcaaccattgacataactaaaaaaattcaattgccaggggggagggtcactttggcctacacatagctccgccactgcttgactgtacgactattagcagcctaccttaattctaaaaatgatcgcattgtaaac

SEQ ID NO: 100876 - DNA, 303 bp, Zea mays
  Clone ID: MRT4577_23510C.1
cgtcgcacgctgcgattctttctgaaattcttaccattcttatactatcctacacggcatttgggctcgttgctggatgtcggacgctgctatctgcctgccgctcactccacgccccaatgtgccactcccactcgggccgtcccaccaccgggaggcgctaggctactatgtctctgccctagcctagtcgccgtcgcgtcgtcgcagcaccgagcgaatgcgagcccaacatcacagcgctcatgtcaagggcgcgagcaaggctttctcgtcgctgctggacaagttctacgacgcgct

SEQ ID NO: 100877 - DNA, 637 bp, Zea mays
  Clone ID: MRT4577_23511C.1
ctggctaccctactctgagtgcattcattgagctcgtctctcagtttgatgtacttgacgagtctactatgaaagacgagaggtttgctttagtcgctgcaaaagtaatcaatcctaccatgttcgatcaagttctgagaaattttactccagatgtaccggctggaacatctgctcggccaagacaagaagatgcccaagagttcctaagttttgccatggatagaatgcatgatgaactgttgaggcttaatggcaatggttcaaattcaaaggaaggtatggttgtttcttctgatgatgacgatgcctgggagactgtaggtaggaagaacaaatctgcaatcatgaggacacagagttttgttccctccgatctaagtgctatttttggaggcaagctacaaagtgtagtgaaagctgcaggtaacaaagcatcagcaaccgttcagcctttcctgctgctccatcttgatatatttccagatgctgttcaaacgcttgacgatgcacttcatctgttttccacccctgaatctttggaaggatacagaacaactgctggaaaggccggagtggtgacagctaggaaatcattcaagatacatgaactttcaaagataatgatactgcactt

SEQ ID NO: 100878 - DNA, 371 bp, Zea mays
  Clone ID: MRT4577_23512C.1
gcaccaaccatgaaatgtatcctacattaatcactcttagttgttgtatcatctccaagtgtaataaacacatcacatattacaggatacataacaatgatgttgcatacaattttgtaatgagagcctggccccatctagtttcaccaggtctaggcaaccccatctcttgatttaatctactaccactttcaatctgaccacattcaagtgattttatgataatctcaagcctaacagtttgaagcattccatgatgcttgcaagaaactctaacaatattcaacaagaaaaaaaattgataaaaaaaccagacacaatcaatgtttcaagaactagatggagttgatgtgcaaaacaatggatacaat

SEQ ID NO: 100879 - DNA, 306 bp, Zea mays
  Clone ID: MRT4577_23513C.1
cgagctctcaattttttacctatccaccgttctcaccacccatcagttctatttcacgagagggacttcaacttcgtagtgttcttcgtcgacaaccgacaaatcgtctccttctccctagacaagaccatcaagctctggaacactctcggcgagtgcaagtacaccatctgcggcgacctctgctgcagcaacggccacaacgggtgggtctactgcattaggttctccccaaacacctttcatcccaccattgtcttcggatcctgtgacacacaccgtcaaagtctggaaccttaccaactg

SEQ ID NO: 100880 - DNA, 334 bp, Zea mays
  Clone ID: MRT4577_23514C.1
actctatagggactcaatataatcatcctccactgcctcatgatgtcacacctaacactgggacaccatctcttgtggtaatatccagcagtatcgtcacatgacattgtagatcaaacagcgcatagcgaacctcacgcacttggaaatcccctaaggtcgaggttcgtcacgtcaacaatgatcaagttacagtcctcgccgtctcacagcatattggtactacttcagaggacgatgttgccatcgaaggttgaggataccactttaataactgcacatgcggcactaccgttggttgctcctgctgaacctctgtgtcaaaccctcaagc

SEQ ID NO: 100881 - DNA, 339 bp, Zea mays
  Clone ID: MRT4577_23515C.1
tctgaggtcgacacggactcacgggcgcttctcacagacacaccaaacgatggcaccaggggctgactaccaggaggtggggtactgctcccaggaagtgaggtcatttgccccctcctgcttacgccgtcactgcggcggcggtcaccagcacctccacaaggagaatttcgaggatgtcgacacggtatcacgcgccggcgccgaccaccaccaccaccatggtcaccacggttgccacatctttgtggtgcgcgagaccatggtctaagaagacatcaacacctgctccggcgaagttcacgaacgcagggagagctttctcaccatggctaactg

SEQ ID NO: 100882 - DNA, 317 bp, Zea mays
  Clone ID: MRT4577_23516C.1
gtgtgggaacttcattccaacctttttcacccaaccaacctttgtacctatttattccaacaattaactctttctaagtctcctgatcaaaacctactaaaccacatgggttatgcgggtacaaccccagacactgagctaaaatatctttccgatgaccggtctaccaaatggcaaccacatactctcctacctttgtctgtacctctcaccgaatgataaaataaactgcttacgtatgtgcccaattttggagccaagataaccgaccctcttgttcaccctgttattttcctacctgaaccgacagtccattc

SEQ ID NO: 100883 - DNA, 1075 bp, Zea mays
  Clone ID: MRT4577_23517C.1
gttctctcctttgagagaagggaggaaagccgcaagcctgcagcgcaaaggaaagcacagcagcggcggtttgcaaaagagcccgccacctctgtctctctgccctgcgctgcgccgtccacaccactcatccggcaacctctctctgtctccactcgtacagtattaatttcctcgcgcctcctccgtcctccattttttttgttgggtgccgtgcgagctccaagtacccctgtctccctcccgtcttgcgggcttgcctttgcctgttccatttccggctcctccagttggtagtgtcgtttcaatgcgagacgccgtccttcacgagcttgattgcccttgaaagcgaagttggtgttggtgtcgttgccggtgaggaggaagaggggatatatggctcccacggaagaggcagcaggggaggacgagcggctgctgaaggatcttctcgcttcttcgtcagataaggaagcccatgctatatttgcaggagaggatgaagagagtacaaagacacagtccgatgaatctactaggggggattgtgataacggcgggtccgtagccgccttatcgagtgaagatgtcaatgataggcatggtagtgacagcaacagccaatgtgctgaatctgatggtgcttgcagtcaagtgcctggaacaggctccaagagcagcaacgatgagtgcggtgctgaagtgcctcaaaccggatccaagagcagtaatgatgaagatgacgggtgtgctgatgaaatgccaggagccctctccaagagcagtagcaatgacagcagtgagtgcgctgaccggagctctccgcgagctgtcctagatatctcagtatctggcagcatgggcttcggatgacaagggttcagtcgagcagtcagcagaatcaaaccaaaatgtgcagtggaggaacctgatcagcagtctaatactcagaagaaagaagtccatgggcagcgcagtgacgttccctcagagacccaagagcaaagggcttagagggtacttggagaggatgaggagtggtaagaaccaaatggactgcagcgccattgctcct

SEQ ID NO: 100884 - DNA, 358 bp, Zea mays
  Clone ID: MRT4577_23518C.1
attcccgtctgtacccactcatccacccactcttccttctacgatttcgattttcacaccccccctatgttctaggtgccagggtccttcttatccttcgctggctactatcaactaccattctacccattgttttgttctgtaacttttcctctctcttacttcttctcctcagtttctaatattatcttactacctacttactcatcactaatctttcttttccatcttattctccttttattatattatactatcaacatccactgtatcaacattctttaaatatatattctatgttatttacatgctaatgtaatgtcaattttaaaaaaattctttatatacattttacttt

SEQ ID NO: 100885 - DNA, 461 bp, Zea mays
  Clone ID: MRT4577_23519C.1
aattcggcacgaggctgattttactaacatgggttttgatctgaacactttgattcaagcaacagaagacctatcttgtttggaatcacctttcactgaggaaagaggttaattctattgttgcgtctttaccatctggaaaatctcctggaccggatgggtacaacactaactttatgaaatagtgttggtcagtcatatcatcagattttcacgctctatgcaatagcttttatgacgaaacaatttgaatgcacagtattaatggttccaacattactctactaccaaaaaaactcttcacctaggtctgtgaatgactattgacccatgtgattggtaaattcgagcgcgaaattgctaactaaaattcttgcgaataggctggaaaaggtgataactaagcttattgatgcggatgagtatggattgatcgagggcaggggaatataagggtgcct

SEQ ID NO: 100886 - DNA, 631 bp, Zea mays
  Clone ID: MRT4577_2351C.1
gccggccgggccgggaaattggagtcattggaagaagagacctgttctgccctatacgaacgactctctgataacactgaacctagaaaccgtgaatgagctctgagctagcgttacacaacgtgtgtgaccacgcttgagaggttcctgtagccctacctgagtaccagaggcatctatgagagatttactcgcggtatgtttcccctaggtctcagaaacgatgcaactcttcttggattgcgatgtgagagattatatttatcatggtgagaagattggcttgtaggacttcacagcctataaaacctttgtgtatagtgacgctggcaggtacacttggggaaatgaaggaatggtggaattatttgcaatggaggccatggacaaatcggtgatggtgaaccgcaacaaagatcatcgggcctgtatggcgagagcaatatactcactattggatcctccttttctcccgaaattatatacttcattctcagacaccgacacacgcttgtgtcataacagaattctgttctgccggagaagtatttgaactactccgtatgctggccatggaacttttcagagaagaatctgcaaagccttatgctgcacaggttgtaattgttct

SEQ ID NO: 100887 - DNA, 518 bp, Zea mays
  Clone ID: MRT4577_23520C.1
aacgtagacgcagtaccgacggaggaatcgtcgattcaaactttattccaaatttatccttctccggaaggacggcagcagtgccatgattgactaggatccaaatgcctaaccggggctattttacatcacatgggggaggatgaacactgcggaatacataggggcagaacaggacgtgaaacaactatgctagaaagcttagaggtagccgtattgaagcatggaagactgaaccgagttgtattcttaggaaatcttgcagttgatgcaaggctactgattgtacataactggagttgattcgcattcagcggtagttgcggtaaatggggctgtacatgcagctctctgcaaatttcaccaggtcctttggccgagggcgcctacttgccaaaccaagttcatatgccttcgctgcaacgttggctgcaatgtgggcagagatcttcctgatgtttgagaagggaggataaatgagccccttttcaaaattttcttctgtgacctgctgggcc

SEQ ID NO: 100888 - DNA, 392 bp, Zea mays
  Clone ID: MRT4577_23521C.1
cggggccgctcccccttcagggtctaccacgcaaaccccaatctcggggcgaccgccctagatcgagctacggaaatcccatctagccgccgccgcgatgtctcgccgctatgacagccgcacgacgatcttctcgcacggaggggcggctctaccatgtggagaacgccatggacgcatcgggacgccgtgtcaggcctcggaattctggcggccgacggggcacgcctgggaggagagaagaaagtgacctgcaacctcctccagatctaccgctccgccgagatgatgatcaagatcgactcccacctggccagcgctgtggcagcaatcatcgtccgacgccatcattctgatcaacaccgaccgcctgcacgcccagcgctccatgg

SEQ ID NO: 100889 - DNA, 360 bp, Zea mays
  Clone ID: MRT4577_23522C.1
gcgagtggcccagacgtcgcgactcgcgaggccgaggcgcggcggcagcgacgactccaacaaccacgcgcggaggctgcagtgctccagccaagtagcttttggtgtgctgaatccaacaccagctcctcctccctttgttatgtatcctgagatctccatggagggaacgcaagctcaggacacagttattacagtcacacaatatactgtacctattctatagtgaagctctgaatttcatttctttttaaatatttatacttcggctgtttgtattattgtagctaccatgaaaacagttgcttaatgcatctctagatcatttctattaaaaaaaaaaaagaaacctataaacaa

SEQ ID NO: 100890 - DNA, 462 bp, Zea mays
  Clone ID: MRT4577_23523C.1
atggcctcacagcagcatgcctgggctgaagcttcatccttttcgtcgtgtctgaagaatatcgtccggctgtcttcagggttcgaggcggctctcgacgagtccatcaagaactgcaaggcgcttgcccatgtggttgagcagaaagaggccgaccgcatggccatgtctgaggccatctcggccttctaccggatctttggccttgacgacgtcccctcgggcagctcccctagagtcgcctgcgggccttgggtggccacgtgcgcagcagactccgcggggcgctgcaccacgacgttaggcgggccttcgccgtccttgcttcccactatgacgtggatttggagcgggtcagcgagggctactgcctacctgatgacgaggacgccgccctggcggaggtctgaaggcttgatgcggctgccgagggcccaggcgcggcgttggcttcctttttga

SEQ ID NO: 100891 - DNA, 241 bp, Zea mays
  Clone ID: MRT4577_23524C.1
ccccaagcgaggcgacgaaaccctcgccagtctccaactcgaacctatttcaggcggcgtgagggagggagagttcgaggaccgaggcggcgtctggcgagaagaaaatttaagtcaagacactctagggcgcccactttcgagatcgaggcgagccccgatgcgtcggttgctggcgtgaagaggatcattttgacacctctcggggtgggggggggtaccgggcggaccagcaaatgct

SEQ ID NO: 100892 - DNA, 474 bp, Zea mays
  Clone ID: MRT4577_23525C.1
atgcagggtcgatggtgccgctcgtggcgcaggcagacgtgcgagcggggcgtcgaaaccacatgtggcatggatggggttgatggggccgagcacgagggcgttgaagacgcgcaaggtgcgggcaacggtgcgaggcgaggtgcctgggagggatgggtactcggggcagactcaaggacggagtcgagatcggttgggttgggaggagccagcaaggggaaacacatcttcgtcgaaaacgacgtgatgagagatgatgatgagatgggagctgaggtcaagacagcgataccccttgtggccaggggagtagccaaggaagaggcaacgagtggagcgtggagacaacttatgaggagctgtagcggaagtgttggaatagtagacacaaccgaacactcgaaggtgatcataggagggggtcgtgtcgtacagggcaaagtgggaggtggcatggctcaccgtgtttga

SEQ ID NO: 100893 - DNA, 1087 bp, Zea mays
  Clone ID: MRT4577_23526C.1
ggtaccggcggagccaccaacgctcggcttccctagcctccaacccttccggcgtctttctcctctctctaatctcctgcgcatgcctgctctgctcgccgcgcgccatggcgtctgcgctcggccagagctcctgcgcgccgtgatgctccagctcgccgtggagcttcgtttccccagcagccacgccctcgctgctcccttctcctctctgctcgccctcgctgctccctgctcacccatggagctcggccacatctccatctcccagcaagcgctctgctcccagcgtctctctgtggccgcgcggagctcctgcttggcgtccctctctgctcgttctcctggcggatctcgtccatgctgctctctctctcctgcccctccatggcgctcgcctggctcgccgcgcgcccaagcatccgctcacccctgcgcgtgcttcttccccatggcgagctcacccatcctctgctcgttcccatggccgtcgtgtgtagccgcgagctccagtcttcttctctgccccgcaatccatggcgcccggttgaagctccttcctgctcggcgcgcgcccgcctccctgctcccctcgagctcatcctgcccaagtccggttgtctactccttctctgctcgacgccgcggcagacgatgctgcattccggctggacgtcaagatccagtggaacctcgtggtggcggcgctggcggatggcgcgctgctttcgtgattcagcaacggccgacgcccagccccaatttcagcttccagctcgcctccctctatccccatgccgagctcggtcctgtccatctcgccacgctcggtctctagctgcctgtgcgcacatcgggttatggtcgtggtgatattgtggtgtggcgacgtcgtgcgtgtcacgacagctgtcgtggccgtgaggcagtccgcaccatagagttcgcccgaccacgatctcgctttactcctcgcgtcgtcgcttgccgagtccttcctcagtccgcgctataaaattcgctcggccacggtcccgtcaaattgtgaagctccctgccgtgcgcttgccagctcggatttcgccga

SEQ ID NO: 100894 - DNA, 284 bp, Zea mays
  Clone ID: MRT4577_23527C.1
cgatgaacattgaccaagcagcactgtcccgcatgaaggaaagcacaggcacatatacgcgaagcatgtacaaccacctcactatggtggatgtgaactatggtaggcctgcaacataaatacactacatgacattgggatgatcctaaagggattatgaatacattcgatcaacaacaaatccaagggaacaatggcccccatacaagcaggaaagcgtacgccagtccatatcgtacttttgcttccagctgagggccgtgaactggtacttcggctcggcc

SEQ ID NO: 100895 - DNA, 227 bp, Zea mays
  unsure (1)..(227): unsure at all n locations
  Clone ID: MRT4577_23528C.1
cgtcccgaacgttgctgtaagcnggcggttccttccttcgttgtgtctttcctgggagtcaccggagggctgcaaccagcgactgcggcgcgggcggcccggcctttggtcattaaggtccgtcgcgcaagagccggcacaggacgaggacatgcagtcgggtggtggttctcgggccctggccccggccacggccacgacgtcgaccagcggggccgagccgacgg

SEQ ID NO: 100896 - DNA, 654 bp, Zea mays
  unsure (1)..(654): unsure at all n locations
  Clone ID: MRT4577_23529C.1
cacacacacacacacacacangcgacgggggggggggcaggcggcggagaggaagcacggcgggcaacagcgggcgagcagccaccaagggagagaaacaagcacaagcanggccncaaaacccggcccgcggagccgcnggccagggcaagaccgcggaaacaacaaggacgcgcggcnggcggcggggggggngcgcagcacgcacaggnncgngaggagcgggagcggagagcgggaccngcacgccgncgccgcgcagccggggcgccnccnccgccgccccnacagccagcncgggaccaccgagccccgccaccagacggcccggagcaggcacaggancgncaacaagagccnggacnncgagcagggcgacagggagaggaacggggacgaccagagcccgcngacggcgcagcgcngcgacgcggggaacgcggcggngccggcgccgcanggggggcccgcngcgggnggcggcggggcggnngggcgggggggggggggggggggggggngggggggggggccggggggggccgcgcccgcggcggcgcggngggggggccgggccggcggcgggcggggggggggggcgggggggggccgccggcggcggggggggggggggcgcgcgnggggggggggggg

SEQ ID NO: 100897 - DNA, 297 bp, Zea mays
  unsure (1)..(297): unsure at all n locations
  Clone ID: MRT4577_2352C.1
cgaccccgagcnccgaaggccgcagcancaggcgcggccccccncgcgngggacccgagaggcgcngccgaancaggggaccgcngannaccccagcnncaagcncgncaccgncggcgacggnggaacgggnaaaaccacaccngngaagaggcancncaccggagagccgggggggagagangaaccaaccattggngnggaagggcanccggggggaggcaccacnaaccggggnaagaacagggcccaccgccgggacaccgcagggcangagaagcgcggcggccccaggga

SEQ ID NO: 100898 - DNA, 341 bp, Zea mays
  Clone ID: MRT4577_23530C.1
gcctagggggctttttttttttttttttcccgaaaagaagaatactgtatcacttaaggatggccagtagccgcgataacattgaacccaccgactatcacgaggtccaaacgaataaccaccacaaaagtaccaaccaaccacaaataaagtttaagcgcgcacaccgtaccaaatgacgataactcccggcagcaactggtgccagccagcaactgcagcacactcaagaatgacaacaaaccgcctagtccacctcctcaatctcggggacagggctgccgctgccgccaggggagccctcgcccatgccggcagagccgcccatgccataacccgcg

SEQ ID NO: 100899 - DNA, 853 bp, Zea mays
  unsure (1)..(853): unsure at all n locations
  Clone ID: MRT4577_23531C.1
attgggtacctcgaggccggccgggaatcttcaccgtccttcgaaagatatacacaacaaccatgaagtcaacaacgctattactaccgctctacactgctgccctcgcggcagctgtttcatcgcctcaagatcatcaagctgtgctccaggaccagcagcaggtcactatcgccgagccagatgagtatctcatcgagctctcacccggcgagacgcgctgggtgactgagaacgaaaagtgggagttgcgcaaacaaaacatcaacttcttcgacatcacgcacaacaaagagctcggcacgctgaaccgcaaggtctctgccgagagcgtcaagttccccgagaagcccatccaccaaaaggccatcgacccgctcctcaaggagctgaaaaaggaaaacatgcgtgcccacctggaaaccttcacctcgttccacacgcgctactacaagtcgcactacggggccgaaagctcagcctggctgctaagccaagtcaacaaaaccctcgtcgacgccagcgccatcaacgcaaccgtaaaaccgttcccccacccctggggccaatcctccatcatcgccacaattccgggaaaaagcgataagacgatcgtcatcggcgcgcaccaagacagcataaacttgtacttccccgccttcctcgctgcaccgggcgccgacgatgatggcagcggcaccgtcaccatcctcgaggncctccgcgtgctcctgcaatcccctgagatcctagcgggagaagcagaaaacacgatagaattccactggtactctgccgaggaaggcggcctgctaggctcccagcaatcttccaaatctatgagcacgcagac

SEQ ID NO: 100900 - DNA, 275 bp, Zea mays
  Clone ID: MRT4577_23532C.1
cggacgcgtgggcggacgcgtgggttggagaacggctatttaactgacgatggtgttttctgttctggtttaagcaactcgtcaagcggcaagttctccaaactgtcccgcatggccaggtcgtcatattcctcatcagacctgttgcagtcctcgtccacagacccttccatctcctcatcgatctccatggtgtcttcttcacttaggtcctcatcactccctgaattaggacggacatcagcttcttcttcctcttcttcatcactgccatc

SEQ ID NO: 100901 - DNA, 407 bp, Zea mays
  unsure (1)..(407): unsure at all n locations
  Clone ID: MRT4577_23533C.1
aacctccccggggaaaattacctcccctaaaaaaaaaagggacccctggggataccaaacccttccattaaccttaccccnggacattttatggaaaattctttttaaaaaccttataacttttactgaacccccctgaggggatccccatttttgaacctttcttttttgggggggcccaaaaaccccccccccgatttccccacccaacccaaccgaattaaaaacttaactttgggggcgatcccccaaaattttggagggttgtttttcccgttttttcgggggatgggcttttttcttttcattttctccccgggaattttgaaacccaaaaccttaaattttttctgccccctttccccctttggggtttttgggatccccccacccctgggtcccccccg

SEQ ID NO: 100902 - DNA, 289 bp, Zea mays
  Clone ID: MRT4577_23534C.1
acagaatctagtaaagattgagaaaaacattttttttgagaaaaaaaaaaaaaaaaaaaaaaaagaaaaaaaaaaaaaaaaaaaaaaaaaaaaaaaaaaaaaaaaaaaaaaaaaaaaaaattacatacaaaaaaataaaaaataatataaatataatataatgtaaactaaattgaatgaactggacaacgttttacaatggcaaaaaatgtaaaaaccctgaacgctaataaacttaaatgacattgcaccatataccactttctacatctgacataatatccaaaag

SEQ ID NO: 100903 - DNA, 489 bp, Zea mays
  Clone ID: MRT4577_23535C.1
agctcgcatctacctggcaaagctgaagctagccatgccgctagctagcttggctcctcatcgccgcgcgccggccagatgactgctcaccagacttgctgcgatgatgccgctgccgacggcactgaaccgggtgccccgtaggaggcgcctcacattgacgaggccgtctgtcctcactcttgatggacaggaagctaaggtagaaggctgccgccagcgaacgcccaatggcggcaacgactgagaagcgcgcgatggcataccaggacgaagatggaagcgctgaggctgcttgcgccactctgaggtcgagacacggctcggtgaccggtggagcggacaaacgagtggacaaactccttatgcacgcagtcagcaccatcctgcgcctctagatgcaaggcacagtgaggcagattgcggctcatgcactacttgaccggcccgaagattaatcttctctccatgaccaagagaacttccttc

SEQ ID NO: 100904 - DNA, 1099 bp, Zea mays
  Clone ID: MRT4577_23536C.1
ccggccgggaaaaaaaagcgggtgtgggaggttgggcaggagacgtttttttttccaccgtcgccgccgcccctgcttgccgctgcgcgcccccgcctcccacgcaggtcgtctgctccgaagccggtggccgaagctcgcgtcgccctctccctcaccggattcatcgtccgagccctcgctagagctcgtgacctcgccgtcgccggagccctcactctcactggattcgtgtcctcgccggagctcgcgctaacctgctcgaccacacctcgccgcccgcggccatctcacacccactccgcgcgaccgcggtcctctcctcacctatcggtcgttcctgtcctcgcgaggaagacgacgcctcaagctatcctccctccctctcgatctgatccggagtggctcacgttttcctattcctcgccagcggcagaggcggcaaccgtcgatccgtgtcaatcctctattagattggtatgagctgatcacccctggttgtgtagttccttctgcaatggtttactgcactcactgtgctgattactgcccctccataaaggaccctgacaaaggatacatatgttgtggtacatgtgggaaggttcttgatcaggaggtatacactgatgagcctacttttgttaaggataacacaggacagagtcgcttagctggaagtattcttgcaagcattgagtctggatattcgatttctcatcaaagaaccttagacaaaggtagggatgagattaggcagattgtcaataacttacatgtcagcggtggagaaactgtcgttagcaaggcttatcgcttctatgagctagctgtcgaccgtaattttaccaggggccgtagaacaagccatgttgcagctgcttgcctttacattgcctgcaggcaaagtaagaaggcttatcttcttattgatttctctgattatctccaaataagtgtttacgtgctaggtgctgtttttctccagctctgccaagttttgctactcgcggatcatccagttgttcagaaacttgtagatcccagccttttcatccatcgctttaccaaatgtttgctggaaaaaagagataatgct

SEQ ID NO: 100905 - DNA, 443 bp, Zea mays
  Clone ID: MRT4577_23537C.1
ctttttttttttttttttttttttttttttttttttttttttatgtattttttgcttgttctcttttggggaaaaggattttcccccttggttcacatattgcaggggcaaaatacagtttttttttaagctgcaacaattttggaaaacatgaccgattgcgggggaacttaaagtgtaacgagggtcccaccaaagtcttcccaataattataaaaatattcccccccccttttcaaaaaagatgttgcggggctcaaatgaaagtccaagccgcctttttttttaacgatgggttgaaaaactaaagccttttaaggaagagtataaaaaacgccttctcaaaaataatatttttttaaaaactcctcctaaagttgaaccccaaagggcccctgaaaatttcggtttttgacaattggggcccaaaaaaatgggggctt

SEQ ID NO: 100906 - DNA, 311 bp, Zea mays
  Clone ID: MRT4577_23538C.1
gttggatgaagcctaccgttccataacactctaactggagcgtagccctgatttgactgatcgcatcttggtgcactctcataatctggagccttctaatactgactggtgccggactgaatgaccagagaggcgaggagaacaattacttcggtcgctgctgctacgtagtgaatcacccggtattattcgcgggagcggtactaggcctccccatgctcgcgctaggcattgtatactatgtcccgctgtaatcatgcaaagggcctcctgcggcgcttgtaggaccccagaatcattgcatacatata

SEQ ID NO: 100907 - DNA, 512 bp, Zea mays
  unsure (1)..(512): unsure at all n locations
  Clone ID: MRT4577_23539C.1
gttcatccacctcgccagagcttcatgctgactcccaggatgacttgaccacctgagatgctgagagcgtcagagagcatagcatagcatagcatttcttggtgtcgctggatggatggggatgactggatcactcacccggaggcggatcagaaagagtactagctaaccactgccaagattccgccgcgcgcacggatgcatctgtgagcgagcttacacgccgcagagaatactagatcacggcgctgcacattccgggagcgcagctggaaccaagcggctaaggatcgatggatcaccaccaccatcatcaccaccaccatcaccatcacatgatcccgggacaagagccgtcggcgacggacggcgcagcccctgacagcttcttcctgggccccgccgcagccgtnatcttctccggaggcgccggggccggttcgtcgtcgtcgggcgccgtggccctcggatcctccgccgggggaggcggtgggccatctccgttcagctcg

SEQ ID NO: 100908 - DNA, 2504 bp, Zea mays
  Clone ID: MRT4577_2353C.1
cggccgggccgggccgcacaagcaaaggcgggggagagagctccgtgcagtcaccgtcgtgttcggaacgagcgagagagcgggagacgagtcgcggcgcctctgctgtgctgtcttcttctccccctctgctctgcttcggctcctcacgcggcctcgccgagacccgcagaacagggggttcagacttcttggtgagagcgatatgagtgtcccaggtcaatgctcatcccagccacaatttatcaccagcgttgggaggagtaaccgctccaatggccccggcactcctcttatcgaaagcatagatgttgatcaaattgttattccagagaaaaacagttggaagaacttattctcatacatagggcctggatttctcgtctcaattgcatatattgatcctggaaactttgagacggatctacaggctggagcacagtacaaatatgagcttctttggatcatacttgttgcatcctgtgctgctcttattattcaatcacttgcagccaggctaggggttgtgacagggaaacatcttgcagagcattgcagggctgagtatcccaaggtcacaaattttgtcttatggattcttgcagaacttgctgttgttgcatgtgacattcctgaagtaattggaactgcttttgctctaaacatgctgttcagaatcccagtatggtgtggtgttctaataactggactcagcactctaatgctcttattgctgcagcaatatggggtccgtaagctagaatttctgattgcatttctggtgttcttaatagcaacatgtttcttagttgaacttgggtattctaaaccaaatgctccagaagttgttaggggcctttttgttcctgaacttaaaggaaatggagctacaggccttgctatctcattacttggtgctatggtgatgccgcacaatctttttctgcactcagcattagtattgtcaagaaaagtgccacggtctgttcatgggattaaggaggcctgcagattctatacgattgaaagtgcatttgcccttacagttgcttttctcatcaacatatctatcatatctgtcagtggttctgtctgtggttcaggtaatttaaacccagaagatcaagcaaattgcagtgatctggacctaaataaggcttcatttttgttaaagaatgtccttggaaactggagctcaaagttgtttgcagttgctttgttggcatctggtcagagttctacaattacggggacatatgctggacaatatgtcatgcaggtttttggaacttataccttatttcagttctagttcgcaagttgaatggcaggttgttttatgatgcatattactcgaggcatttgatgttgatcagaagtaatcaagcatttgcttgcttgcaacattagtttgtttagctgttagatatgaaaagtacagaaaataaattagtacataactcttagatttgcaatgaacaagcttgggcttatgagtttcagtgccaacctccaaggttctcttggtcagctagattgcagagaaaaaggacagatacggggggtttttagatcttcggatgaaaccctggatacgcaatcttgtcacgaggtccttggctatcctgccaagtttgatcgtgtcaattattggtggttcttcagcagctggccagttgattatcattgcatcgatgatactgtcatttgaactcccttttgctttagttccactccttaaattcaccagcagcaaaacaaagatggggcagcatacaaattcaatattcactgctgtgctgacatggatgatcggctcgtttattgttgtcatcaacacctactttctgataacaagctttgtgaaattgctcgtccacagcgggctgaccaccatttctcaagtattttccggtattttcgggtttttgggcatgctgatttacatagttgcgatcctatacctcgtctttaggaggaacaggaagtccacccagccattgctggagagcgatgctgagcttgcagtatcgggtagcagtgctgatgccggagcagaatgctcgctgggccatttgccccgtgaggacatctccagcatgcaacttccgcagcagcgttcagcttctgatctagattagataacagctgccaggaaaataaatgttttttttgttttttatatagtatagtaattacagaatagggtacgtcaggtattggcttctgttcatcctactgatgatgcttaaggaatgtatacaagaggacggatatctatgctgccaaacaaaaaaatggggcacaaaagaatttagtgcctgtttttgggaagtgatgtgaactgaatcctggaaggggcaaaaaaaaaaaatgttggaatccaattgttgaaaattcttcattctaaacatgaggccgttggtaaaaaatgtctacatgctgtaaacatactatattttgacattattatcacagttaatatatactggacatgctgtttt

SEQ ID NO: 100909 - DNA, 337 bp, Zea mays
  Clone ID: MRT4577_23540C.1
acgcggtaccggtccagcgccgtctccgaggcgtagcccgccaaaacgcgccccgcgtagctgcagatgctgataacggacacgaacgtgttgtcgctactggcggtgcaacccagcgactatgcgatctgacccatgttgtctatcgacatgagagtaaaggggacaccgaagattgacggcacgaacaggacctgcatgttcacactcaccagaacccgcaggatcgtataatactgcagacgcgccgtgatactgtacatgtgtcctcacgcacgcacagaacgacgacgtccccggcagatgctcctgtgcccgctgctgatttgcattgttg

SEQ ID NO: 100910 - DNA, 270 bp, Zea mays
  Clone ID: MRT4577_23541C.1
acgcaccattacctttatttactacacagcgcataataacccgatcgacaccattacggtgtggttcattgcccttggtgtcctggctcttgctgcgagcgccaccttcacgcatacaatcggccggtgtgacatccagccaccgccgccgggtcatctaccgaagacggtgcatctgccacctcctgttcacctgccacctgcgatgcatgtagaacagacggaccacctgtcgtcgccgttccacctgccacctgcggtccatgtgca

SEQ ID NO: 100911 - DNA, 564 bp, Zea mays
  unsure (1)..(564): unsure at all n locations
  Clone ID: MRT4577_23542C.1
agggggacccgccagaccatgaaggcagaaaccaggccgcagcccagcccggccagaggagacccgaagaggacccagcaaggagagcgcgccacggccccaacgagacgacggcagaggcacagagcaccaggccacggcgcacccccagccgggggaggcgaagagcaagagcacgcaaacaaaaaggagcccaacaggagaacgccgaaggaaaacgcacaaagggacngcacccacaccgacacaaccggcgaagccgccaccgcagcacaccaaaccgaaggngcggggaacgaagaaggcaagggggaaagcaacagagcaccagcgcgacacaaccaaccggaaaggagaccggacggaagcaaaccagacaagggagcgaanacgcaccanangaacaacaacggacgagagaacgcccaaggaaaaggacacggacgcacaaaggagacaccccccacggcccacaagacagccgaagggaaccaaagaaggaggcacgaacccggaaggaagaaggacgacagaaaccncaacaacggggggcaggaaaacggc

SEQ ID NO: 100912 - DNA, 396 bp, Zea mays
  Clone ID: MRT4577_23543C.1
cacagcaaacaaacacatgccatgccaaatattccacggatttaaatttttaaagggtccaggcttgaccttgaccacgcaagttctcccacagaaccaagacggtgctaaaaacatgaaaggaagttccaacaaagttacagataaaccgaaccgccagaccacagcaacaggccgcttggctcggttcaaaatcaattgagccgggccacagcgaggtgttccttctcttttatgcgaaattccagccggtacaccaaacatttcagaacccaagaccggagcaaaagatagtggcgggcctagtcctcctccgcctccaccttcaggtcctgcagcttcgagccgagaccagcatccttcccattatcgtccccatactttgcctcatcatca

SEQ ID NO: 100913 - DNA, 619 bp, Zea mays
  unsure (1)..(619): unsure at all n locations
  Clone ID: MRT4577_23544C.1
caggnaccgagnaggatgtcaaagatggtggtncatgaccacgcgttaattctttggcagttcctcaaaagaaagcatctttacaacaggatcctaagcatcccaagacaaagaagtctgctgcatcaaagtctggttttgacatgtacacagaacaggagcattcaccaacatctctgcgggcagaaaggcagattgaagaggtgaaaattgaagaagagagctgtcatctagaaggttttgttttggaacctaacttggaggtggtttgcgcccttgaagtgccaaagaattttaaatccaacaagctgttgaggaatgctgaaagtaaggaaaatgagcatgttggtgttggtagtcctactggaaggattgctgttgaggccgcatctgatgttgtattaaacatgagtgctgaagaagagagcagagaatttaagaagtcaaaaatcatgacaaaacaatcactgactactggttcagagaaaagggataataaaattgtccatggaaagcctgacaagcaattgactggaaaatcatctgcagggttttctctcaatcagaaatctctgacaggtagcgggcagcacaagatggacagtagtgctgatacacg

SEQ ID NO: 100914 - DNA, 352 bp, Zea mays
  Clone ID: MRT4577_23545C.1
ggcattggaaccttacaccattatacaagacaggccgaccaaacaattacactttagggctatacaagaccaaaacgatgaaggctaggttttagatattgactatacaaggtatttattttatttgactactcgaaacattattaatcggttgaggtcttggtatgaaaatggggacaggaaaaaccggtctgagggttttttttggggcaacaaatatgagggaactcttcacaggagaagcattatttacataaactttgttccccgaccatgccctaacaggctggggttggggtcccatcacctggaggggacctttttcttttgcttttggcccacgaggataacc

SEQ ID NO: 100915 - DNA, 381 bp, Zea mays
  Clone ID: MRT4577_23546C.1
gggaattctttatgttgtcatcgtgtatgtttagtaggcataaaagaagaaaaagcatttttctatggagattcatgctgatggcataaatctaactacaactataaaagggaagcagtacaacaactcttgtttgattaagtatatccttgattcatgactagagttttgttattaaatcgttgaaaattcaagctattgccttttgtgttcgctgacattatggtttgtgtttagcaggtactcgagtgaaaaagatttcaccatagtcaggtccatggttatgacaaatcatagttgtctgttacattacatcgatgtaatcttcacgcaagatctcaacaatgtttggttggttacttacaccccactctacattaa

SEQ ID NO: 100916 - DNA, 668 bp, Zea mays
  Clone ID: MRT4577_23547C.1
ggccctaggggccttttttttttttttttttgttttattttttttttttttttttttttgctgaacagaaggaataccgcatttcaactgccccatttacggttaaccccaaaattggcccagtaaaacttaaaccaaaccggaaatggaaatgcaaaaaggacacctttggagccaccgaagaaaatactggtcctatatgaatcggcataggcaaaaacattggcaataaggtgccccattggaaaaaaaattggccagaacgtgtcctcatacacagcagggtaattcgtctggctaaaagtccctcaccatggccgaaacaccaaatgaatcgcccactttctcgcaaacgaggacctggcacggggactaggccccgccctgggctatgccatggttaaacacaaacttcaacgcagaattgtttgttccacctgcatattcaggagggcgccgcgtatgaacgagggttctgactatgactcttagtattggctcttgctcagccgcaaaaaccccagtcaaactccgcctccttagacttggctttagaaggggcaggacttacaaccgagccctgaagctgggcctgaaccttggaattagacctggaccgctgccagaaaaggtgaaggaaatcgtaactgttgacttaaatttgactg

SEQ ID NO: 100917 - DNA, 208 bp, Zea mays
  Clone ID: MRT4577_23548C.1
caacaaaaaccagaggtgtattcggaccatgcatatattattggtgataccagacatgagggagagggcctgtttacatgctttattactttataagtatagaaagggatggatgacaggacatttcccaaatatgaggaatcaccaatagggcatgaatggcacataaaaacagccacaggggttggtggcggaagttgggcagttg

SEQ ID NO: 100918 - DNA, 293 bp, Zea mays
  Clone ID: MRT4577_23549C.1
accaccacttactctcgtgcgctctccgtgggaacgaagactcgcagccggcggcagcggcaggttctcctagatctccggcatcatcagtaacacatggctgacggtgaagacattcagccccttgtttgtgacaatggaactggcatggtcaaggctggttttgctggtgacgatgcgccaagggctgttttcccaagcattgtcggacgccccgtcacatggtgtgatggtcgcatgggcagaggatgcgtatgtggtgacgagctcatcaagagtgtatctgatttgag

SEQ ID NO: 100919 - DNA, 1658 bp, Zea mays
  Clone ID: MRT4577_2354C.1
cttaaaggaaatggagctacaggccttgctatctcattacttggtgctatggcacaatctttttctgcactcagcattagtattgtcaagaaaagtgccacggtctgttcatgggattaaggaggcctgcagattctatacgattgaaagtgcatttgcccttacagttgcttttctcatcaacatatctatcatatctgtcagtggttctgtctgtggttcaggtaatttaaacccagaagatcaagcaaattgcagtgatctggacctaaataaggcttcatttttgttaaagaatgtccttggaaactggagctcaaagttgtttgcagttgctttgttggcatctggtcagagttctacaattacggggacatatgctggacaatatgtcatgcaggtttttggaacttataccttatttcagttctagttcgcaagttgaatggcaggttgttttatgatgcatattactcgaggcctttgatgttgatcagaagtaatcaagcatttgcttgcttgcaacattagtttgtttagctgttagatatgaaaagtacagaaaataaattagtacataactcttagatttgcaatgaacaagcttgggcttatgagtttcagtgccaacctccaaggttctcttggtcagctagattgcagagaaaaaggacagatacggggtaagcttaggtcaccaccattattaatgtctcccattatttaatacagtacgctgctaattgtcttcccttgtctcaaataacgcgttgaatcattttaattatttttattgttttgcctaaaggaaaactaagtaatcaaccaagcattttggacttgtgaaacttcatttgctatatactaacatttactcacctaatctaggggtttttagatcttcggatgaaaccctggatacgcaatcttgtcacgaggtccttggctatcctgccaagtttgatcgtgtcaattattggtggttcttcagcagctggccagttgattatcattgcatcgatgatactgtcatttgaactcccttttgctttagttccactccttaaattcaccagcagcaaaacaaagatggggcagcatacaaattcaatattcactgctgtgctgacatggatgatcggctcgtttattgttgtcatcaacacctactttctgataacaagctttgtgaaattgctcgtccacagcgggctgaccaccatttctcaagtattttccggtattttcgggtttttgggcatgctgatttacatagttgcgatcctatacctcgtctttaggaggaacaggaagtccacccagccattgctggagagcgatgctgagcttgcagtatcgggtagcagtgctgatgccggagcagaatgctcgctgggccatttgctccgtgaggacatctccagcatgcaacttccgcagcagcgttcagcttctgatctagattagataacagctgccaggaaaataaatgttttttttgttttttatatagtatagtaattacagaatagggtacgtcaggtattggcttctgttcatcctactgatgatgcttaaggaatgtatacaagaggacggatatctatgctgccaaacaaaaaaatggggcacaaaagaatttagtgcctgtttttggg

SEQ ID NO: 100920 - DNA, 322 bp, Zea mays
  Clone ID: MRT4577_23550C.1
attcggctcgagcaaccgcatactctaggtatttgcacacaaacacgacctgagaggcactctctgctcgcacgaagacggcgtatgactgtggctgcacgacctaaggaacaggatcgctcacatacaggggacactgagcgctccacgggagcatctctactgaccgctcgactgggttgagtaacaccctgaagcagctgcttgaatcgggccacggaactacagtcgctggccgctgacatcatacccagagcaagtgaaccaaacgcctaagtacactgacaagctggccacaatagtatgctccaaaccaagccca

SEQ ID NO: 100921 - DNA, 1701 bp, Zea mays
  Clone ID: MRT4577_23551C.1
ggattaactacttattggagatgggtttgtctaagaaagatctgtgctcaatgatctctaggttttccccacttctaggttacagtatagaacttgttatgaaaccaaagcttgagtttctgctaagaaccatgaagaaaccacttaaagcagttgtagaatacccaaggtacttcagttattcacttgaggggaagatcaaaccgcgtttttggctattgcagagtagaaacatagactgcactctgacagagatgttagcaaagaacgatgaactctttgctgaagagtacttggaacttggaggattgctcgagaaacctgtacaatcaagcataggtggttaatttctggacttatttgaaccatgcagtgcactatgctgaagctgttcagctttatgcttggattggtgaggctgtttttcagatgggaggccacttttttttcctgaaaacgaaggagagctgtgtttctttgtattcaaatgtcgtggctctgataaccattgcagttgaatctcacgttggtaaaggtattaacactcttttctggaccgataaatggctgcttggttcctgtatcggagatgtggcgccagctgttcttgctatggtaccagcaaaaataattaaaacaagggctgtggctgacgcactctcaaacaacagttaggtatcaaatattaatggaggactgtccatgattggtctgttcaattttttcagctatgggatgccacacatgaagtttctttaaccattgatgatggtcgccatatctggagattctctggttcggttgaattctcggcgatatcggcctatagagtttcttccatggtttggtctcctttgatccttggaagcgtatttcaaaaacttgggctccacctaagtgcaagattttcatttggctagctgtccgaaatcgctgttggactgcagaccgattgccttggagaggactggcacacctagttcattacgttctttgcgacctggaagaggagaatattaatcacattttgttttcctgtgttttctcgagggttctggtttagagttttctcccggctggggtatatttattgaccatgtgttggggtcccaggagcaatcgtttgcagattggtggtgaaaggcttgcaaatatctcccaaaagaaagaaaaaaggaagggcatggattcaatgattatgttgcgaatatgtggagtgttctgcatgctctcgaagatgaacaacatctctggtgtcttgctgtaagagttttgttcttgtccggagtgcaagcacagcccctcacggctctgtccggagcgagggtaaagtttgtacgggaggccacttttccggtgcttagtatcaaaaaggtaatacttgttctcatgaaagtcacctaacggaagttacaggtgcaaatttagattgatgagtgatgttgttaactcaatacagcaatgcattgggtattgggaaggtgatgaagaaattagttttcgccatacgcctcagttttactaatgcttcgtttagatgtcgatattggaggtcatgtaattgaatttgtttgaataccaaattaatcatagtatagtattgaaatgaaatgttatcccaaaaaaaaaaaaaaaaagggcggccgccgactagtgagctcgtcgacccgggaattaattccggacccggtacctgcaggc

SEQ ID NO: 100922 - DNA, 554 bp, Zea mays
  Clone ID: MRT4577_23552C.1
ctcaaaacccaatgctttgctgttttggtattgagtcaacaacatcactcctcaatctaaatttgtacctgtaactttcgttagggggctttcatgaaaacaagtattaccttttttatactaagcactggaaaaggggcctcccgtacaaactttaccctcactccggacagagccgggaggggctgtgcttgcactccggacaagaacaaaactcttacagcaaatagaaatgaacagaccaggaaacgccacctaaccgctcagggagcccaagcctaaactctgcagtccttgcactccagcgagacaccagagatgttgttcatcttcaagagcatgcagaaaaacactccacatattcggctgcaaaccttccaagacgcaggcatcgcgatgcttccataggatccaagctcccaacataatcattgaatccatgcccttccttttttttcttttgggagatatttgcaagcctttcaccaccaatctgcaaacgattgctcctgggaccccaacacatggtcaatataccccagccgggagaaaac

SEQ ID NO: 100923 - DNA, 815 bp, Zea mays
  Clone ID: MRT4577_23553C.1
attgctattgtggttgttttctgcatttcatttcaccatcaccggtcctcctgtcgccggcgtgtttcctccgcggcaactcctccgccccactggtcggccggcgagcacgccactgctacggtctgttcgctcatatccaccccgcaccggcggctcccagatcccactccacctttgcctcaaccttgcaagctctgcagagcgactcgaatagttgaactaagcggcgccggcagagtaactgaggccggcgtggcaacttccccgatcggccgtcccgccggtggagctgctacttttggtaaggcccccatcccccctctacagacacacaactcttgattacacgagaaacagaacgcttctctaaccagcacgcccgtagggtgcttgcgcaaatgccacttcggcacatgcttctccaagcgcggcagcgctggtctcagccgcctccacggctctccgagctacttcatgtcttccgctcgctctctattctaccatccggagcctcggccacgccaccctgccgctctcctacgcaaattcagctgccccagaccttgccttgctccgatgccaacccacttggcgtgggcttccacattgacgttgttgatgacgacctctggcccgcttccttcggcttctcctcggatcccacgccgggtgaccagtgtcttgataccttccaagaacatggagaagaacacatgcacgattcggatgatgagatagatgacatgaggcaccgcaagcagctcttctacaagctggacagggggtccaaggagtttgaggagtataacttg

SEQ ID NO: 100924 - DNA, 802 bp, Zea mays
  Clone ID: MRT4577_23554C.1
gccggccggtccgggagcaagccagcagcacaagaaccagagtccatagacatccatcaagccaagaagaatggcattcctcagcacgaacgcgttgatgagcgtccccatcacggcggcagccgctcctcgccaccgccgcagcttggtcgtggtaagggccgcggccgtcaaatctaacgagcacctgcaggaagagcaagcatccgtggccgacggagctcgtgggcgtcgccgagccatggtgttgttggccgccaccgctgctgtcactggatcatccgtagccatctgcaggtctgctagagctgcaggtgtcaccacgctgagcggacagtatgtcaaaatagagaacgtcaaggacccatatgtccagggtgtcggcgaatgggctgtcaaggagcacaacaggcagactggtgagagcttgcagttcgccgaggtggtcagtggcatggaacaggtggtcgccggcaccaactacaagctcaacctcgcaaccaaagatccaacgtcgtcttaccaagcagttgtgtttgatccgttgccaaactccagcaaaaatcgccagctcatgtccttcaagtctatttgatctctctctctcacgcctgcgtgggttgcagaataaatgtgtggccttgtatttgtgatgaggaaataataatggaataaatgtgtggccttgtatttgtcaaatagtcttgtactgtcgtttcaatgttttttttttcatgtgagccaagttttccatgtacgactttctctcagatatcatagatttgtatattatatatcccac

SEQ ID NO: 100925 - DNA, 507 bp, Zea mays
  Clone ID: MRT4577_23555C.1
ctaactcaggagcgtgacaatgactcgagaccaatcaagggtggtgcagatatcgagctgatgcatcgcatctcgtgctgaagcatgcatgagtttatctggatccatggatctgctgaatgcatggacaaagtggagcctgacggcgttctatcaattgaatcctcctcgccttttgagaccactgttgaagcgtgaaaaaggaatggagattgaccgcggccatatttctcttttatttgtgcacacccttgagaaatcaattgtggagattgagaattgtaaggatcttattactgatcacaagatcacaagcatagaggaaatccttccgattttggagaagaccacacaggtgagagcccctctgttcattattgctgaggacattactggggaagctttggtaactcttgttgctaacaagcttccaggaattctcaatgttgcagcgaatacggctccagaatttggcgaccggccgaaggctgcaactcaggacattgc

SEQ ID NO: 100926 - DNA, 539 bp, Zea mays
  Clone ID: MRT4577_23556C.1
gggtacctcgaggccggccggggccccacgagttcttcatggtgatgtagttctggccatacgacgagccgtacccgacggccgtcagctcatggtggagctcgacgctgcaggccccgtcaaacaccccctacagtgcagccagccagacgatcggtctgctagagctgcaggtgtcaccacgctgagcggatagtatgtcaaaatagagaacgtcaaggacccatatgtccagggtgtcggcgaatgggctgtcaaggagcacaacaggcagaccggcgagagcttgcagttcgccgaggtggtcagtggcatggaacaggtggtcgccggcaccaactacaagctcaacctcgcaaccaaagatccaacatcgtcttaccaagcagttgtgtttgatgcgttgccaaactccaccaaaaaacgccagctcatgtccttcaagtctatttgatctctctctctctctctctctcacgcctttgtgtgttgcagaataaatgtgtggccttgtatttgtgacgaaataataatggaat

SEQ ID NO: 100927 - DNA, 192 bp, Zea mays
  Clone ID: MRT4577_23557C.1
tcctgaggagccgccctcctttttttaataaatgaactggtacgcaattcaacatgagggacgttttttagagggtagaaggttatacattctgctcaatagatccaaggtttgatccctgagaagccacggtttgattttttttttttgcgcgcggaacgggggagggctgaccggcagacttcttttacc

SEQ ID NO: 100928 - DNA, 571 bp, Zea mays
  Clone ID: MRT4577_23558C.1
ggccgcttttttttttttttttttgttttttttttttttttttttttttttttttttttttttttttttttttttttttttttttttttttttttttttgggaaaaccaaaaaggggttatgggattccccaagaaaacataaaaaaaggggggggtccttgtccatttaaccagctcccgacctaacaggggttaccaaatttgctttctaaaacaagcccataggggccaaaaaccaaccccttggggggtatccctttggcccccaaggggccccccgggggggactcgaacctccaggggggggggagcttcttggtccccttggaatagcgggcaaggggggggaccccgccctaaaaaagaaagaggcctaatttgggggcctgggccttcccgttcctttccaaaagcttaccaaacggcccgggctttttaaaggggaagtagaaatcctcccggatttccggagccaacccaagggcctggaggagggggggagaacttgttaccaaccacctttttgacaagcgggaagccgggctggtcacggggcaaaacaccaatttg

SEQ ID NO: 100929 - DNA, 511 bp, Zea mays
  Clone ID: MRT4577_23559C.1
ggggactcatctcggttcactggggaaagaaaacgggaaaaaaagaagaaggccaaaatagaacacgactcaattacagacagacacgaggtcgacgacggttagcttcaaaagcgcgcgttctcgaagtcgagagcttcaaaagcgcgcgttctcgaagccatgcaggtcgctgacccggttcatagacttgcgcatgatggccaccttggccagttggtccgccgcgcgccacgccgacgtcggggtcagcgccttccctgccccgggtgacccgcgcggggtccccacgggcaccggggtgtccccgtttccccttctcctgccgctcctcgacgtgggggtcactacctcctcatgctgatgctggctgttgccacgacgccaccgcatgtcgcttagctccgtgtccaggctgcccaccagctcatgctgctgcggcgtcactggcgactggagaaccagcgcccgggccgactacaggaggtggatcgccgtccccaggtcctgc

SEQ ID NO: 100930 - DNA, 391 bp, Zea mays
  Clone ID: MRT4577_2355C.1
gtgagagcgatatgagtgtcccaggtcaatgctcatcccagccacaatttatgaccagcgttgggaggagtaaccgctccaatggccccggcactcctcttatcgaaagcatagatgttgatcaaattgttattccagagaaaaacagttggaagaacttattctcatacatagggcctggatttctcgtctcaattgcatatattgatcctggaaactttgagacggatctacaggctggagcacagtacaaatatgaggtgcctgctgcttcagtcttatgttcccacttcttctttggatcataccttgtgcatcctgtgctgctcttattattcaatcacttgcagccaggctaggggttgtgacagggaaacatcttgcagagcat

SEQ ID NO: 100931 - DNA, 345 bp, Zea mays
  Clone ID: MRT4577_23560C.1
gctcacctactgtgaggcggccgtgcgtttttttacgcaaaaaaatatttcttttacaaaaaatggaaaacgctcgacaaaaaaaaagaatagcgtggggctggcccctgtacatttggctagccctgtaaagctaattgccccccgctgtaccccaaattaacccaagttgttaccctccttctgggccccgcttgttaaaccgaaccttaaagaacctccttgcttgtgtgcaaaaccagcttgccccaacaaatgcggcttaacccggggccgcttgagtttgcttccgggcccgggcgtaatttaagcttactattattattcccggggcgaattgggggt

SEQ ID NO: 100932 - DNA, 404 bp, Zea mays
  Clone ID: MRT4577_23561C.1
cggtttgcaagcaattcgacgaggatgagctctgccatgacacgggcacgcttgaggggcttgcagggctactcgaccgaaccaatgctttgtctagcggcaaggtcgtgatacctgacaatgctggagagggtggcgtgacgaggatctggatcgcgcatggagaacaagacggcatcaccagctaccctgcctctaaacgtctgttcagtgccctacaagtcaaggacaaggagttccagtcgtacgcgggatgctaccatcgcttacatgacgagcctagtcctgataaagacgccttccgggacgacgttgtcaactggatacttgctcgcgcgacagacccttggggcgaagatagtgcatagccaaggctataaatatttgtagaagctttcttaaac

SEQ ID NO: 100933 - DNA, 551 bp, Zea mays
  Clone ID: MRT4577_23562C.1
attcatttaataaaaatttaatttaattatttaatcctttcgtactaaaacaaattaatttttaaaagatagaaaccaacctggcttacaccggtttgaactcaaatcatgtaagaatttaaaggtcgaacagacctaatacttaaaattttgcacctaagattaatcttaattcaacatcgaggtcgcaaactaatttttaaatttggacttaaaaaattaattacgctgttatccctaaagtaactttttcctttaattaaaaattttaattcaaaaattcattaaataatggtaaattttaaaaaaaggttattaattttttttatcaccccaataaaataaattataaaaataaaatatttataaaaccaaaaaaattaaaattaaaatttataaaggtttatagggtcttatcggccctttaaataatttaagcttttttacttaaaaataaaattttaattatataaataataaaggttatttctcatcaaatctttcatacaagtcctcaattaaaagactaattattatgctacctttgcaca

SEQ ID NO: 100934 - DNA, 280 bp, Zea mays
  Clone ID: MRT4577_23563C.1
cccacgcgtctgcccacgtgtgctttcactttttcgaccacgcgtccgctagcacataagtgggaccattaaacgccttgtgtcacggacatacaatagaccacactccacgtctgagtacgaattgataatgttatgtgttgatcaactacatgacattggctgacacccacactgaatagacgagattatcggtattgtttggctacgtaatcttatatttcgttagctgaatgattccttattggaatacttcctatgtttactgtatagataatca

SEQ ID NO: 100935 - DNA, 430 bp, Zea mays
  unsure (1)..(430): unsure at all n locations
  Clone ID: MRT4577_23564C.1
acccggggcggacccagccgcccggccaaagaganggagaagccaacccccagaattttcccacacaaaaacgcctcaacccgaagggggaagaacccaagggcccccaggcgggacctcggaaggtggagggaggtccagggggccaccaaaagggacgcgggggggaacctggagaggccggccaggggggaagaggcaatgcagggggcggcggcggccgagaagacaattggcacccccctaaacaagccgaaccgggacggggggcccccaaaagaccgaacgccaaaaaaagggcgggcgaaaggtttaccccggacccggcccaaaacccaaaacccaaggggaaacggaaccagggggccaagagaaatttcgggccaaaaaggtcacccgacaaaaagaaaggaaaaaaaaaaaagggggg

SEQ ID NO: 100936 - DNA, 213 bp, Zea mays
  Clone ID: MRT4577_23565C.1
cccttccgacaagaagctggagctcttatttttcgtccgaagtggacatcctggggcgcatcctgcacaggggcatggtgaatctcctctgttgcctctcccgcgcggagaccaagctactcttttaccagttcattggcaacaccagcctggaccactgtctgcacattcacagcaagctgttcgggaccgcgactgtcatggccagcgccc

SEQ ID NO: 100937 - DNA, 753 bp, Zea mays
  unsure (1)..(753): unsure at all n locations
  Clone ID: MRT4577_23566C.1
cccgggtgccantnctcaacaagcagagnagcaacggcgaacatggggtactacctgcagaagacatactacaaaacggcatcattgatatcaaatagttgcaaggctgttgctattcttgcagggcacacaactgaggtctcggtgcttgcatatgaatatggtcgaaacctgttaatttggtgcatgcagggtctagccttccagttaattgatgatgttcttgatttcaccggcacctctgcatcccttgggaagggttcattgtctgatattcgccacggaattattactgccccgatgctatatgcgatggaggaattcccacaactgcaagaagttgttgaccggggttttgataatcctgcaaatgttgaaattgcccttgactatctccagaagagccgtgggattgaaaagacaaaagagcttgcacgagaacatgctgatcgtgcagtcaaggctatagaatctctacctgatagcgacgacgaggatgttctgacttcaaggcgtgctcttattgatatcacagaaagagtcatcacacggacaaaataggaaggtgttcggcgtccataagccaaaaccccaagttttgtgtatcattgctgaaatttaggattaagaaatggccctgcatttctgggaagcttctagaggttttggctgcatgtggcaacaaaatatatgtcaccgattgcaatggcaccagatatcgggtagccatataagtgtgggagcattgtaccc

SEQ ID NO: 100938 - DNA, 1369 bp, Zea mays
  Clone ID: MRT4577_23567C.1
cctatgaaaagaaaaatacgcgagttcttttttatttgattcgctgccctacacgcgtccattcagtaacttagttttttgcatcaaacaacgcatcacacatctttcttatcaaaatataaaaatgtctgagttcttttctactttagtttcttctctacacgcgtccattcatacaattatattttcacgcacatattcacatgcaggcacatcatcgaccgaatacgtaaataaaataaatcacgaatcattcaaggtgaacaacctgaccgactcgcgtcgcacatgcatgccattagtttgggatctttgccgacgagcgatgcgcgaggcgtgatgtcgacaagggcatgggttttgacgacggcacgtaggggctgcacagatcgacggcgggtggcccgatctagcgagcacgacgcaacggagggcgtcgctactactgctgctttggcattacatcgagcacgccgagggcacgacgcaagggagatccacgtggctgcgcgaactggcgtcgcggctgctgcgcgaggttgacgactattgacggggcgagcgttggggaaacaaacgccatgggaggctccctgctgctgtggtccggcgccgacagaggagctcgctgccgggagagggagccgagcagaggtgtcgctgcagggggaagctgtcgaggtcgaagcaccaggcgtcgagcacaccaggggaaaggagcaggacgattggtggccatggagaaagggttcggctgccctccatggaaccaaacaggagcagaggaagacagtgcgtgttccaaggggatggcgaactgcacaaaataaaaaggggaggccgacctggggaggatggcggccaggtggggctgcacgaggaactccacgacatggcggggatggccggatttggggcgaagaagctctgggcgagcaggggttgggcgaattggatctggcctggagatggactgcgtggggaagagctttctgcgcctagggaaaggaaggggtggcgctgggcagaggaggccagctgggagatgtggcgccatggatctgatggggggaaggggcgcctgcaccaagggagctcggatccggcgcatcacggtggggaagaaggatgatcgagctccacggtggctacacgaacctggctgcggacaagcgcgcagaagctatggcctgtggcctggtgtccagggctggtgcaccagggaggccgccatgggagaagctcggcggcatgggagcttggagctcctgcgctggcagaggaagggggaagacgccaggagggagagcgatggcgtgggagcgtcagcagggaaatggcatcccggccggcctcgagggtcccaatg

SEQ ID NO: 100939 - DNA, 361 bp, Zea mays
  Clone ID: MRT4577_2356C.1
cttgaccgctgtcatcagacgcctcgcgtgcgtcaccagagatatgtccacactgtgcaatgaagaacctctttagctgagcataggtccttcaatgctgggtcctttagaatacaaagcatgctgaatgatgacggcactatgtaggcttggtctacgttgagacaatgaggagacttgggccacgcctgttgggtgagatggccttgcttggctgcatctataccggagaagggatcgctgtttcactgctcagaatagtctcatgcttgtcgatggacacgtggacaggcacgagaccttcttattggatcagtttcagaccacatttgatggtaaaggcccagacttggttacgaag

SEQ ID NO: 100940 - DNA, 1885 bp, Zea mays
  Clone ID: MRT4577_23570C.1
ccggccgggatttatttttgcaccttgtaaaggaatttgtttctgttgtatcaaccctccctaaagacccacatcttcgattaatgaagagtaaaaaaaaaaaaaaaaaaaaaaaaaaaaaaaaaaaaaaaaaagtctctgactttttctacaagctcattcttcctcccccgatctcgggagcagccgaagcatgtcctggcggtggactctcgcgcgccgcgtcgccacgctggccgcgatcggtggcggcggtgcccaggcgcagaggctcctgtccacctcgtcagccggcggtggcactggcctcctgggtcggcactacatacccctcgcctcccagattcggagcaaggtagttggttgcagaggagctgctcttgtgagctccagatggttgcatgaggcccaataccaggttcgccaggacggggcttccagggctcaggaacagcaagatccatttgaattagtcgccgatgagctatcacttcttgcaaataggttacgatccatggtggctgctgaggtccccaaactggcatcagcagctgagtactttttcaaggtgggagcagagggaaaaagattccgacctacggttttgttgctcatggcatcagctctgaaatttcctttgtcagagtcaacagaaggaagagttctcagtatattggcagataaactccgcacaaggcaacagaacattgctgagataactgaaatgattcatgtcgcaagccttctgcatgatgatgttcttgatgatgctgatactaggcgtggtgtcagttcattgaatctcatcatggggaacaagctttctgtgctggctggtgatttccttctgtctagagcatgtgtggcccttgcagcacttgggaacacagaggtggtttctctaatggcaactgctgtagaacatctagttactggtgaaactatgcagatctcaacaagcagagagcaacggcgaagcatggagtactacctgcagaagacatactacaaaacggcatcattgatatcaaatagttgcaaggctgttgctattcttgcagggcacacagctgaggtctcggtgcttgcatatgaatatggtcgaaacctgggtctagccttccagttaattgatgatgttcttgatttcaccggcacctctgcatcccttgggaagggttcattgtctgatattcgccacggaattattactgccccgatgctatatgcgatggaggaattcccacaactgcaagaagttgttgaccggggttttgataatcctgcaaatgttgaaattgcccttgactatctccagaagagccgtgggattgaaaagacaaaagagcttgcacgagaacatgctgatcgtgcagtcaaggctatagaatctctacctgatagcgacgacgaggatgttctgacttcaaggcgtgctcttattgatatcacagaaagagtcatcacacggacaaaataggaaggtgttcggcgtccataaggtgaatggagagctgaacctcgcctttggcctagtgtttcacttggattttcttttttgtatacttcggttcattgcattcttttcgcagccaaaaccccaagttttgtgtatcattgctgaaatttaggattaagaaatggccctgcatttctgggaagcttctagaggttttggctgcatgtggcaacaaaatatatgtcaccgattgcaatggcaccagatatcgtgtagccatataagtgtgggagcattgtacccaatatacactcccgtaaagactaagatagtactaccataaaatatctgttaaccgttcctcttcgaaaaaaaaaaaaaaaaaaaaaaaaaaaaaaaaaaaaaaaaaaaaaaaaaaaaagggaa

SEQ ID NO: 100941 - DNA, 1420 bp, Zea mays
  Clone ID: MRT4577_23571C.1
ctcgcgtccttctgggatcgcctgcagccgccctcgagactgaccagagacctgctatggggccttgtcctcggcgtgacggtgtcgatctcgtcgacaacgctcgcgctgctcacgcagagctggaggcggaaacagtctatcgcgaagatccctcctaggccgatcgaggtccggagtgaggaggtagtcgatggtgtcattggtctcatcggaaatacaccgctgatacggatcaactcgctgagcgacgcgctcggcgttgagattttgggcaaagccgagtttctgaacccgggtggctcggtaaaggacagagtagcgctcagaatcatcgaagatgccgaagagcagggcctgctgcacccaaacactggctcggtgctgttcgaaggaacggtgggcagtaccggcatttcactggcaacggtcgggcgtgcaaagggctatgactgctgtatcatcatgcccgacgacgtcgcagtggaaaaggtgcaggtgctggagaagctgggggcgaaagtcgagcgggtcagacctgctagcatcgtggacgagaagcagtttgttaacctagcacgggctcgagcgctcgcatttggcaaagtcgatatcacggattcgacccacggacaccctcacggggaggacctggttgtcaccgcgcagccggacgacatcggtacaggggaagacgatgacgtggtcgtgccgagctctccgactatgatcatccgcgacaaggtggctagcttgatcgatgccacagtcagccacaagccgcgaggcttctttgcggaccaatttgagaatcaaagcaactattgggcgcattacgatggaacgggcccggagattttgcggcagacgggcggtaacatcgatgcgttcgtcagcggggcgggcaccggcgggaccatcgcgggtacgggacagtatctcaagacgcatgtgccgggcatacaggttgtcttgtcggatccggagggctctgggctgttcaacaaagtcagatatggcgtcatgttcgattccaaggagagcgaggggaagaagagacggcatcaagtcgacacggtggtcgaggggatcggtatcaaccgaattacgcacaacttcgcattgggcttggacatgatcgacgacgcgtaccgagtctctgacgaggaagcggtggccatgtctagatggctggtcaagcacgacggcctatggcttgggtcctcgagcgcctgcaatctcgtcgcttcggtgcggcttgcgaagcgcctatccagcggtagccggatcgtcaccattctgtgtgatgctggatcccgccatcaaagcaagttctggtcggacgagtatttatcgcgcaacggcatcgcccatgactctgatctagtatcacgattactggatgcataaatcgtcaagt

SEQ ID NO: 100942 - DNA, 563 bp, Zea mays
  unsure (1)..(563): unsure at all n locations
  Clone ID: MRT4577_23572C.1
cacatacaagggctattatgttgctgngattgatgctgtgaaaaaaaaaaaaaaaaaaaaaaaaaaaaaaaaaaaaaaaaaaaaaaaaaaaaaaaaaaaaaaaaaaaaaaaaaaaaaaaaaagggcgagaggttttgaaaggtttccaaggtttccatctctcgtgcttgcgaacttcttaacttcttttttgggggctcgctaaatccatttctctggtccgctgttttacacctttacaccctgggaaaatccttggcgctttcccattttatatccttttgcggcctcttccccttttcccccttttggcgttttgcctaaaaggcccagaccgctcgcctttcccacttttgcccatcctgattgccgattgggacccgccctgtaccgggtctttaagccctgcgcgcgtggggtttacccgctacgtgcccggtacccttgccacttccctagcccctgttccttgcgcttttttccttttttttttcgcctctttcgccgtttttcccctttaccctttaaattgggggctcccttttgggttccggtttagggtt

SEQ ID NO: 100943 - DNA, 459 bp, Zea mays
  Clone ID: MRT4577_23573C.1
acaatctttgtaagtgggaaaccattttattacactgaggtttattttgcagcagttgataaagtacttcgggggggggcgtggattaaatcttgagaaggatatagaaactggtatctcatcggggtatgccttttgtgtttaccaagatctttatgtcaccgtcattgcctgtgctgctcttaatggcatcaaaaaaggggacacgactcttactgttaggagggcaaaccacggagactcactgcctatgccagagcaagaaagcatcctgctgcaggctcattagcaggtgcaaatgcacaaactttggtaccacctcggaggtgccttgcccacaaaagttgtctgcctgacacaagccgtgacgccctattaactgatagacgatgacgaattctatgacctttttgacgacatgaggcaagaaagacgcaaatttgttcccacataattgcc

SEQ ID NO: 100944 - DNA, 567 bp, Zea mays
  unsure (1)..(567): unsure at all n locations
  Clone ID: MRT4577_23574C.1
ggagtcgtgtcgtccccccggccccgacccccctccgtttgccacgactccggtctgcactggcgcgctcgctcccttccctcccacgcaatggtggccgatcgcctccgcctcgcgctgctgctctccgcgtgcctctgctccgcgtgggcgcgcccacgcctcgagccgaccatccgcctgccgaccgagcgcgcggcggccgacgaaaggaaggaggacgccaccgggacccggtagagacaatcacaacttcaacacgaagaaggagaacaactacaaggacaaaagcgtcatcgctctctgagacgatagcttggagaggagaggggggggcaacaggagcgggatccacgaactggtcgacgggggggaggcgctcgcgctcgagttttttctaaacatcacctctggagaacaaggcagggcgctacgtaagctggaagatggaagtttncagagcctactacgcggctacggagcaaagaagaactcgtgcctcccaagagaccagccgcacgttctcagcggggatctgaaactgcggaggcccgaagggaaacaagt

SEQ ID NO: 100945 - DNA, 279 bp, Zea mays
  unsure (1)..(279): unsure at all n locations
  Clone ID: MRT4577_23575C.1
cagccagacaggaccaaaacccaggacccggggagaccagaacggagagccngcccccaccaggcacgaaacacccattttgggggggggggacaacgccagccagccgacacccaaagagaggctgcgagcagggagacgaggaagacccagactgagagggcccacaactacaatacagccccggacgatgagcccaccacaagccccagctctggaaaagagccaacccatgccactgaagccaagcccgcagccgcacaagaagccgagcgcgcc

SEQ ID NO: 100946 - DNA, 349 bp, Zea mays
  Clone ID: MRT4577_23576C.1
ataaaaatgtccaagttcttttctacttcagtttcttctctacacgtgttcattcatacaattatattttcacgcacatattcatgccatcgactgaatcgtaaataaaacgaaatcacaatttttctaaagcgaacaacctggctgactcgtgtcgcgcatgcatgccattagtttgggctctttgccgacgagcgatgcgcgaggcgtgacatcgacaagggcgcgggtttcgacgatggcacacagggctgcacaaagcgacgacgtgaggcccgacttggcgagcgtgacacagcgaagggcgtcgctgctgctgcttgctgcggcattacatcgagcacgccga

SEQ ID NO: 100947 - DNA, 300 bp, Zea mays
  Clone ID: MRT4577_23577C.1
gttcctggtgacgacaagacagtaggcacgtacagtctcagacgcgttgcacacagccattcccgtcccgccttctgcgatcacagacagtgtgggagagcaggcctccgaaatcgtcctccgcagagagacacttgcacgggtgtccgtagagagactgctcgcttcgtccgctcgaccagcactgatcaagttcctcgtcgccgtcgccgttcgtggaactgcactgcgtacatctgcctgcgtcgattgtgtacgactacatcgaacatacacacaaaatgtctcgtgtgaatggag

SEQ ID NO: 100948 - DNA, 417 bp, Zea mays
  Clone ID: MRT4577_23578C.1
gccgttgctccaatatctcccagtcgtagggaacatgattccgattcaagtgatagtgacgacgaaacacttctgcttgtcaatcttcttaccctcaacattgaggctagacgccttcatcgacgatggtccggattatctcgtcgcgtcattcgcagggatcattttgctggagaaaaccttatccaccatcactacttcgggcccaacccggtgtatccatcgcatgtgtttcgtagaaggtttcgcatgagtaggcctctgtttctccgcattttgcaaggacttcaacggtaggatacttactttacacaaagggttgacgcaacatgcatgccaggactcggtcccctaccaaaagtatgtgcggcaatgcgcatacttgcatatgggttaccttctgatgcgcgagacgag

SEQ ID NO: 100949 - DNA, 716 bp, Zea mays
  unsure (1)..(716): unsure at all n locations
  Clone ID: MRT4577_23579C.1
cattgggtacctcgaggccggccctgcccccagcccttcgcgccgccgccgccgccacctccctctccgccggtcgccagctccacctcctcgcgctccgctcgggcctcttcccctccgacgcctactgcgcctccgccctcctccacatgtaccaccattgctcccgtcccctcgatgcccgcagggcgttcgacgaaatccccacccccaaccccgtcattgtcactgccatggcgtccggttgcatgcgcaacaacctcgtatataccacgctctctatcttccgctccatggtggcctctggttctgcgggagtggtcgacgaggcggctgcactggtagcgctctctgcatctgctcgtgtccctgaccgtggcattaccggtggtattcatgcacttgtctccaagattggcttggacgggcagacaggggtagcaaacacgataatagacgcgtatgcaaagggtggtggtcctgacctgggggctgcgaggaagctctttgatatgnatggatagggatgtggtgtcctggaacacgatgattgcattatacgcgcagaatggactgtcaactgaggcgcttgggttgtatagcaagatgctgattgtgggaggtgatgttagatgcaatgcggtaaccttgtcagccgtgctattggcctgtgcgcatgcaggggccatacaaactggaaagcgcatccataatca

SEQ ID NO: 100950 - DNA, 923 bp, Zea mays
  unsure (1)..(923): unsure at all n locations
  Clone ID: MRT4577_2357C.1
cccacgcgtccgcccacgcgtccgcccacgcgtccgcccacgcgtccgccttcattgattgattacagcccgttcatccttccttcccccgtcgaatcccaccttccttcccccgcccgttaagcagccgagtcagcagcaatggcggccgtgctgaggagagccgtggcgcagtgctgggcgtcgtcgtcgtcgtcgtcgccggcgacgttcgggctccggcggttcctgcaggagcagccggcgttccgccccgccgtgccgcccgaccgcttcatgcccctggccgaccggatccgggacctcggggtcggcgtcgcattcccgcggatcaacctcgacggcctcgtgccgcccgcgccggcgccggngccggccaagcgggagccggacgcggcgctgcccgcggcgagcctcacggtggaggaggcgcgcaaggtgctgcgcgccacacagatggaggcggcccgcgcgcggattcgggagtccggcgccggcgccgttccgtacgccgacttcctgcgcctctgctgcgacgccgccggcccggacgcgggcccctccgtcgcgcgcgcgctcgacgagtccggatccgtcatcgtgctcggaaagaccgtcttcctcaggcccgacatggtacgattctcgccccccgtctccttatctatatactactgctcatttcaaatccattcaccagcttaaatgttgtttgatccctctacaaattttccccttgtctagcttttgcttttgtttttgcagttatgatctcttaaaagagaaaaagacacgttggtttctttacttctctcttgtgtgctgataatttctttccgggcgaccgggtagagatttcatttggaaaccacagagatctgatgagactttccgcgtgttttttttctatgtttcccaacagg

SEQ ID NO: 100951 - DNA, 187 bp, Zea mays
  Clone ID: MRT4577_23580C.1
gtcaattaacagccaacacctacgcgaaccaaccagatgcggctgatcattcacacggactcgattggctactctggaggaatctgaggatgaagacgggttgagccgccagagctccgcctctagaaaggcatctctaatgagcccggcctgctaatgccaccaccggcttctctatcagaagaca

SEQ ID NO: 100952 - DNA, 619 bp, Zea mays
  Clone ID: MRT4577_23581C.1
agcagtggtaacaacgcagagtacgcgggtgtctgtctgttgcagccgtatgctgattacatgaagagcttcagggagaacatggcagacttcttggatgctggtgtcgttgtggacattgaggtgggacttggccctgctggcgagatgaggtacccatcgtatccccagagtcagggatgggtgttcccaggcgttggagaattcatagtgagttctctttccaaaaacaaatattcttctgtatttttttattgcaaaacaaaaggggattcatctccatctgttgggcagagacagactagtcttggtccatgcgttggtttctgctggaagcagtcacaaaagaaatgagagaaaaaagtataaaagtggctaaaatcaaaagttctcttggatgaagtaacaatttgactgatcaggacagcaatgccttaaaattcgtactgtgcttttcagaagaatgtcagaaacaaagcctagaccacatcaattgagaaaaaataccagatgaaatcaaatgcttgataaactaatgacaaggaataaataaaagcaagcttccttcaaaaaaaaaaaaaaaaaaaaaaaaaaagtactctgcgttgttaccactgct

SEQ ID NO: 100953 - DNA, 311 bp, Zea mays
  unsure (1)..(311): unsure at all n locations
  Clone ID: MRT4577_23582C.1
cataaaagttttggcatttcttgtctgctgcccaccggccgagtggaatgtttcttccgcctcccgtctatttaaatatataaaaccaaacataaaataacaaaaaagaaaagcccttgccgctgttttccggccagcagggggggggaataaagtagagagggtaagctgcctcatctgcaaatagatntgacaaaggaaagaagaacaagagttgagcaacattgtcatgtgtgaaacccatccgttttgaccccctantgaaagttaaactccgtataccgctgcctggcccatagtatgcacattcc

SEQ ID NO: 100954 - DNA, 537 bp, Zea mays
  Clone ID: MRT4577_23583C.1
agataaacatcacatcctaatttattctcaaaaaccactctttggaaatcatcttcattcaatgcagagtacgaagaatcatcagcttttttcatgttttcaaggggaccctcgctttttgttgacgatttattttcaagatcaatctgtcttctccatgaaactaacgtttctataagcagctcaagatttgcagagctcaggttagcatttaaaggacttgttgcagcaacacgaatcctcttaccaactttggaaggagggtgttcactggtatcatatgtttcaaacttgaatattccatcaaatggctcaacaaagggttcccatgcctccaagtgtctattgaatgtggatgcagcaattgaacagatcaatacagcattcaatgtctcaaatcttccatgtgttgcaagatttatattagcgattgttgtgtcaaaaagtggtgtgaccattccacaagagctgtcaagaatgccaaccgacaaacaacccagcttcagctcagcagtaatgttttcacgtgccttcggc

SEQ ID NO: 100955 - DNA, 304 bp, Zea mays
  Clone ID: MRT4577_23584C.1
gtacaatgcatgccttaacacaatggctacaagaattgctacagtgtttgcatcattgagggaatttcctcgtgtgcactatcgcgtagccaggacaatcgatgcatctactctgacgacactacgagatttggtcccaacaaagcttgctgcttccctgtggaattcccttgtcagatttaagtcaacgatacctgaatttccacaaacagaaacatgtgaactacttattgatgaccggtcaatagatcagattgcacccattattcatgagtggacgtatgatgctatgtgccatgatcta

SEQ ID NO: 100956 - DNA, 673 bp, Zea mays
  Clone ID: MRT4577_23585C.1
atgggtaccctcggagccggccgccacgtgacctacggcgccgaggtgtcggcggtggccgacaagggccggctcaagaagatcacgggcgtcaaggccaaggagatgctgctgtgggtcaccctccacgagatctgcgtcgacgacccgcccacgggtaagctccactgcaaggccatcggcggcctgtcccgcagcttccccgtcgaggccttcgaggccgagaaagacggcgacgcccccgctaccgctccagccgctgaggaagcagagagcaaggccgaggagaaggccgacaaggaggtgagctcggccgatccggcggtggtgcacgccgaggcgctggccgccaagaactgatgatcatcgccgacgatccatatccatgcatcccatccagcagccgtacgtgcacggcgcacctacctaccctgctacccaccgggccatgcccattattactatttactacgtactactgtgtcgtctcgtctgtcgcattatattccttattattattattcacagcaaccacatcgtcgagaccaaccaactgaagggaagcacaaaccacccgaaaaaaaaggaacaaagaggacgatgatctactgcatctatatatgtatcccacaacatatatataattttgagcatgcgcatgccatcacccttt

SEQ ID NO: 100957 - DNA, 462 bp, Zea mays
  Clone ID: MRT4577_23586C.1
agggggaaagaacccaagccttttttcggatggccggggacggttgcatgcgtattttttatttgaaagctctggggacgggaagggaaagatcggcctcattctttttatcaaggcgcctgggggggcctgggggccgatttcacccaaagaacgaacaggggttgggcgaaaatcccgggggcccaaagcaccgccggggacaaacacaatggtggacggacctttttcccttgggagaacctttggggggcgcgccacggtcagaccaaccactttatggcaagaatttttgggcccccccccttcgactccttatttcggggattctaggggttctccaactggccggacccttagccaattggttcaagggacaggaaatcttgtttgctgacctctttggccgcgaggttgaacccgggaaatatgggatcggtcctgacggtttcccactttttc

SEQ ID NO: 100958 - DNA, 775 bp, Zea mays
  unsure (1)..(775): unsure at all n locations
  Clone ID: MRT4577_23587C.1
ccacgtgtcctacggcgccgaggtgtcggcggtggccgacaagggccggctcaagaagatcacgggcgtcaaggccaaggagatgctgctgtgggtcaccctccacgagatctgcgtcgacgacccgcccacgggtaagctccactgcaaggccatcggcggcctgtcccgcagcttccccgtcgaggccttcgaggccgaggagccggcgccgcccggagccggcggtgtcgttcccagggacgcggaggaggagggggacaagaacccggagcaggaagcggcggccgagaaagacggcgatgcccccgctgccgctaccgctccagccgctgaggaagcagagagcaaggccgaggagaaggccgacaaggaggtgagctcggccgatccggcggtggtgcacgccgaggcgctggccgccaagaactgatcatcgccgacgatccatatccatcccatccagcagccgtacgtgcacggcgccacctacctgcccaccgggccatgcccattattactatttactacgtactactgtgtcgtctcgtctgtcgcattatattccttattattattcacagcaaccacatcgtcgagaccaaccaactcaagggaagcacaaacctccaattccattcagaataatcatccacgcatcatgctatatatgtaccctcttttatttattttttctctcccttctaaaaaaaaaaaaaaaaaagcggacttgaattanagttacgtatacgtacgtccaagagtacgatcgacc

SEQ ID NO: 100959 - DNA, 1000 bp, Zea mays
  Clone ID: MRT4577_23588C.1
cggacgagggggcccggctgcagccccctgtcggtggtcacccaggaggatgaccaccggcctcatggtggggagaagcaagccaggctgcggcttccctcctgccctcagcttcaaggatgttcatcatcctcgctggggcgggaggcgcgtcgagccggggttctgcctcccacgtgggccagcggcccacttctttctccagcattcgagggaggagaggggttcaccagccacgcgaaggaggcgaacttcggctacgcggggccggccaggtgcaggcgctgacagctgccgcgtgcctggctcttggcctaggtggccctgtcgccgcctccgacgctgcctcctgccgtttggtcggggcgtggctgtccatccaccatacgggcgacggtcgcgccgtgcgcgggtctgccacacccacggcttctcccgcgccgccagccatacgggggaccgtccaagacgtcgcacgctgcgggagtggcggcagcgttcttggatggtctagtcctcactccgtgggaggacaggagcgaggaccttttgtgcggaggtggccgtggtcgtcggtgctgaggtggtggctgccgcttgcagaggtggttgcctccactgccgagactattagggccacctgccgctgagtccctgactctttggctttaatggcctcgttgtcgcccccttagggagacgggacgaggacctttcacaccggcgctcaccctgaggtggtcgctgctgctggcgtaccgctcggagcagaggtcgttgtcgctgctgatgcagaggtggtcgctgtcgccggcgattcgtcgatgcagaggtggtcgccgccgctggtgaggcagcccggagccagcttctagcgcgactcttattggttgcagcgtggtccattcctgcagagatggagctgggtcccgtttgtaggggaatgtatttgcttggaagcaaaatgtataacatatgtatgcagggattttagcctgag

SEQ ID NO: 100960 - DNA, 417 bp, Zea mays
  Clone ID: MRT4577_23589C.1
aagatatgatcactcgcggacgatccacatgggatgcatccagcagccgtacgtgcacgggcgtacctacctacccaccgggccatggcccattattactatttactacgtactactgtgtcgtctcgtctgtcgcattatattccttattattattcacagcaaccacatcgtcgagaccaaccaactcaagggaagcacaaacctccaattccattcagaataatcatccacgcatcatgctatatatgtaccctcttttatttttttctctctcttttaaacttgctgctgttatttgttatttgaaataaaaaaaaaaaaaaaaaaaaaaaaaaaaaaaaaaaaaaaaaaaaaaaaaaaaaaaaaaagggcggccaaaaaaaaaacaaaaaataaacccaaaaataccggggc

SEQ ID NO: 100961 - DNA, 278 bp, Zea mays
  Clone ID: MRT4577_2358C.1
cggccccccttgggacccctcccactcttaaaaaacgggtcctttcccccttaacagggtgcccccaccaaggtttaaaggggggcccctccggggggccgggagggctccttttgcccgatcgttgcctaagggcgctcggcccggccgtgtttctgaaatgttttttgcccctggggggaaaggttatccttcccctttgttgcgggggggcctgcctcccgggtttctttgggggtcggggccttgggcgggcccccgctaagggggaatgcccc

SEQ ID NO: 100962 - DNA, 1269 bp, Zea mays
  Clone ID: MRT4577_23590C.1
gcttcgcaaacaccgccttcccctcccggctctcctctcccaaccctccgaaccgagcgccagcctcgtatcgaccttccccccctcggaagcagcaaagctagagacgatgacgctgacgatcccggacgaggtgcgcgccaaggcggaggtgtacgtgggcgacgcggcggggcaggagaagacgcggctgctcctccaggagacgggcctcccgagcgggctgctcccgctgcgggacatcatcgagtgcggctacgtggaggagacgggcttcgtgtggctccggcagcgccgcaaggtggaccactacttcgccaaggccggccgccacgtgacctacggcgccgaggtgtcggcggtggccgacaagggccggctcaagaagatcacgggcgtcaaggccaaggagatgctgctgtgggtcaccctccacgagatctgcgtcgacgacccgcccacgggtaagctccactgcaaggccatcggcggcctgtcccgcagcttccccgtcgaggccttcgaggccgaggagccggcgccgcccggagccggcggtgtcgttcccagggacgcggaggaggaggagaaggaggagggggacaagaacccggagcaggaagcggcggccgagaaagacggcgacgcccccgctaccgctccagccgctgaggaagcagagagcaaggccgaggagaaggccgacaaggaggtgagctcggccgatccggcggtggtgcacgccgaggcgctggccgccaagaactgatgatcatcgccgacgatccatatccatgcatcccatccagcagccgtacgtgcacggcgcacctacctaccctgctacccaccgggccatgcccattattactatttactacgtactactgtgtcgtctcgtctgtcgcattatattccttattattattattcacagcaaccacatcgtcgagaccaaccaactgaagggaagcacaaaccacccgaaaaaaaaggaacaaagaggacgatgatctactgcatctatatatgtatcccacaacatatatataatcttgagcatgcgcatgcaatcaccctccaattccattcagaataatcatccacacgcatgctatatatgtaccctcttttatttattttttctctcccttttaaacttgatgctgttatttgttatttgaattaaagttacgtatacgtacgtcaaagagagtacgatcgatcaaaaaaaaaaaaaaagcggccaaaaaaaaaaaaaaagcggcc

SEQ ID NO: 100963 - DNA, 1410 bp, Zea mays
  Clone ID: MRT4577_23591C.1
caggagaccttggcactgcaagatttgtcctgctttcgatgctctgcttggtgtactgatccgtctactattcctgcttcacgtgacttgtggattgttgagtatgttcaggttgttgagggcaatgttggagaaactatggctctagctacccaatcactattagtttttccgttgccttccgaccgaacgattctaattcacagtctggtcttcctatggattctgtgaatgacggtgatcaaagtaatggccactatggacatgccaatcagggattgtctcaggggcttggtgcatttgggggtgggagatcttgcccattcctgagggatgggcgtaattcatccttgggacgcgcagctagagaccgttcagggacttgccagccaccagttaccaaccaggggacagcttgccagatatcgtgcatcgttgacacttctgaattacgtaaaattgctgacccacttctggattgtcttcttgctgattgggagactcgtcattcgtccatgtttcatcaatcgtccaggattttcattgatccctgttgtttggatatgaggatggacctaggaggttttgggccacaatcttcgaattggttagggatttctacagccagtcgggattggaatgggctgcaattatggccacctataaattatttgaagcaatttctgactccatgtagggaccttgggtatctaagagtaaatctaagtgggttttctttgccatctgggatggtctatggtggtgcaacaacagtcaaaatcttctatcaacggcgtcgaaaaaccactgctggaaataaaattgctacaattaatgatgatgataatgtggaggctcatgctttgagattgggcttggatgttgatgtgacagcggttactccgtctgaccccccctcggacgtcgaaggagctgctgatactccgtctgagaccatctctagatttcacgggccattattattagagtacaatggaacaacgaggagggctgatgcagactcaactgttccactcaggcctgaggtggtagcctctgatgacagttccatgcagaattttggggattcatgtgagtcctcattggatccgtcatcttctatggaatctagaagaagatcattcatggctaagataacaatggcaccttcgcagctccttgctgctcctgtcctccccaagcggtcaagaggtgccacaaaatatggtactgcgctacgacggagccgacgggttgcaggggcaggggtggaatttaacatgcaggatctggagaacagagccacaaaacaagtaatgcggactctgaaagtcatcacagagaatgcatgcatcaaccagcaagctgtttttttctcgaacacgcaggagagctgcgtatcattatatt

SEQ ID NO: 100964 - DNA, 511 bp, Zea mays
  Clone ID: MRT4577_23592C.1
gttcaataataaagttttttgtctgaaaaaaaaaaaaaaaaaaaaaaaaaataaaaaaaaaaaaaaaaaaaaaaaaaaaatttttttttcgataagaaaccaccctaaatgaaggattttttttgcttttctccaccccccttttggggcggtttttgctttttttcttccccctggggccccttttggcttgctttttgggggcccattggccctttttttgcgtcgtttttcatttaactgcccggggtttcccctccttgtgcttggggaagcccttccttttcccacctttttgggttttggggaggtccccctttctcgggtttgttaaatattgagggggccccttcgtgtgggctttccccccgttgcggcgccttttttggggcgggggcgctccttgttccccgcatttatgccccgttgtttggggggttcctcccagcgggtccgttttttttgcctccttcctttggcccgttcttttggttttcttcccttccttttt

SEQ ID NO: 100965 - DNA, 785 bp, Zea mays
  unsure (1)..(785): unsure at all n locations
  Clone ID: MRT4577_23593C.1
ccgggaatctgaaggcaatggatagaatataggacatgttgtagaatctgtaccgttgggccatgaggaaagtgagaaaagtgggttgatagattggtgattggtgtaaaagattgagatcagggattttccttagtctgaccttagtgcttaacagttcacgagtactcaagagcagccaggcacctatgaattctccattggtcccatcctcatgtgcccgtttgtttcagagatttcagtcctgaaagttatgaatgaacatgttgtattttgtgagcatcagctcacgtgattgccattggacaaaaacgtgataaaagtgttaatacttcctatttcaatatgttttgtccattcggtgtcattactctaataggaaagacaaagcagagacatggagaagttgaacacaagtattacagcagtacagcactggacaacaaaattaatctctaagcatggtcttgaaaccattagcttctttgatttttttttctttgttcaccatgacgggaatttcttacacagcttcatattacagataagtgatcaagagggaggaccaccgtacaataatacagttgctgagtaagagtattcatccccttgccatcatgtaataatttatttacaatatttattgttcttggtaacatggctgctttatttttgacaaaagaaaagaccttgtcggtttctgcattgttaaacaaaaattgtagcgttattntctctcatttttttactggtgnctgataactgtncctttccgaaacatcagc

SEQ ID NO: 100966 - DNA, 259 bp, Zea mays
  Clone ID: MRT4577_23594C.1
cgacccactcttcctgaccatccacattcatattcaacctattacttcaagtatagagtatagagctctacacggacgattatatttatacattttaaccaaccccaccaaaggtttcaaaatcacccaatgactccaaagaacataagaatgcaacactcaaagatcctaagaaagcaccaaatgattctaaaggactgaataaagcgcttaaagatcctaaagaacattaatcattccaagacccaaactaacatac

SEQ ID NO: 100967 - DNA, 843 bp, Zea mays
  Clone ID: MRT4577_23595C.1
ggcctggatcttggcggcgcgcggggtaggccccggcggctacgcgggcgcgggttccacccgccatggcggttcagatccggacacctccgacgtgggcgagcgcgagtgcccccggcggcgcggccttagcagcgtcaactggccaggcgcggcggcctcggccctgcggcgggcggccccgttgcgggcgcacaaccccagcgaggctcggcggccatggcgtgcgtgcagccaatatggcgaccatggcgcgcgcgggaccggcggcgctaagccccaacgacgcgcgtggccggcgctcggcgcggcccgcggccaggtcggcgcgcgcggccgacgcacggcgcagcacgcggctgcctcctcggcacaggtggccttaagcagcggccacccccgctgggcggttttccatgccgacgcggcccctggtacgcagtggcacgaacgcgcggctcccctcggcggcggcgcgggcagtagccccgacgcgtgaccctgctgcggcacgggcaggccggtggtcccagcgtgcacgaggtcctttgcgtgggggcagccagggaccaacacagatccagcgtggacttggctggcacaaagacgacatgcagaaaatggagcatgcattgaatgccatgaggaacaatagatatcgtacattacttttgttcttgatgtccaaacctctactgttcctctttctccaacaacaagttctttcttttctggcgagcaaaagtgctgataacgtgttagagcgcagtgaaaacgagactcgagagaatagagaaaatgacagttgtcgatctttattgcagagattctgggttatataaa

SEQ ID NO: 100968 - DNA, 429 bp, Zea mays
  Clone ID: MRT4577_23596C.1
gcataaacacgctagctttattgacatccgagaccagcgtgcaacgcaacgacacgtaaaacggttgctcaacggccgtaggcagataaaatcatgcacacacaataacacggaccgacgcccgccgctagctatcctggggattaaggaaccagcagggaccagcaccacgaccacaccaacgacgcgcgctactagactgtgacgcccagatgacatggactggcacggaagtgtactggaccatcatcagtagtcggtccatctaggtgttgcggaggtaggtgtcgacggcgtgggacgctttggtggctggatccttgttgacctacaggatgggcaccagggcgttgggcttgccgaactccatggcccaactgacgagggggccgttctggccctccgtcttggccggagtgacctttacag

SEQ ID NO: 100969 - DNA, 149 bp, Zea mays
  Clone ID: MRT4577_23597C.1
gccataacccaaacttcgtacttttctataccggcatagaggggggtgtcttatgcgcctgttgttgccagcatgaaagacaacttgccccaccggtgacttaattcggacacctacgctcaatcttacatgcggttcatctcatatca

SEQ ID NO: 100970 - DNA, 1866 bp, Zea mays
  Clone ID: MRT4577_23598C.1
tcgaagccggccgggcccccatttcggagcaccgccgaattctctgcgagtacctctcccctcccgctctctcggatccccctaatgaacagctcaagacgaatgccaaagaccgccgtgacatgctaatcaccagaaagcatgcctgacgaaacacgatgctggcttcatgcccgagggagccaccctatacatagacactcgtatttcctacgatgtggccaacgatatcaacgtgggctactagagacacttcgtgatgcttccgaagcacgatcaagctgagctgcttatctcctctatctacataatcgtgtacgtcatctacgccgtcatggagccggttgttgctggcagcaacacggtagtaggctgaccggccggaaaaaaaaaaaaaaaaaaaaaaaaaggctcaacccaacacggcgtccccgtcccgagtcaccaccgaccctagcaaaaccgcacgcaccctgccagcggccccccaactcccaacccaacccctactccagctagctcgcggcggcggccagcggccatggccttccggctgagcaacaacctgatcggggtcctaaacttcgtcaccttcctgctctccgtcccgatcctgggcgcgggcatctggctgggccaccgcgccgacggcaccgagtgcgagcgctacctctcggcgcccgtcatcgcgctgggggccttcctcctcgccgtctccctggcgggcctcgtcggcgcctgctgccgcgtcacctggctgctctgggcctacctcctcgccatgttcgtcctcatcctcgtcctcttctgcttcaccgtcttcgccttcgtcgtcaccaacaggggcgccggcgaggccgtctccggccgcggatacaaggagtaccgcctcggggactactccaactggctgcagaagcgcgtcgagaacaccaggaactgggaccggatcaggagctgcctccaggactccaaggtctgcaagagcctgcaggacaagaacgagaccgtcgcccagttcatgagttccagcctctcccccatcgagtctggctgctgcaagccccccaccagctgcggctacacctacgtcggcggcacggactggacgccggtgaccaccaactcgacggacccggactgcaagacctggagcaacgacgcctcggcgctctgctacaactgccagtcgtgcaaggcccggcgtggtggccacgttccagcggaactggaagcgcgtcgccgtcgtctgcatcgtcttcctcgtcttcatcatcatcgtctactccgtcggctgctgcgccttcaggaaacaccgcagagacaacgcctaccgcgggcgggtgggagggcgggtacgcttgatccaccatcgcgtcgtttaggagcggagccatgcacgcgcgctcggtgctctgctctgctccctgcccgccgctgtcgtcgtacgtacatgtttagtaggctcgttgtagctctgtacaggtgatggagatcgttgttgcggattcttatcgtcttcctggttacatacttacattattgttatgatctgatcagcggtaggttttgtatacgctgctcattgattcgtctgcctgctattttcgtatatcgatgcacttgttttaccagttgctttcgttcaaaaaaaaaaaaaaaaaaaaaaaaaaaaaaaaaaaatcaccttcctaaccagggtctgttggctataagctcgagtgggccggttatagatacacgcacatgtttatattagatacaccaaaccaagcgaacgcctctccgcataatcagcgacaagcgcgcgggccggaaggaccgactcacaagccgccgccccatccctgctcgttcgcctcccat

SEQ ID NO: 100971 - DNA, 148 bp, Zea mays
  Clone ID: MRT4577_23599C.1
gagggaaacaaaatgttttaatcccaggaagtttagctttaagctggggagacaaaagttttacgggtttttatttatggggttggcttatccgaagaaaattccttgattacccccaagggggctttagccgcacccccccacgggg

SEQ ID NO: 100972 - DNA, 205 bp, Zea mays
  Clone ID: MRT4577_2359C.1
caatgttgtatgcgatcttcatacgccaacgatctcatccggcgcagatgtgcactactccgtcaccgacgccctcggacgccacagtacctttagatctcatacagcgccacgcactaaggcttgagcactcctgcatcggatgattgccttaactccatcatcgcctagcctcatctctcctctgagtacaccctctggacac

SEQ ID NO: 100973 - DNA, 352 bp, Zea mays
  Clone ID: MRT4577_235C.1
ctcggaattcccgggtcgacccactcgtccgagatcacattatctgactcgctccatctactatggcaatagcctcctcaattctatgcatagtgcacattaaaaattatgaagctaactacaaagaatacaatgccatatgtcaaataatcacttttctagggcaatatagaacacatgagcttcatacatatgacctactggctattattggacagtcagttgaaagcgaaagtgcttcaatgctaatgtaggatcattttgctagcttatcaacttgttatttaagaagacggctcgactctctgcagaaagcttgtattatcataatgattatcgacacatatcttat

SEQ ID NO: 100974 - DNA, 805 bp, Zea mays
  unsure (1)..(805): unsure at all n locations
  Clone ID: MRT4577_23600C.1
cattgggtacctcgaggccggccgggatcaatgaggatatgaactaaacatagtttccggctttccgcctagttgtacacctgtaccacagggcacagccgagtgcaagattcatgaatgaatatatattctcgagcctcacgtgagcatctcacttgtaccacagggcacagccgactgcaagattcacgaatgaatatatattctcgaaaaaaaaaaaaaaaaaaaccatctggattaacgacggacatcgaaataagcgatgagactttctcccaccacgctcatcgccgcgctctcactcactgcttccaccaccaccgcgctttcgaacaccgcactcaccagcgttaagctacctgctgtctacgccgctggtgcactactcctctcgagcagccctctcgtcagcgcctcttccaccccccacatcggagtcaaccaacgaaactttcgccttggacgaccctacgccaccagnnaccagcgcttccctcccaccccaaacggacgccttcccgggcttcgagtctaccccgcacctcgagccgtccgcgtcgaccgcacagctcatccgtgacgcgatggatctgttcggtgccaaaccctcccccaccatcttcacccgttggtcagccaacgccatcttcgccgatcccatctgccacgccaacggcgccaaacagtacctcgcacagtggtacggcatgcctgcggccttctcccactccgaaacgctcgcatggaagctcatcaaggacaccgagaccgaggtggagtacgtccagaagcaaaagatagggtc

SEQ ID NO: 100975 - DNA, 508 bp, Zea mays
  Clone ID: MRT4577_23601C.1
agcgtccggttgggcctattcatcatcacggggggcgaggcgcgtttgcatcggcctaacaacggggggtcccagcatatgatacctgtctgcgcttttcgccctcgtcgtgagcgcgacaatagcgttcatcatggcaacacgctcactgggtcctagggccgttattccacatgccggggggcgggcttcaatcgctttgggcacccactgggcaagcctacttgctacaactagcgctagctgggagagtttggccacagccaattgcccattttcagcaacaagtaacggggacatgtaacaatacaggaccattggaacgcatcagcgacaacattggctaccatccatgagcgcaatagagtgggaaaaccctgtcgtctacttggaacatcaggagaaggcatcaaacccactagatctggcaaatatagttgcctaccaactacaacatcaattgcaacagtttataccagagctaagtgaactagccatggcgaaccct

SEQ ID NO: 100976 - DNA, 568 bp, Zea mays
  unsure (1)..(568): unsure at all n locations
  Clone ID: MRT4577_23602C.1
ggccgccctttttttttnttttttttttnttttttttttttttttttttttttttttttttttttttttttttttttttttttttttttttatttttttttttttttttttttaatttttttttttttttttttttttttttttttttttttattttttttttttttttattggaagggggcggcgccgggacaaagggcgggggaacccgaaaggtataaaaaaaaaatggatggggggggaaagccccggtaaaccttttattaaaaaaaaggcccccccccgggaagggggggtttggggccccttttaactttaaaaataccacgggtttccgggggggccggcccaaaaaaaaaaatttaacgggtttaaagggcccttcgcagtttcaaaagtggaaataattaaaacttgcaaaagcaggggtaaaattttgaaaaaagaaattaaatacggggggggaaaaccaggggggacgttctttaaaaaggggcaaggccgggctaacccggggggggttttgccggggtggcccttgtttgtttggggggacccaattttgggg

SEQ ID NO: 100977 - DNA, 385 bp, Zea mays
  unsure (1)..(385): unsure at all n locations
  Clone ID: MRT4577_23603C.1
gccagtgagtgaaaccagcctgcttgggccgctccttccctggtgcgggcgtggagacctccgcggagntctcgagagccgccgaccccacccagctctgccggtggcacgctgaattgcgggaggaagaaaagggagttgggctggggatggggcgggagcgcgcaagccggcgaagaatcagatgccgggcggcgagcagggtccccgaggaccggggccacgacatggagaagcngaagctgatgaacctcatcctcctgggcgcagagcgatacccaccggcgggatggncggcccctacggagacttcttcgaacccggcggctccgggaacggcgacggcggaaactaacggctccgctagctgggccaacacatcacg

SEQ ID NO: 100978 - DNA, 514 bp, Zea mays
  Clone ID: MRT4577_23604C.1
gcgcacagctccgaaccttctcccacccagccagcgcaggaagctcaccgggaagccggtgcaatcacacaccccacatccccgctacaaatcccagcccccggtcgacatccctctcactcctcccccatgcgcaccggcaccggcaccggcagctcaccgatccccggagccgctactataagtacaaagcttccccggcggcggtccacccggccatggcggcagtcggagcgcgcccagtgctgtaccaccaccacccccacccggcgccggcgggcggcgcccccgcccccatgtcctcttcctacttctcccgcggcggaggcagctccagccccgcgtccagcctctccgccgcgcacttggacatatccgagttcctcttcgacgacgcctccgtcgtcgtgccgccggacgccagtggtggcggtgcgatcagcgcaggcggcgctgggagcgcggcggcgccggagcggccgcgcacggaccggatcgcgttccggacgaggtc

SEQ ID NO: 100979 - DNA, 930 bp, Zea mays
  Clone ID: MRT4577_23605C.1
cccacgcgtccggctaagtgatcatattgagcaaagactttcagagaggcttgagcaggacaggcaacagagggcgagcgcctctggaaaagttgctgaagaggtaccaggtgtgaaagggcttacagttagagtagtttcttcagccgaaagattactgcaagtccaaccacgttttcgtggtttttttaaacaaggaaagtatcctggggaatttccatacaaatcgaaggccattctcttgtttcaaaagatcgaaggtgtggatgtttgcctctttgccatgtatgtacaagagtatggctcagattgcccaccaccaaatcaaagacatgtttatcttgcatatattgattctgtcaaatacttccggcctgaaatcaaatctgcaactggagaagctctccgcacctttgtgtatcatgaaattttgattggttatctggactactgcaagaaacgagggtttgtaagctgttcaatatgggcttgcccatctacgaagcgagatgattatgttttatattgccatccaacagtacaaaagatgcccaagtctgacaagcttcgaagctggtaccagaacctgatcaagaaggccattaaggagggtgttgttgtggagcgtaatacactctctgacttcttccttcagcctacaaatgagtgcaaggccaatatttcggcagcatgcttgccatattgtgagaacgatttctggcctggagaagcagagaggctgcttgagaagaaagatgataatgcttcacagaaggaagagacacaggtaggaaggctcttgcgtgttgccaaacgcgacgacagaaaaggaaaccttgatgatattttgcttgtgcataaccttggggaaaggatgcgcacaatgaaagaagacttcattatgctttgtctgcaacaattttgcaagca

SEQ ID NO: 100980 - DNA, 588 bp, Zea mays
  Clone ID: MRT4577_23606C.1
tcgaattcccacacatgccggatgtccaggtgggcaggcagaccgaaaaccgaaccaagcgggggctcaggacgggaacctcacaggacctgaacatctcaaatccttccttccctcccgaccaaggccaaggaccccgtagacattgccggccgaaccttacctacccgctatactcctcacaggggatcccgtacgacacatgctgcgcatggagcataggctcttggattacagctccctcatatggaaccgcgttttatatttaacaaacgaataactcggtttcattaacggctacaatctctcttttaaattctatcgcattgacctcctatgctcaccaggaccttctgcgaggacctgcgaactggaaacctaccactaagacatatactatggaatcgcatatcgagacaaagatggtccaggataaagatctataacaatggcttactgggagagaagatattagtgagatacgaccatgagtacatgcatccgattatctactactgataggagatcccttactaaccagctgtgacacgcgtattaaaggtcgcttccactccagatccaattggc

SEQ ID NO: 100981 - DNA, 460 bp, Zea mays
  Clone ID: MRT4577_23607C.1
ggccgcttttttttttttttttttcttttttttttttttttttttttttttttatttttgttttttttgtttgttcttacccttaacacataactaatactttgagtagtaaccacaccacaaaaggaaaccaaaaccacccccaaccacggcactattgggccgcacatgtcggatctgcatacgtgagttgaatgaatggcagcggatgtttcaggttaccgagggtaccagcctcgggcacgaccactcggcaacaacggaagcatccgcgacgagggtaaaaaagctagcacctattaccccacctagctgtaaacagggtagctgtcgtccggtgtgccgaataatcaactgctgacacgccatgaccttgaacaaatggatcaagccatttacggccccgaacgccgacacctccgagggcgagttgaagatttcgccccaaaacaccagccgc

SEQ ID NO: 100982 - DNA, 374 bp, Zea mays
  Clone ID: MRT4577_23608C.1
gaacttgttgtagatcgcgagcgggcgcacttgatgatgtacaccatggtgcggtggttcttgaccgggctgctcgcatcatcgctcagccctgatgtgggccgccgacgcatcggcggactcggggctttacgacaagatcaacacggacggcaccgtgcgcactcaatacgacgcgtgggtgcacgatgtggcgatgcttaccctggaccgcagctccggcgccggcttcaacttcaaggagcagtacactgacggcgacgacagcgtgcagatgaagctcatcctcggcaacttcgtcgacaacggatcgtgcttatacctctcgtcgggcgacggtgacgggcacgacgagatcgacatggagttcatgg

SEQ ID NO: 100983 - DNA, 401 bp, Zea mays
  Clone ID: MRT4577_23609C.1
cccacgcgtccgcggacgcgtgggtctatccacaacagttgttactgctcaccaattgttttttgtttgtagtttcaaatgcaacttcttagtttagaagaagtttaacaataggcaacgctaacaatcacctaccctgaataacttggtttgagaattgagacggcagccctttttgtcactcgaacctttttagtctgtatacctgaaatggcatttcacataaatcctatttcctccaagggcgtctgcgtggtcctatgctaacacaattattgctctagagcctggagagatgaaatccaagcaactggagtcttcagtggagactgagactgaagtccgaaaagaaaagaagaaaaagagtaaggcaattacagaggatgagactgaggcacaaa

SEQ ID NO: 100984 - DNA, 728 bp, Zea mays
  Clone ID: MRT4577_2360C.1
ccgggtataaataccctgcaacacccaccttgccacacaattcggcacgaggattgattgattacagcccgttcatccttccttcccccgtcgaatcccaccttccttcccccgcccgttaagcagccgagtcagcagcaatggcggccgtgctgaggagagccgtggcgcagtgcttcgcgtcgtcgtcgtcgtcgtcgccggcgacgttcgggctccggcggttcctgcaggagcagccggcgttccgccccgccgtgccgcccgaccgcttcatgcccctggccgaccggatccgggacctcggggtcggcgtcgcattcccgcggatcaacctcgacggcctcgtgccgcccgcgccggcgccggcgccggccaagcgggagccggacgcggcgctgcccgcggcgagcctcacggtggaggaggcgcgcaaggtgctgcgcgccacacagatggaggcggcccgcgcgcggattcgggagtccggcgccggcgccgtgccgtacgccgacttcctgcgcctctgctgcgacgccgccggcccggacgcgggcccctccgtcgcgcgcgcgctcgacgagtccggatccgtcatcgtgctcggaaagaccgtcttcctcaggcccgacatggaaaagattcaaagaaagggcgctgttctaaaacgataataagagatgttgccacccaaagtttgggcaattttactccgctccaagatggga

SEQ ID NO: 100985 - DNA, 359 bp, Zea mays
  Clone ID: MRT4577_23610C.1
gtgcaaacaatcatttggtttgttgctcatcctggagcaaactcgacaatgcaccaaaaccccttaagtgtcttgtaaagaacacaccaaggccgcaaattgagctacggatctgcgtggaagagaatactctgcgtgatggcccacaacatttgttaaacctcgtgcccactgctgcaccacctgcctggagctttcttgaacttccttcctttggaccacacgggtcgccaggcgtagttgagcacaactgcagcgtccttgactgtaccgcctaaacgaatcaagggcataaatcattcccgtgaggagactgatgaaccgctaaggggagcagggctatcaagctgcttaaatgt

SEQ ID NO: 100986 - DNA, 326 bp, Zea mays
  unsure (1)..(326): unsure at all n locations
  Clone ID: MRT4577_23611C.1
ttatgganggtggttnntgtggtntngagggagngtnggttgtganatttattannagnantggtattaagaaaaagatattttttttttttgnnnngngggatgagggggggggagaaatttttttttgtnanggnnnngaaggaggggggggggtgagttntgntgatgagggggtgannnntnnnnntnttnnatttgtntgnaattnagttgatgaaaaatgtgaagnnaaagggggggggagtgntnntttggagggtgagatatgtgggggtttnttnaagttgantagtttggatgtgaagaaagggntnnagaagtgt

SEQ ID NO: 100987 - DNA, 191 bp, Zea mays
  unsure (1)..(191): unsure at all n locations
  Clone ID: MRT4577_23612C.1
ccctctttatattttgaaaagaaaaccccaacaacagggggcatacttgagaactttagggggggtttaacatttggcattcagcaagggcaccatgtntttgtcactacagacccgagttccaaaacagactatgatgtacactctatacagagcattggctgcccaaagtacacactattcaagcctag

SEQ ID NO: 100988 - DNA, 200 bp, Zea mays
  Clone ID: MRT4577_23613C.1
agcgcacacacacacaaactgatcgaccctttatccacacggaagcaccgccggagcaagaggcacaacatcgtgaaaaccctgactggcaggaccaacacgctccaggcggacaaggacgttatgattgacatcatgcaggtcaacacccacgacagggagcgcaggagcaagcaccagcagctggtgaacgggcgcgg

SEQ ID NO: 100989 - DNA, 494 bp, Zea mays
  Clone ID: MRT4577_23614C.1
gtgttatgctcctttctttaaataaaaaacttaattattgaacttttacttatgaggaaatctagacaagggcaccaccaaagatggtttgttcggagaaacgcttgagactttgtcaacaatggcaccgccgagtggcaggctttgttgcaattgtgagaggatgccagcgataggcgcagcctgctggcagaacgggctcaactggggataaagcaacaaggtagcccacctcacaccagctaactggctgaatgggaggaggtggtgctgctgcgtataagcatgacacaaccatgctgccaaatggctgaatggaataaagtggtgggagtacgccccaggttagctgcattaatggacggagtggctgctgctgatacgaggcatagtaaagagcagctagttgcgacaatggaagagactgctgttgctgagagtacctaccaaggtttgctagcacaaccagcagtagttgatggccctgatgaaat

SEQ ID NO: 100990 - DNA, 1048 bp, Zea mays
  Clone ID: MRT4577_23615C.1
gccggccgggctccgaaaaaactcagaacatgtactagctaattaattaagcaaccgagctctcctacccagttcagcgaattcaccgacgccgacgacgatgaccctgacggccttgggtcttggactagcactcctcgctgcggccagcccgtgcttggggttggggagcagcggcagcggcagcggcggcgcgtccgtgcctagcgtcgtcaccgaggcgttcttcgacggcatcaggtcccacgcacgggacggatgcgagggcaagaatttctacacgcggagcgcgttcgtgagcgccgccggcgcgttcccgggcttcgcgcacggcggcacggaggcggagggcaagcgcgagatcgccgccttcttcgcgcacgtcacgttcgagaccggatatttctgctacatcaaccagatcaacgggaggggccaggtctcgtgcgactcaggcgtgaagcagtggccgtgcgcgccggggaagcagtactacgggcgcggcccgctgcagatctcgtggaacttcaactacggcccggcggggcagagcatcggcttcgacgcgctgggggacccggacagggtggcgcaggaccccgtgatctcgttcgagacggcgctctggctctggatgagcagcgcgcaccaggtggtgccgcaggggttcggcgccaccatcagggccctccacggcgccctcgagtgcaacggcaacagccccgccacggtgaacgcgcgggtgggctactacaaggagtactgcaagcagttcggcgtcagcccggggaacaacgtcacctgctagagacgtgccggggaccctagataaaccctaaatactccagctcgtggtgaagaataaaaatggactcatgatgctgaaatgaaactcgctgctatatgcatgggtccacccgaataacgaagaagactggcgagaagctgtcgactcttagcgaagatcagaatatcaatctattctgtctatactatgtgtaaaaaaggttttttaataccactatatgctataaaaaccgagtttctt

SEQ ID NO: 100991 - DNA, 453 bp, Zea mays
  Clone ID: MRT4577_23616C.1
gtgacactatagaagagctatgacgtcgcatgcacgcgtacgtaagctcggaattcggctcgagtgaggactaccgacgggaatacggagctaggtgcggctgaacacctgcacccatctttgcagctatgtatagcatcttctctgcttatgccggcgagggaagaccttgaacctactcgtgtgtgttatatatagttcaaactatgacgattgatgcatcagatatgtgaaacgtaatgaactgtgttggtgacttgtcaacaggttctgctgggatcggcttacttcagttctgtaacctcaacacctttaggaccaagttcattcttgggttcttagatctcatgggcctttctggtcctgaatacttcaatgagcacacatctattgctgggtatggtcctgttcacacacattcaagatggtttaacgatatactgaatgtgatat

SEQ ID NO: 100992 - DNA, 569 bp, Zea mays
  Clone ID: MRT4577_23617C.1
ccgggttcgacccacgccgtccgatcgggttctcggcggcgtctaacaggttcatgcacggaagattgcgccaggatcaaagcgagacaaccccgacattaagcacagggaagcctttagcacgggagccaagcattgggcacgttatccaaacatacatttcggtttacacgactccgggcgagagtggcaagcaagaaactagcggatcatgaggcgggggtgtctgtcgacgcagtcgtagcaagactcaactgctgctaaaaagatacagggtttttactgatggctgcagatagatgtgctaatggactgatgcatagtcgaccggttggaagaatggataccacatacactgctttaaaaatatgtacttgtgagtaaacagtgaaaatataacttgtgagatgtaccgtacatatgatagaggtagctaggatgcgtgtcctagagctgggaacagtgaagcatatgttgtaaccagaaacatcacatgaattgctattgggcgccatgtctatgcacttaattatattggttgaggagacctagttctcattggtcctgcc

SEQ ID NO: 100993 - DNA, 305 bp, Zea mays
  Clone ID: MRT4577_23618C.1
aataatttccctgccacaaatcggggcaaagggggtcatatttaggtatatattttatttataaaaacaaatgaaacaaagacacaattattagcattttataaacgggtagctatctacaggcaacttactttccggaagtttgatgctcgatctggctacatcaaatccctttttttttacctccgaaaataaatacaacccttgaggtctattttgtcaacctacaaagaaagaatcgtggcattggccgctatgtatgtaattgcgccattcattttaagccgatcttctgtcccttgctt

SEQ ID NO: 100994 - DNA, 372 bp, Zea mays
  Clone ID: MRT4577_23619C.1
agcgtgagaaacttcgtggaaaaggggccggcggcaccgtaccagtcgtcgtccagttacctcacgcagcagctcagcagcaacatggcgctgagagccgccgcctcctcctcctcttgtgcgtcaggctacagcgttcagacgaaattcacgtcgctccggccgttgccgccttcggtcgtcccttcccatgcctacagcgcgccgcctcgcggacccgccaccgtctttcacccgtcagctcctcccgtgccgtatccagcgagcaattctggcggtcctggcagcagcggcgcggtgttggagatcgagagcgtgaggtggagcgtggtgggatcgaagcctgagggctcggagcgtctgaggagctgc

SEQ ID NO: 100995 - DNA, 1135 bp, Zea mays
  unsure (1)..(1135): unsure at all n locations
  Clone ID: MRT4577_2361C.1
caaccccaccttcattgattgattacagcccgttcatccttccttccccccgcccgttaagcagccgagtcagcagcaatggcggccgtgctgaggagagccgtggcccagtgcttcgcgtcgtcgtcgtcgtcgtcgccggcgacgttcgggctccggcggttcctgcaggagcagccggcgttccgccccgccgtgccgcccgaccgcttcatgcccctggccgaccggatccgggacctcggggtcggcgtcgcgttcccgcggatcaacctcgacggcctcgtgccgtacgccgacttcctgcgcctctgctgcgacgccgccggcccggacgcgggcccctccgtcgcgcgcgcgctcgacgagtccggatccgtcatcgtgctcggaaagaccgtcttcctcaggcccgacatggtcgtgaaggcaatcgagaacgcgatccccgtgcggcacgcgnctgcccgccgccgccgccgcggagatcgaccccgcgtgggaggaggagctgagggccatggaggcggagaaggcggagatcgaccgggcggcggcggcgcgggtgcggcgggagctgtggtgcgggctgacgtacctggtgatccagacggccgggttcatgcggctcaccttttgggagctgtcgtgggacgtgatggagcccatctgcttttacgtcacgtccatgtacttcatggccgggtacgccttcttcctccgcaccaaaaaggagccgtcgttcgaaggctttttcgagagccggtttgcggccaagcaaaagcgcgtgatgcgcgcccggggcttcgacctccgcaggtacgaggagctccggaaagcctgcggcgtggcggcgtcgccgccgctccaggcccggaccccctgcgcgagcgcgggcgcggcgcgggaaaacggccattgccactcctactgccattgccattgattttggcctcgctcggttcattcctttcttttttttttctttgttgttcatgcccatttggtggggatgatgattcgtgtatccatttgatgcgcgcgcggatgcaaaaaaaaaaaagcatactgaattgaggtttaaaaaaaaaaaaaaaaaaaaaaaaaaaaaactcgagaaaaggccgcggtaccc

SEQ ID NO: 100996 - DNA, 1205 bp, Zea mays
  Clone ID: MRT4577_23620C.1
atcccgctgctgcgtgtaggatatcagatggagagaggcaaccgtctggacacccgtcacgtttctctttggctccagcagctgttcgggcttttctgcctggtaccagcagtttcagaacaggtggccacaaccagcaacctgaactagcaacagccagtaagaatccttatctttcaatacactgcagacatgcaccggagtcatctttcaatgcaaggaacagttcccacgcgtccgcggaaaaggggccagcggcaccgtaccagtcgtccagttacctgacgcagcagctcagcagcaacatggcgcagagaaccgccgccgccgcctcctcttctgcgtcaggctacggcgttcagagaccccctggtctaagtctaacaacagcccagacgaaattcacgtcgctccggccgttgccgccttcggtcgtcccttcccatgcctacggcgcgccgcctcacggacccgtcaccgtctttcacccgtcagctcctcccgtgccgtatccagcgagcaattctggcggtcctggcagcagcgacgcggtgttggagatcgagagcgtgaggtggagcgtggtgggatcgaagcctgagggctcggagcgtctgaggagctgcaaaagggcagcagagatggacgccgacgtgtccgtggcgttgctgaagaagcctctcaccgtcgccgccgccgccgcagcacggcaggggctagatatgttgctaccggtcgcagagacggggtcggagttccgtggatccaccaggccggagccggaggcgcagccgcggcctagtggtacgagtacgacgcctatttgtgtcgacgacgagccttgagctgatgatcttcgacttggagacgcaggcaggatcgcgtcccacacggtcatcgaaagatgtcagcgcgatggtaaggtactactactactaccagtggagctgaaacctggagcgaagcgtgtatggcagtcagcagccaagtgccagcagcagcgtgtgccagccagggaaatcccctggcctgtgcgcgcgttcggttacaccgctagcccctcgaggaggcgcgggaggtcagcatgcatgttctaggtgtggtctttggccctctttgttcacctgtatacattgaaacactcatcagtggtttttggctggaagggggaccggggcagggccagagccagagccttctgctgt

SEQ ID NO: 100997 - DNA, 203 bp, Zea mays
  Clone ID: MRT4577_23621C.1
aaacgggctttgggggggacccccaggaaaacgtgccctccgcaaaaaggtttggggcccaacttgggtaaaaaaattcgggggggggggggattttgaaattcaccccaggtatcgaatttggctacttttttgatgggggggggagccgaaatttccgtggccgcccacgggtccgcccaagcgtccccccacgcttccgg

SEQ ID NO: 100998 - DNA, 954 bp, Zea mays
  Clone ID: MRT4577_23622C.1
agggagcagagaataaattactaaaacgaggaaagaagagggaactggtgcgatgaccactagtacagctgaaacgatagactgctggacgcttgaatcggaaagctagcttctgccacgagaacgggagcgaaggggacgtcccgtcggaggatccgtcgccgccgacgtggaatatgccgtggtagttcatctcgtggccgccacgtcggagctcggcaccaggacggtgttgagctgctcgctctccacgcccggggggcaggcgaacccgccggcgggtagggacggcgccggagccggcctgggagcaggcgaaccagtccggcaccggggagacgccgaactggtggtgctggaggccggggacgaggggctgcgccatggggatgcgctccgcgggctggaccatccggctcacgtcgacgctggaagagttggcgggggatgacagaagagagagagcacaatccgagtcgagcacgggggcgagcatcttgctgctctcgggcggcggcggggccacggcggcggtcgtcttgaggaggggctggcacaccgtggagacctcgagcgtcccggcgcctgatgcgctgaagctgacttggtcgccgtcctggaggaacgggaagcgccggccttccttggagtaggccggcgacgtggaggtgccggcgaagtgcggcctgttgctgagcaccgggtggtgtgtgtagtatgagctgtcctcggatttgatgactccagaccagcttggctccggccttggtgccgggaacgacgataaccttgtccctgcactcgaaaacaagccttgttgacttgtcataaagctcccagagctcatggtatctggctgcggcttcctgcggcgccggttgtgcccgtcaagcctctttctacaactgcgcttggcctcatcaaactctagcccggccggcctcgagggtccca

SEQ ID NO: 100999 - DNA, 1411 bp, Zea mays
  unsure (1)..(1411): unsure at all n locations
  Clone ID: MRT4577_23623C.1
ttnttttttttttttttttttttgcaatgatacaatctactgttttaactttgcctaaccatacagattattgattgtaaaatgcaataatttaaatttagatatatccaaatgctctagaattgaattttacaacgcgcgcagggcgcgcgccatccactagtaaataaataaaacgaggaaagaagagggaactggtgcgatgaccactagtacagctgaaacgatagactgctggacgcttgaattggaaagctagctactgccacgagaacgggagcgaaggggacgtcccgtcggaggagccgtcgccgccgacgtggaatatgccgtggtagttcatgttcatgtcgtggccgccaccgtcggagctcggcaccagcacggtgttgagctgctcgctctccacgcccggggggcaggcgaaaccgccggcggagacggcgctggagccggcctgggagcaggcgaaccaggcgggggagccgccgaacgggtggtgctgctgctgctgctggaggccgccggggacgaggggctgcgccatggggatgtgctccgcgggctggtggacgaccatccggcccacgtcgacgctggaggagttggcgggggatgacagaagagagagagcacaatccgagtcgagcacggcgggggcgagcccgtcggagaacatcttgttgctgctgctgctctctggcggcggcggtggggcggcggcggcggcggccttgaggaggggctggcacaccgtggacgtggaagagacctcgagctgctgcgcccccgcgcccgcgcccgcgttgaagccgccgacctgctgctggtcgcagccgtcctggaggaacgggaagcgccggccttccttggacgagtaggccggcggcgtggagcccccgccgccggcgaagtgcggcctgctgcttaggaccgggtggcgctggtgcgcgtagtatgagccgctgtcctcggatttgatgactccgggccagctcggctccggccttggaaccgggaacgacgagaacctagtccctgcatgagaagtcataaagctcccagagctcatggtatctggctgcggcttcctgcgacgccggttgtgcccatcgagcctctttctacagctgcgcttggcctcgtcaaactccgcgagcaagtgaaacgtatgcaacaacttgaaaagatggggcttgaagatttgagggttcttgtcaaagcaaaaaactactgcacagatcctgcgtcctctgtgttttgtactggcgcagagaagcaccaatttgatgactgattcagaacctcatcccagatacaagttccaattcatcgttttcacttttaaaacttagccgaagacgacgaaagctatacaggcgtgaggaggtaaggtcccggcccggccggc

SEQ ID NO: 101000 - DNA, 399 bp, Zea mays
  unsure (1)..(399): unsure at all n locations
  Clone ID: MRT4577_23624C.1
tccgcgcatcccacagccttcgacgtcgcacgggcgctcacacagaccaccagcgtcggcaccaatggcttactaccaggaggtggactactgctcggggaggtgaggtcggggccccggccggcttcgccgcacgagcgggtccacagcacgtctcaagagaagttcgggagtcgaccggtctcacgcgccggcgccaaccaccaccaccaccaccatggtcaccacggcggccacggcttctggtgcgcgagaccagggtcgggaggacataaccctgcccggtgaggtccacgagcgcaggagagcttctcgccgggctaactgagccgccggtggtcggtatccacgcccgttcggcctgcctgcgtgccttatgtttgtgtgtgggngactggt

SEQ ID NO: 101001 - DNA, 395 bp, Zea mays
  unsure (1)..(395): unsure at all n locations
  Clone ID: MRT4577_23625C.1
cgcccacgcggggcgccaaggaagagagagagancgccgccccccggcncggcgncgggggggcgggngcccncccgccgcgagcgagagcagnccgggcacagagcaaccngacaaaagggagaagagcgggggcaacggcgcggggcaggccggnggcccaaccgggggcgggagngcccgcaagggcccagacagagagggcggcggcgnagacagcgccaagccccgcagagaggccgggaacagngacacccngccaancaacgagccgggccccgaggagggcgcgaagcagngcaggggcaggaaccnacgacccagcacggagggggagaagcacgncgcngaggcngacaggagcggngncacggcgaacacccccaccaagaccc

SEQ ID NO: 101002 - DNA, 534 bp, Zea mays
  unsure (1)..(534): unsure at all n locations
  Clone ID: MRT4577_23626C.1
gccggccgggttgcggaaaaaggggaaaaaaaaaaaaaaaaattaccaaaaaaaaaaaaaaaaaaaaaaaaaaaaaaggccccctncggaacggcccgcactaaaaaaaaaagaaaaacccgcccctctagggccaacggcctctacaaaaatttatagtcccccccccccctgggggggatccccctaaccaaatttttcccctataacagagacctccttaatagggggccctctagtccagattctttaataaaacggatgggtttgaaaaaacccctccctggccccccttttaataactcttggaaaatcccccccctttgcccgttgcccctttaatatcagcatgggcccacctcccccttccccccccaaggggtattaccctaagaagggcgcgaacgaaaattccttcccgcaaattttttcgacaaaaaatggggaaaattttttgaaaaacctcttttttttttaaaaatcgcgccaaactcttgagaaccccctttatttttttaaaaaaaacccacaaat

SEQ ID NO: 101003 - DNA, 478 bp, Zea mays
  unsure (1)..(478): unsure at all n locations
  Clone ID: MRT4577_23627C.1
ccggccggnaacaaaaattcaaacacaacctgcgatgagaagcttgtagcacaaatactctttagctcgcgctacgatgaagtaaaggcaccggatcttgaatggaaagcgtccgagcctattggctccttatacatgaccaagcagcaggccctcaccatcgaggacagagacagccacgaagctgggcaggagggatgggaatcgtaacattgcgaccactggacagggagataaagtagcactggaggcgaacattcttccttgacactcaaggagggcccagcctggcacttggacgctcngacaacaaggcccccggtcaagtactcccctcttgaatccgcatttgataccaaagtcatggcgggctaccggaatcgcccgaagatgtcaatcccccgccgatttcaaagggcttggcacccccctacaaagaaccactcttcagcatcttaattcaagccttctgaataaa

SEQ ID NO: 101004 - DNA, 434 bp, Zea mays
  Clone ID: MRT4577_23628C.1
ctataaggaaagctggcacgcctgcaggctccgatcctgtatagccgacgcacccgtcctttatttatgttcatacgcggacacttgctcggaaaaataccatgacctgaccacagagtatccctattaaccaatgactagggcgattaccatttgactgcctgctcctgcctgatgatttaagctgacctttatgagtagatccaccattgctaacatgcaggacatgacaaacttaacgctcctggaagcacgtacatcttggaagcctgagagtagacctgcgtattttgcaaggacaggtggcctgctcttgccacacttggctccacagacctctccataaagtatatgatgctttctgatcctgcactcgatgagtaatcattaaagtacgttcctctagctgacatgctagctggaccattgcatga

SEQ ID NO: 101005 - DNA, 292 bp, Zea mays
  Clone ID: MRT4577_23629C.1
aatatgggcctcagtgctgcgaccatggattaaaatgtggcggaaggccaaaattgtggacgacggttgatggatgcaaagaacgaactggagccgtcgatctcaagaaactaagcagggagatctgccgggtgcattggaatatcctgtccatacaagacgacgtgtgcgtggcggcagatcatctgatcagctgatcaattgagagcgctagctatcattcccttgccgttcctgtagagtgccgccccaggacggccgtgcgcgggcctacggttgcatgaggagcttt

SEQ ID NO: 101006 - DNA, 1192 bp, Zea mays
  unsure (1)..(1192): unsure at all n locations
  Clone ID: MRT4577_2362C.1
tacagccctcatccttccggtcgcgtcgtatcggagcttgtcgcccgcccgttaagcagccgagtcagcagcaatggcggccgtgctgaggagagccgtggcgcagtgcttcgcgtcgtcgtcgtcgtcgtcgccggcgacgttcgggctccggcggttcctgcaggagcagccggcgttccgccccgccgtgccgcccgaccgcttcatgcccctggccgaccggatccgggacctcggggtcggcgtcgcattcccgcggatcaacctcgacggcctcgtgccgcccgcgccggcgccggcgccggccaagcgggagccggacgcggcgctgcccgcggcgagcctcacggtggaggaggcgcgcaaggtgctgcgcgccacacagatggaggcggcccgcgcgcggattcgggagtccggcgccggcgccgtgccgtacgccgacttcctgcgcctctgctgcgacgccgccggcccggacgcgggcccctccgtcgcgcgcgcgctcgacgagtccggatccgtcatcgtgctcggaaagaccgtcttcctcaggcccgacatggtcgtgaaggcaatcgagaatgcgatccccgncggcgcgggtgcggcgggagctgtggtgcgggctnacgtacctggtgatccagacggccgggttcatgcggctcaccttctgggagctgtcgtgggacgtgatggagcccatctgcttctacgtcacgtccatgtacttcatggccggctacgccttcttcctccgcaccaagaaggagccgtcgttcgaaggcttcttcgagagccggttcgcggccaagcagaagcgcgtgatgcgcgcccggggcttcgacctccgcaggtacgaggagctccggagagcctgcggcgtggcggcgtcgccgccgctccaggcccggaccccctgcgcgagcgcgggcgcggcgcgggagagcggccattgccactcctactgccattgccattgatcttggcctcgctcgattcattcctttcttttttttttctttgttgttcatgcccatttggtggggatgatgattcgtgtatccatctgatgcgcgcgcggatgcaaaaaaaaaaaaagcatactgaattgaggtttaaacttggaaccagggcttaagccatgtccaactgttcgtccaaaaaaaaaaaaaaaaaagcggcc

SEQ ID NO: 101007 - DNA, 179 bp, Zea mays
  Clone ID: MRT4577_23630C.1
ggggcgggcccgcgggaccccatcttttcttagtccctatttatttttattaccctaaagagcgtctctcttctgccaagctaagttaataggcctttgctagagctcacaggatcatgtgttatctacgagtggtagtaatcaggacacatgatgtcaggataggagtagaggagtga

SEQ ID NO: 101008 - DNA, 211 bp, Zea mays
  Clone ID: MRT4577_23631C.1
gacagtcttaatagactcattctaccacaagtgtcaatgtgccgttcttctcaaatatcaaggacatcttcagcgtcttcttctacgacgacatcgacattcttaaaggctcatgcggtaagtcgctcgagcccttcccgcaaggctaattctactccaacgccctctgagagctcaaattctacaagaaccccaagcacaaggtcaccgt

SEQ ID NO: 101009 - DNA, 166 bp, Zea mays
  Clone ID: MRT4577_23632C.1
cggtaacggcgtcggtccgtggctgaggcccaaaccgtcttttctctcagagggtggggagggaggtgggggcagcagatgcctgggctgggtgccctgtgcacgccaccccacttccgccctacccctgggacgttgcgcttggctggctagttgggcaccgtgt

SEQ ID NO: 101010 - DNA, 1351 bp, Zea mays
  Clone ID: MRT4577_23633C.1
agctctctctcttccttcttcctccccctctctcgacctcatcgcccaccaccctcccccatccggacacgcgagcgcccgggtcgccggccccggccatggatccctacaagcaccggccgacgagcggggccaactccggctactggaccaccaactccggcgcgcccgtctggaacaacaacaacgccctcaccgtcggccagcgaggacctatcctccttgaggattaccatctgattgaaaagcttgcgcagtttgaccgggagcgtatccctgaacgtgttgttcatgcacggggagccagtgccaaggggttctttgaggtgactcatgatgtttctcagctcacttgcgctgactttctccgggctcctggggttcagaccccggttattgtccggttctctactgttgtgcatgagcgtggaagccctgagaccttgagggatccacgtggttttgcagtgaagttctacaccagagagggtaactttgaccttgttgggaacaacatgcctgtgtttttcatccgagatgggatgaagttccctgacatggtccatgctttcaagccaagtccaaagaccaacatgcaggagaactggagaatagttgacttcttttcgcaccacccggagagtctgcacatgttcaccttcctctttgatgatgttggcattccactcaactacaggcacatggacggttttggtgtcaacacctacaccttaatcagcagggatggaaaggcgcaccttgttaagttccattggaagcctacatggtgggtgtgaagtgcctctttagatgatgaagccgttactgtaggaggcacctgccacacccatggccacaaaggacttgaccgattctattgcagctgggaattacccagaatggaagctcttcattcagaccattgatgctgatcatgaggataaatttgactttgaccctcttgatgtcaccaagacctggccagaggatatcatcccattgcaaccagttggacggatggtgctcaacaagaacattgataatttcttcgcagaaaatgaacagcttgctttctgcccagcaatcactgtccctggaatccactactctgatgataagctgctccagacaaggattttctcctatgctgatacccaaaggcaccgtcttggtccaaactacttgatgcttcctgtgaacgccccgaaatgtgctcaccacaacaaccatcatgatggcttaatgaatttcatgcacagggatgaggaggtgaactacttcccttcaaggtttgatcctactcgtcatgctgaacagtaccctatccctcctcgcgttctatctggctgcc

SEQ ID NO: 101011 - DNA, 371 bp, Zea mays
  Clone ID: MRT4577_23634C.1
agggtttccttccacttcctgattcagtctgaccaactactgcgaatctgaagaatgacaagtcaacccacctcactcttataaacagttcggcctacccactcaatgattgccaccgtttgcatgacattacatcttcgaggttatatgatgagcagctgctctgtattcgctaatttaagcagatctcacgtcacttccagattctaaaccgaatcgatctttgataaagaaatatcaggattcatctactgcaaacagaagacgacggcactcgctcctacaagaaatggagaacaatgtgaccatatttgtttctcttgagggcaatatctcttctattcccaattcaataggcaacgactctaaac

SEQ ID NO: 101012 - DNA, 162 bp, Zea mays
  Clone ID: MRT4577_23635C.1
gtgttctgaggcggcctgcttcctgcatttcagccgggccttctcaaggcagctatgctttcaaaagggcgtatttacacactaggcatagaagaaggtggaagggcacctccaggtctactacgacacataggatagtgcaaggcccaatcatggaccctt

SEQ ID NO: 101013 - DNA, 357 bp, Zea mays
  unsure (1)..(357): unsure at all n locations
  Clone ID: MRT4577_23636C.1
tntttttgaataaaattgcactagatttgccggcggcatctgtgcgatacatgtccaggctcaaaaaaaggacgcgatatcgaacgggtgcatgctggctacactaggactttactacgtctctgagatgatatgtcagctcatacacaccacttggtgaaaactgggaatgactttgccgtcgacaagcaacgtgttgcactgcttcatcaacaaaacctgggacaacggtgacatatttcaagcccctcatgacatcataaaaatgtgcttcacttgcttgggacgaattttgtagtacacgatcggccacattaagtatatgaccttgtggaccagctggtttgacaaccctat

SEQ ID NO: 101014 - DNA, 184 bp, Zea mays
  unsure (1)..(184): unsure at all n locations
  Clone ID: MRT4577_23637C.1
accttatgagcagccccacgtgccccgaagaagagttccttctgacctggcggaagtcncacnccaccttcaaggacacatgcgaggagctgggctcccacccacccaaagaggacaccatactgcgcgccgtcatacccgcacgtcagagcgaggccgcatgcatcttgcaccttgccaccgc

SEQ ID NO: 101015 - DNA, 694 bp, Zea mays
  Clone ID: MRT4577_23638C.1
gatctcagacatttgacctccataaggcctttgtctgcgccgcaatgaggtgccgaggtgatccggcgatcgccgccgccgccatcggcgtgctctgcgtcgcgtcggcggtgctcctgggcctggtcgacggcgccactgagggagaggagcccacgacgcagctcttgaacggcttcaccgcggcgcacgcggcgggcgcgccggcgccgttccagcccgtgctgtacgcgcccagcggcgccttcgcgctcggcttcctccgcgtcggcgcggggtcgctcgacctcgccgtggtccacctcccgtcctccttccccgtctggcgcgccacgctggcccgcctcgggaactggtcgcgcgcggccacgctcacgttcgacggcggcctggagctcaccggccacgacggcggcgtgctgtggcagacgctcggcgccgccggcgacgtcgtcgtgctgctcaactcctccaacctcgtcgtgcggcggtacgagaagaccctgccggagtgggagagcttccgccacccgtccgacacgctcgtcctggggcagaacttcacggcttcctcgccgccgctcgtctccgcgaaccgccggttcgcgctgcggctcggcaaggcgtacatggcgctgcacatggagttctacggcgggcagacggcgccgacgtactggaggcacacggccct

SEQ ID NO: 101016 - DNA, 512 bp, Zea mays
  Clone ID: MRT4577_23639C.1
gggggggtggtgggggttttttttttttttttttttttttttttttttttttttttttttttttttttttttggtttttttttttttttgcccccaaaccccaaaaacggggttcttcttttttttttttcaaagccacccccctggggggggggggcctttttttttaggggccaattaatgggtttttgacccattatttttgctcaaaacccgtttctaacccaaaaaatagagggtaacgggacaaggccgggcagccgaaaaaaccggggtcagcaagggcccaaagggtgggtttccctcaatcaatcaacaaatacaaaaatggggggttttctgaaatccctttgcggcccgctgaaaaaacctggggggttatcaaacacccccgggtgggtgaccgggctcccgggggggcaacttccaacacaaggtggctcctctgacaaggggccggagaggcccttttgtccccaagggaatcgaacattttgtcaaaaactttcaaa

SEQ ID NO: 101017 - DNA, 2945 bp, Zea mays
  Clone ID: MRT4577_2363C.1
ccggtaaaaacccccgggtcgacccagcgttctttttgattacagcccgttcatcctcgggtggcgggggggaatcccaccttccttcccccgcccgttaagcagccgagtcagcagcaatggcggccgtgctgaggagagccgtggcgcagtgcttcgcgtcgtcgtcgtcgtcgtcgccggttactttcgggctccggcggttcctgggatagcaggggcttttttttccgccgtgccgcccgaccgcttcatgcccctggccgaccggatccgggacctcggggtcggcgtcgcattcccgcggatcaacctcgacggccccgtgccgtacgccgacttcctgcgcctctgctgcgacgccgccggcccggacgcgggcccctccgtcgcgcgcgcgctcgacgagtccggatccgtcatcgtgctcggaaagaccgtcttcctcaggcccgacatggaaaagattcaaagaaagggcgctgttctaaaacgataataagagatgttgccacccaaagtttgggcaattttactccgctccaagatgggagtttttcttctctcaaaaccaggagataaaaaccttaattttaactccccctgtccaaatcttagaggatacaagaatctgaatctgactccgatgaatgaacatgaggagaattcacctaaccctcttctagacaccattaatttcgaaataaagaagttagtatttcatttggtaaatatatattggcaaagtgtagtatttcaatagacaatttacagatgtagccccatcacatgccagtggtggagggtcgaattgatgaatctgttaacttgtataaacttagttaaaaataagttaagtatataagtaaaaaaagtttattgtagagtaaaattgttaatctgaatgtttatgccactttgatttgattttaagcgtaggggaatcttctgattttgcggggagtaaaccactaaaggttcattgtttgatttttcattatatgtggcacagaaatatcttccctttgataaaacaactaagggagttctatttttttgacatcagataaaaatactttttcacctttcctgtttgtgttacatcctatgtttatcagaccatgctgttctagttactaacttactattgctaatcattttttttctcctagctgaatgcattatcgtcaccatccatttgaataataggatactgatgcagggctcaaaagttatggctaacctgctttccttttgttttgggtgaccgaaacaaagtttggtgaacacttcacatgccatgtgactcagattagtgtcatagcattctttggcagcactagaactctagaagcacctttaaccttttttttaagaaaaacttgtctagttgtgttttcggtggctacagccagacagtttggcaaattgcccccattgcggtggtggtgccgtggtgggctgttaaaaaaaaggacatttaaaaactcttttagggctagcgtggcaactccattttctattgagaaatgaactaattttccttgtgaaaatggaaattatcttcggtaagccatgggattgagttggattcttagagaggattttagtttccaaactagccctcaatcctatggattctaggagaggattcgagtttccaaactagctctggtaatccaagggatctagtcagattttcggagaggatttgggtttcgaaactagccctcaatcccatggattctgggagatgattggagttaaaaatctagctcttacatgatttattacctgcatttgttctttacatgctacagtctagagtatatggtttttgtagggcatggtccagagtagttgctggaggtgtttcccatgcacgttccatgttcaattatacacaatcctatcttgcacaatccattcccacatcagcatgggcattccgcattatttccttgtgcaaactgcattctctattgcagacaatgaagcaagagaagtttcttatttcgagaatatcataataatctgcatttagcatgagcataacattagcaatcgctctttcttttcgatggatctcctatggaaaaagaagagcagccaagtaaaccgtgggaatgttttttttgttgttgtcttgtgttcgatggcaacacccaggtcgtgaaggcaatcgagaacgcgatccccgtgcggcacgccgccgccgccgcccgcggagatcgaccccgcgagggaggaggagctgagggccatggaggcggagaaggcggagatcgaccgcgcggcggcggcgcgggtgcggcgggagctgtggtgcgggctgacgtacctggtgatccagacggccgggttcatgcggctcaccttctgggagctgtcgtgggacgtgatggagcccatctgcttctacgtcacgtccatgtacttcatggccggctacgccttcttcctccgcaccaagaaggagccgtcgttcgaaggcttcttcgagagccggttcgcggccaagcagaagcgcgtgatgcgcgcccggggcttcgacctccgcaggtacgaggagctccggagagcctgcggcgtggcggcggcgccgccgctccaggcccggaccccctgcgcgggcgcgggcgcggcgcgggagagcggccattgccactcctactgccattgccattgatcttggcctcgctcggttcattcctttcttttttttttctttgttgttcatgcccatttggtggggatgatgattcgtgtatccatctgatgcgcgcgcggatgcaaaaaaaaaaaagcatactgaattgaggtttaaacttggaaccagggcttaagccatgtccaaaaaaacgtaaaaaaaaaaaaaaaaaaaaataaaaaaaaaaaaaaaaaaaaaaaaaaaaaaaacagctcgagggaggggcccgggtacc

SEQ ID NO: 101018 - DNA, 150 bp, Zea mays
  Clone ID: MRT4577_23640C.1
ccaacctatattccctagaaaaaaagcagctcctccgcggggcggcaagctactacccatagccaaaaccctagccccaatccggcaaaggagcactactacttagaatgacgggcacccctagccagaaaagcttttttttccaaaagg

SEQ ID NO: 101019 - DNA, 373 bp, Zea mays
  Clone ID: MRT4577_23641C.1
ggtccttgaaggaactatgaatggtgacactaggattttggccatcaagaattgcggttccacacatttactacaggcactaaccgtaactttacaacatcatacacaattgtcaaccgatcttacaccttacatgggtatcacataccctgtcgatgcaacgatgaaatcgaccacccggcatccgtcgctagattcggcgcctagatattgttctattatcactcatttatgctttcgggctcgaaatagcaaggctaaatatatatatcatcaataagcctgaccaaacatttccacaatcgaattggaaatcagcattatcaggtaaatagcctctgaatcatacttgttatacgccattgggaactca

SEQ ID NO: 101020 - DNA, 423 bp, Zea mays
  unsure (1)..(423): unsure at all n locations
  Clone ID: MRT4577_23642C.1
cacaaaaanacnaaanaacgggcaacagtcaaattcaaaactaaaaaccccaaaaaccacaaaacaaaactgtatgttcactttattccttcacagtctccatacgccaaatctctgtttctcattcaacaaaaaaacctctaatctcatgtctatgtcttgtctatagatactatcttactctctcttcgagaacttatgtctttaaaacggtctgagttcgactaccgtgttgcggcacggagtctcaatgacatctcataacttgaccccctgaaaattggaagtgatattatatcttcagcgaaactactcatcccactttaaggtcccaaagaaactgtcaatggcttcatcatccaccccttattgcttaaactattagaaagttagaaaaaaaaaacttcacctttactctttctc

SEQ ID NO: 101021 - DNA, 265 bp, Zea mays
  unsure (1)..(265): unsure at all n locations
  Clone ID: MRT4577_23643C.1
gggcgttgcttcntnatcatctggtacaacttcttcgtgcaccggtgcatnntcatcaannggttnttccactggaattagcagctcgaatggtgatgcttcagctcctcttccggcgttggtacaaacaganttcctcttcaatggtntactggtgggtnatcntcatgcttttatggttctccaatgggcggtaccaacaggagnagnagcagtagttnancggttctggaggtgtggtgttgatccaaacaanagtgcatcc

SEQ ID NO: 101022 - DNA, 245 bp, Zea mays
  Clone ID: MRT4577_23644C.1
accaaccttgtcatacttgtatcttttatttctaatgcacaactcttatacaatagggaggcttcctaaaaaaaaagggaacactcactatacaaataccatctggaaaaactccttcaaaatatacactgaatccaatttaattctcatcaaattcactagctaatactacatgacacttaactaaccatatattacgcatcaaaaatttagaatatctatcacttgataccccatgacacatt

SEQ ID NO: 101023 - DNA, 246 bp, Zea mays
  Clone ID: MRT4577_23645C.1
gccggccggtcagaaatgtagataattggctttattgtctgctgaatttggtagaacgtaatgcaattctggcgtcagatatagtggtctatataagccttttccatcctgtaatatatttgttttgttgaactgtatgtgtggtactccgtatatgggtttgttctaagggagcaaggctttgtacaggcacaaaaaaaaaaaaagaaaaaaaaaaaaaaaaaaggcccctaaagacggccccca

SEQ ID NO: 101024 - DNA, 696 bp, Zea mays
  Clone ID: MRT4577_23646C.1
gcgcttggtcttttggttgtacttcttagcatgtaattgaaagttgtgcataaatctcttgcgcttatatgaacaggaacatgttggagatggagtagagttgctggatgatgatatgtttgtgttgctattgttcaaaaattcaccaaactctacttcagtgagtgcacatggatgcgaggagtagagtgcctcgatggcgaggcaggttcatccagacaagaagaaaccatgatggaatctggatttcccctctatccgatggaatccagattcagtgccagtccgttttcctgtgattttgggataccagcccaattccccttcatggagggtatgcgttgctgttggttggcacaccggaaggcagaacctttagctgtgaaggcctgtgactgaggtcatttcatgcaactaacaattctggtgaagactatccaatcttaggacacaacatgcaacaattagacgtatctatcatgatccttctataatttaacgatccttatatagtttaacaagtattatgtttttctgtaaagcttagaaatacttattttgttaatgcatagaaaatcaatgaaaaaaatgtagagcttttatgaaagtcaaaatggacatcaacgatttacgctaaaacttgtacccatttacgctgttttagttcacattttatgttgtaatccgttcgagtct

SEQ ID NO: 101025 - DNA, 566 bp, Zea mays
  Clone ID: MRT4577_23647C.1
cctcggattttttttttttttttttttttttttttttttttttttttttttttttttttgggggggggtgggtcttacccatttctttttccttttttaaacacattttatttacacattgcttgtgtttaacatttacttaaacccccaaattcattgtatgggggccaaagcattccatctcccctttgtagaggatgcttcctgggggcgcggggggataaaaaaacaaatacggatgcttttatatttcaccaacccaaaacccctccaatggattggagccagcctgagggagaaccacaaactcaggtgggagcagcccgacctggttgatttcatagaacccggccatcaaatcttcaggaataaaccacccaaaaatgtcaacgttctacttaatcccggactggggggggctataaagaaaaacactatggcccatttggattccccaaaaaaaagcgacccgggcaggcgttttctgcaacccgcccgcaacagagaccacagtggggttcttaaggacacttgggccattgatccaaggagatccaggggagcct

SEQ ID NO: 101026 - DNA, 510 bp, Zea mays
  Clone ID: MRT4577_23648C.1
gggaaaaaaaaatattttttttttaatcccccttttcccaaaattaatttaactggtccccaaaaggcgggccccaaaagccccaaagggaattggggtttttggaccccctccccgaaaacacccacccccgggggctcggaaaaaaaaaaatcaacgggtgggggtttgacaaactggggggaaacaaaaaccccaaaaaatttgggccttttcccccgggggggggggccccccaaaaaggtgggacccatggccctttaatggggccaaaaaaaaccccgttcggggggccccccgccaaagtcaatgggtccaaaacaaaggttcccccaacccgtaaggggaaacgtttttaaccaaaaaaacgggggggggccgggctccccctaaaaaaaatttttttttccccggttcccgggcgggaaaaggaggtcccaaaccatttttttgacccccctgagaaccccaaaaaggggtccaagcccgttgtgggccaccaccccggcc

SEQ ID NO: 101027 - DNA, 527 bp, Zea mays
  unsure (1)..(527): unsure at all n locations
  Clone ID: MRT4577_23649C.1
aattcngcacgaggctcccaggctcggagggcggaaggctcccanaaggggctctcacctcgcagccatgtctggggcgtgcgtgcttcttctccctcggggcctccccttctccacagctatcgggttggggttggagtggagatcgacccgggctcggaattcccttcgttggggaggggccctaatttgggcagatggggtttccaacttcgacaaagcccgcgagggggatcgagctcaggtgacgcgagggattgggaaactaagtggcgggggtgaggaattttctaggaggattggggtgtcagcgcaaactcccatgctcnacgctgaggaccaaccctggcggagatgacnaggatcttcntgcancgcgggaccggcggctcctcgtccagcgccgggcgcgcggacacgcanccagtgcanccggcancagcgtgccgggaggaggagtgtccggtncaacctcaaccacaggtgccggagctattgggcatagatgagacaactgagaatttaaa

SEQ ID NO: 101028 - DNA, 411 bp, Zea mays
  Clone ID: MRT4577_2364C.1
ggccgcttttttttttttttttttctttgtttttttttttttttttttttttttttttttattttatttttttttttatgtttttgtttatactgacacccatgtttatggtttgaaaaacattacttcatttgacgataaaggagtaacaagagagcgtaggtagctagccaacggaatcgattaggggagtactacaggacatagctacctgaggggaagacaccgcgggcagctccctgagcaagggcaaaaaaccaggctgctgcagctgaaggccccacatagacgtcagcagatgcactacctgggccgccatcagcgccgggagctagccctgcgggtgcggcatgaaggaaggactgcaggaccacaccgaatggcggcaggaaccggtgcagcggctccacc

SEQ ID NO: 101029 - DNA, 434 bp, Zea mays
  unsure (1)..(434): unsure at all n locations
  Clone ID: MRT4577_23650C.1
cggctcgggaataaaaagcccgacaggtgaagccgccgccgctgcagtgtccatagccaccgcaggagactgaggtggggggttttgtcatagaccctcacagatccaatgcggtatctttcaaagcgtctatccaaggntggatagtatcacacaaagaagcgccgcgcctggcacagacagactatcatgtgccttggatcaaggcttgctctaactcattacacaaaacatgtcccatacacccaaaacagatttgttgctgcgatttaccaacaagatcatcacatctcaatatcatctctgcttagtatcagcacgctgattatgggttccttgctctctgctttacatcgcaatgaagttgccactaatctggtctatgaagttggtctgaccaactatgcagcctgcctatctgcacctggcccttt

SEQ ID NO: 101030 - DNA, 579 bp, Zea mays
  Clone ID: MRT4577_23651C.1
ggaacaaaaatataaaacattttgattctaatagttctcaaaaacagaaaaaaaaaagatttaagcaaagggaaaaaggttgtcttaacattacaaacaaaaaaggatgaaagaaggcccccttttctttttttttttgggttattagcattcgaaatacctaacaaagttaaacaagtaacaacaatgacccttcaaaaaaagagagactgaattcaaacaaaaggggctttacctttagttaaaccggactaaacaagaccggttaaaccaatttccagggttcctcgagggaaaaaaaagctttggctctgaagttaacttacattgtgggacttagccattcacctccatcgcataattgctgatccccacgttaaaccggctccaaaaccggatgtcgctatggaatgccctggttaaacttttccgcttctcactgcctcatcaagagccagcggaatcgaagcagcgctcgtgttaccataattagccaaattcgatatgactctctctggggggaaatgcagccttgtagccacagagtctattattctctggttcgcctgggggaggagg

SEQ ID NO: 101031 - DNA, 141 bp, Zea mays
  Clone ID: MRT4577_23652C.1
ctcgactgatcgctccgtgccgacttacccttcgatccgctggagctgagcaaggaccgggcggggctcaagtgataccgggaggcgcatctgatccatgggcggtgtgcgagtgccaacgggactgacatcatcctgggg

SEQ ID NO: 101032 - DNA, 465 bp, Zea mays
  Clone ID: MRT4577_23654C.1
cagaaataagaattacatttccagattttaaaaaaaaataaaaaaaaaaaaaaaaaaaaaaaaaaaaaaaaaaaaaaaaaaaaaaaaaaaaaaaaaaaaaaaaaaaaaaaaaaaaaaaaaaaaaaaaaagtaacctttccctgccggcgcggggggggggggcaattcctgccccctgcagggccatacttgtggcctggggctaattccaatcctttcccttttcctggcaatatccggtcccggggcaaaaagggtatcccctggggttcctactgagtgtacctacctggcattatttggggtgagctcactgccccctttcgggtgggctatctctgtttgcttggtggtgctcgcttcccccttcccccggggaaaaccggttgcccccttggtttctttttcggttcctcgctcgctgactggctgctttctgtttgggcggctttttcccctcgtttt

SEQ ID NO: 101033 - DNA, 199 bp, Zea mays
  Clone ID: MRT4577_23655C.1
tatattctccccctttccgtgatagctgtaatggatggggtaattgtagtggagctgttaaggcggctggggtgcggttgcgacagactgtgctgcgccgacaagctgtgaagaggaggcagcggcggctgtgtgggacttgtgaaggggtctttgtcgaaccagctggagcgggcggagatcatgctccgcgaccaca

SEQ ID NO: 101034 - DNA, 732 bp, Zea mays
  unsure (1)..(732): unsure at all n locations
  Clone ID: MRT4577_23656C.1
aattcggcacgagaattcggcgcgaggcatctccgtcggggcggacaaacagacgacacaaggcgaaggcaccgcccgcacgccgacacgcgcggctacacctgccactcctcccgatctcgccggccggcgactggtgcctcccgccccagccctcctccgggggcgatggaggcggccttcgacgcctacttccgcgccgcggatctggaccgcgacggccggatcagcggccaggaggccgtcgccttcttcaagggctccggcctcccgcagcccgtcctagcgcagatttggacatatgctgataaaaatcggactggtttccttgggcgcgaagacttctgcaattcgcttaaacttgtcacagtagctcagagcggtcgagaattgacacctgatattgttaggtcagcattatttggtccagctgctgcaaagatacctgctcctcggataaatgtttctactgctggtcctcagacaaacagtgtagctagccccccgaatgccactcgagcactagggtctggtcaacagaatcctgctgtaagaggaccacaagtgcttcctggggcatcatcaaatccacaagtgaggccgccacaacctccaaatgcaaacactgtgcccnctgttcaaggagttgcatcaaggccacccgtgggaggtggtcctagtgggctaaaccataccagctcaaccacaacaaatctcgctacggattggttt

SEQ ID NO: 101035 - DNA, 326 bp, Zea mays
  Clone ID: MRT4577_23657C.1
ggttgatgcacatagtttttttgttaatctggctgaagacccgaggttggagtacaaccttgggggcagggagtacattcactacctttgcggactgaacatctacaactatttattttacgacataactgcccattgacagaacggctgcattctgaaggtcaccacggatcagggggtaaattaccataccctagttgtttagccagtggtccattgcatcaccgtcctgcgcaccgtgaccttatgggagcaacgatcaagtctggaacaaaggcgctataaacagccctctatcacgtctgacatgagtgctggacctatta

SEQ ID NO: 101036 - DNA, 1600 bp, Zea mays
  Clone ID: MRT4577_23658C.1
tcgaggccggccgggacacttccagatgggccccatccacctcgatgaaacaaaagtatgttctgtctgccaggtaggtcccgccggaacggatcccctgcttcttctaccgaaatcgttgcttccgacgcaccagggccgcgcgccgccggcgaccttgccgtggcccttctacaaaactgacccccgtcggagcaccgccatcggatgcgacggagacggcgtcaatggcgtcctcatctgctgtcgagcccagtttccgcctctctgatcgagagaggaggtcatcgctgggactcagattcacggtgctcctgatgcacgtcgtgttcgttggcgctgtcttcatcctcgatccgaccctcgactggcgaatccacgaggagccgtggtatatagggttgtatggagtgctggttctgctcacgctagtgcaatacttctacacagctggctcatctccagggtatgttattgatgtaatgagagctggttccatgatgcatgcaaccttcgtcaacactgctgctctttcaaagcagtcaaattcaagaaatggaaacacaaattctccaacgagtcatgctcaactacagaaacttagcgcgatgactcctacatcatgggcacagatggttgtggatctttatcctccagggtcaaacagcagggattggacttgcactcactgcaggattgttcagccacctcgtactcggcactgccatgactggataacgtcctttttgtggtacatatctgaagaaacaatcttgtgtatctggactgctgctctctgcatcgagtcattgtgtttagatgtcgacaaggcctggtggaaggattttgttggtgttatcctgttggcagcgcttatctttatcctgatattcctactactattgtggttgtttcattcgtacattgctgtaacaaatcaaacaacctacgaagttgccagaaggaagcgaatattctacctaaggggagtacctgaaagagtccacccattcagtagaggcatatgcagaaatctctatgacttctgctgttctagccagaagggatatattctggaagctgtgcccccaagggaggagctggaagctagagctgctcgttacacgtgccgagacgtcatttgctgccgttgctgctgatagtgttgtaccatagcattctgcccatatagcccagttgcgttgttctctgttcaaggttaagttaatggaagcaaattttagtgtcctgcggccgttagatgcccccagagttcattatttgtgcatagtcatttgtacatttcactcagaaaaatgtgcgctctgagatccagttgttcacattctgtatggctttgaattgaaataggttttcaggacagacagaactgatctgtacttcagttttttagtcgaaatgtacatttgaggtcgtgttggtaatttattttaagattttcttatattaaaaaaaaaaaagcgaaatattttatttatcttgataggtttttgtaacgttgtactgatacatcatgtggtcctatttgcataaaaaaaaaaaaaaaaaaaaaaaaaaaagaagtttaaaaaaaaaaaaa

SEQ ID NO: 101037 - DNA, 506 bp, Zea mays
  Clone ID: MRT4577_23659C.1
gatcctcgaggaaaggcatggacacattggatgcacggctaggggccatgggatctgcagaccgcgtgctgcaatctgcaggcaaggctgcccataatagacgctaatatgaactgtggcggatggttggaaggcgagccgacagggggaggcgcgatgccctgatgccaaaatggatgaaaattaaatatcgaaccttatgcaggatattgaagcacgtgttaaagtagagaccggggcactcggacggatagagcttgactcattgatcaatatagtgcataataaattagaaattttgtatgacacacatactggatgaacaccatttcgtgaacctcgttattcttgagtggtgaaactccaacgcacgcgcctggatcaccatcatgatgcttatcatactctaatgctataccttgaagcaacaacaatgcatgcatggatgcggacttatatgctgaagcccacctgtgctcctattatccctcttggtgataatgggg

SEQ ID NO: 101038 - DNA, 1567 bp, Zea mays
  Clone ID: MRT4577_23660C.1
gttcccggaacggatcccctgcttcttctatttacatcgttgcttccgacgcaccagggccgcgcgccgccggcgaccttgccgtggcccttctacaaaaccgacccccgccggagccccgccgtcggatgtggcggagacggcgtcaatggcgtcctcctctgctgccgagtccagctcccgcctctctgatcgaggcttttatgcagcgaggaggtcatcgctgggactcagattcacggtgctcctgatgcacgtcatgttcgttggcgctgtcttcatcctcgatccgaccctcgactggcgaatccacgaggagccgtggtatatagggttgtatggagtgctggttctgctcacgctagtgcaatacttctacacagctggctcatctccagggtatgttattgatgtaatgagagctggttccatgatgcatgcaaccttcgtcaacactgctgctctttcaaagcagtcaaattcaagaaatggaaacacaaattctccaacgagtcatgctcaactacagaaacttagcgcgatgactcctacatcatgggcacagatggttgtggatctttatcctccagggtcaaacagcagggattggacttgcactcactgcagggttgttcagccacctcgtactcggcactgccatgactgtgataaatgcgtccttcaatttgatcatcactgcatatggcttggaacatgcattggcaaaaagaaccattgtcgtttttggtggtacatatctgaagaaacaatcttgtgtatctggactgctgttctctacattgagtcattgcgtttagatgtcgacaaggcctggtggaaggattttgtcggtgtgatcctgttggcagtgcttatctttatcctgatattcctactactattgtggttgtttcattcgtacattgctgtaacaaatcaaacaacctacgaagttgccagaaggaagcgaatattctacctaaggggagtacctgaaagagtccacccattcagtagaggcatatgcagaaatctctatgacttctgctgttctagccagaagggatatattctggaagctgtgcccccaagggaggagctggaagctagagctgctcgttacacgtgccgagacgtcatttgctgccgttgctgctgatagctgtactaccatagcattgtgcccatatagccagttccactgttctttgttcaaacctttcgttaatggaagcaaattttagtgacctgcggccgttagtgaactctcggagttcactatttgtgcatatgtcatttaaacagtgagaaaaatgtgtgccctttggtccagctgttcacagtttgtctgtaaaattctgtgtggccttgcatccaaataggttttcaggacaggtagaattgatctgcacattcgaggtctggttggtaatttcggaatttagtctaccgttttaaagccaaaattatttgtgttaccagcgaaatattttatttatcttgataggtttttgtaacgttgtactgatacatcatgtggtactatttgcataatttgtgtttcggc

SEQ ID NO: 101039 - DNA, 2037 bp, Zea mays
  Clone ID: MRT4577_23661C.1
cgggatctaccaaaaagtacgcaagcaagccaagtgctcaccgttgatcgataatgctaagcgcgacggccctcctcctcttcttgctcctcctcgtctctgtgattgctcttcttgtatcatcaaatcatggcaaccacaatactggaacgaaatcaaagaagaagcgccctcctggcccatggcgactcccgttcatcggaagcatccaccacctgctcacctcgcagccgcaggccactctccgcgacctggcccagaagcatggccctgtgatgtacctccggctgggccaagtggacaccgtggtggtctcgtcgccggcggttgcgcaggtggtgctccgtgacaaagacatcaacttcgcgtcgcggccgtacccgtacctgctcgccacggagatcatcggctacggcggccatgacttcgccttcgctccctacggggcctactggagggcgctgcaagttgtgcacgctggagctcctcagcgcgcgcaaggtgaggcagctcgcgcccatcggggacagcgagactatgtccctcgtcaaggagatccgccgccgttcctgctcccgcggacgacgacgacgacctcgactcggtgccggcagagatgttctgcctgtggtctcccgggtggtcggtcgtagccgtagcagcgtcctcccaggcgcggtgcaagaagagtggctccacggggtctgtgctccggtggcggccccggctcgccgtcgggcgcagccagagcgacggcaaaagttcgtcttcctgagcgcctcctccgacgggttcgggcaccggagccagaaggggcgaggcagcgccgtggacgtggagggtggtgtccgagctcatgaggaacccggaagccatggccaaggcccaagcagaggctcgatttggtgcttcattgtgtccatggggtttcttgacctgggcctctggggcttcttcatagagaggaggtcatcgctgggactcagattcacggtgctcctgatgcacgtcatgttcgttggcgctgtcttcatcctcgatccgactctcgactggcgaatccacgaggagccgtggtatatagggttgtatggagtgctggttctgctcacgctagtgcaatacttctacacagctggctcatctccagggtatgttattgatgtaatgagagctggttccatgatgcatgcaaccttcgtcaacactgctgctctttcaaagcagtcaaattcaagaaatggaaacacaaattctccaacgagtcatgctcaactacagaaacttagcgcgatgactcctacatcatgggcacagatggttgtggatctttatcctccagggtcaaacagcagccacctcgtactcggcactgccatgactgtgataaatgcgtccttcaatttgatcatcactgcatatggcttggaacatgcattggcaaaaagaaccattgtcgtttttggtgagtttttaatgtggtacatatctgaagaaacaatcttgtgtatctggactgctgttctctacattgagtcattgcgtttagatgtcgacaaggcctggtggaaggattttgtcggtgtgatcctgttggcagtgcttatctttatcctgatattcctactactattgtggttgtttcattcgtacattgctgtaacaaatcaaacaacctacgaagttgccagaaggaagcgaatattctacctaaggtatatcgctgtaggagcgacgcagtttgtgactgaccgatcgatgacaccagttctcaacttgcacctcaacaactcttcgacggatcttcgcttcgcatcgcatgccaaactctctgctgttcggtttaaagaaagcgacagaacagaagacattgtgccaaattctcgcactgctcactgctgggcgctcctgatcaaatcctatgaccttcaacttgacgaggtccgtccactcttggggatgcctgctagtgaggttaaagatgcaaacttttgcagaaaaagtcatggtctacacaaactgccccggcttgactga

SEQ ID NO: 101040 - DNA, 291 bp, Zea mays
  Clone ID: MRT4577_23662C.1
atgccgttaatggggctcggtgtatgcggctcgctctgccaaggtggtgatgagaatgatggttttgattatgcttatggtactggttgtcagcgttgcaaccactgctcaggtgaagatgacgtcatggaggaggacttccaggagtttcaagagtacgatgagttcttggcgtgggttagcggcaaacccccaatcggctgcctgtgtaggccgtgtgtatctacgtttcttttccgcactttgattattgttaaagactatgtggatggctcagacatcatgatgtaa

SEQ ID NO: 101041 - DNA, 693 bp, Zea mays
  unsure (1)..(693): unsure at all n locations
  Clone ID: MRT4577_23663C.1
tgaaaaaagaaatagaaaagagaagaaaaaagtttggtatggacttttatttggtggcccatctagaagcccattaatcacagacacatccgtcctaaccttttcactactcccgctccctcccccacggcgctcagcacgcaagtgcggcctgcagtcctccgtacaccggccggcgtgccccaagcgtgaccgtcgcgcgcctgcgacttccgccgtgcccctgcgacctccgccgccgcgccttacgtccgtgggcaaggcgagctggacgccttgccatccaagcgcgccttaacgctttagtgtcgcttcagcgacgccttagtaagcatggtgactggcatatgcatccgtgagttgagacatgaaaccttccactgagactggctttaggaaaaagtctatataaccccgtaacctaatgttgttgctctactcaccgactaagtgcctaacttatataaccccccatgaaacccaaattgtaatgctgcattgttgctataattgctactgtgattacataacttgatctaaactagtaggacatttgctctagacctacatccatttncatttataatgttcttgcccttaagatgcggcttggtctatgctccaaaaaaaataatcttgttagaattgttatgaatgtgtgtgtctgctaaccacccgtttccatatgctttt

SEQ ID NO: 101042 - DNA, 2522 bp, Zea mays
  Clone ID: MRT4577_23664C.1
cccacgcgtccggacagcacccccgcagggccgcagaacggcgctcccccccgctccgccacactccccagaggttctgaacgcagatctctcgccgcagctcggcctcgcgattccgctggagactgttcagctcctcgccggcggcgccgattcgatctgacgcccacgcagcagaaggctgaaggagggcactgggagccgagggggaggctaggggttaggactccggcgtgatgcagcgcccgggacgacttcagcggtcggggtccaagcgcgggctggaacccaccggtggcggcgacgacgacgaccatgcgcccaagcgcccgcgcgtccccgccctcgctagtgtcattgtggaagctctcaagatggacagtctgcagaaactctgttcatcgcttgagcccattctccgaagagttgtaagtgaagaagtagagcgtgctttagccaaactgggtcctgctagaatccaaggaagatcctcccctaaaagaattgaaggccctgatggaagaaatcttcagctccagttcagaagtcagttggctcttccaatcttcactggtggaaaagttgaaggtgagcagggagcagctatacatgttgtgctgttggatgcaaacactggatgtgttgttacttcaggacccgagtcatttgcaaaattggatatccttgtgcttgagggtgactttagtaaagaggaagatgaggattggacagaagaagagtttgaaagtaatattgtcaaggagcgtgaagggaagaggcctcttttgacaggcgacctgcaagtgactcttaaagaaggtgttggaaccataggggagcttacattcactgacaactccagctggataagaagcaggaaattcagacttgggctgaggattgctcctggcttttgtgaaggtatccgtgtccgagaagccaagacagaagctttccccgttaaggatcacagaggagaattgtacaagaagcactacccacctgcgctgaaggatgatgtttggagattagaaaagattggcaaggatggcgcattccacaagaagttaaatgccagtgggatctatacagttgaagatttcctccggcttcttgttagggatcagcagagattacgtagcattctgggcagtggaatgtcaaataagatgtgggacagccttgttgagcatgcaaagacatgtgtcttaagtggaaagcattatgtatactatgctagagactcaagaaacgtgggtgcaatattcaataacatctacgagttcactggtttgattgccgatgatcagttcatttcagctgaaaatctcacagacaaccagaaggtctatgctgatgcattggtaaagaaagcatatgaggactggatgcaagttgtagaatatgatggcaaggcactcttgagcttcaagcagaaaaagaaaactgtcacgacaagaagtgacgttgcatctgcctcaacaagcaatcctgcttcatatggttcggccaattcacagaaacagttgtctcttccagcaaaagctggacaaacttcctcagcgggtactatgaatgaagcagatggaactagaaatgcatacaacgcaaatggaaaccagtcagcaagatatgcagccaacactcagagcattcctgcaaacgtcggcatgcaatacgacgggagtgcagtgtcgcctgaaatccagtttagtggttcatcccttcagagtcagtcttcaagagggtccaacatgctagcattgggccctccgcagcaacatcaaagtttcgaattcccagcgctcggccagcccgttcagccaacaggcctgaaccctttcgaagagtggccgcagcagcaggagaaccgtggcggcggtgtcgacgactacctgatggaggagatccggatgaggagccacgagatcctggaaaacgaagagatgcagcagatgttgcggctcctgagcatgggcggtgccggaaccagcctagccgaagacggcttcaatttccctccgtacatgcctgcgccttcgccgaacgtgagctacgaggacgaccgcacccgcgcgcccgggaaagccgtcgtcgggtggctcaagatcaaggctgccatgcggtggggcatctttgtgaggaagaaggcggctgagagaagagctcagcttgttgagctagacgactagaaagtattgaaccctcgagctgttcatgtaccagagttttcattgttgatggtgtttgtggatccggacggggctcggctatggccctgccccttaggaggacagcagttctggtcctgagcttaattctggacaaaactattttccgtttcccccctttttgtatgtatagcttttttttttcttaccattttaaatgcgttgcttgtttagtgtgatgccggtagtcctgttgtgaaccttagcctgagctctgtacatccatctgttacagaattcaaatcgaaacaggtaaacattggcacttggcaataaaaatcaaaatgcaaa

SEQ ID NO: 101043 - DNA, 382 bp, Zea mays
  unsure (1)..(382): unsure at all n locations
  Clone ID: MRT4577_23665C.1
gacccacgcggccgcacgccgccgccgccgcncgggccgggccccaacgcgaaggcccggagcaaggggcacgagccgcgggggaagagcaaggcggaaccgcaagcgcagcnnaaggagggnaaggcggagcgcgcccggcaacgcggagccaaggacaccggcggggcgcccaacaagcgccccaagagcaagggagggcgcaccaccaacgcgcgcgggcngaccgacaacgcgcagaagcaaaaaacggcgccgcgcgaggcggacaagaaaaaaaaagggggncccgcacgacccaccggcccaagaagaccccgggccaaccgcaggcgccncaacaagcaccagcgcncccnggaaaccgagagggaaaagaagc

SEQ ID NO: 101044 - DNA, 234 bp, Zea mays
  Clone ID: MRT4577_23666C.1
gagagactagcatcaacagacatagagggggcaggcagcggcaggcgagcagcaacaacataggacgaagtccgaggagaaagatctgatctagataagagatcttggcctaacgacaatgatggaaggagactagcaggaggcagtcagatcccaagaacgcaaaactacgagaagagatggaccatggcagctgaggcggtgaccaaacgaacatgatacgagcacacgaga

SEQ ID NO: 101045 - DNA, 177 bp, Zea mays
  Clone ID: MRT4577_23667C.1
ataaaaaagaaaacgaccatttaacccggctggaaaaaaaaaaaatagaaaccatacgtattttcccagtacaaaggtgctcccattttatctgggcccacaaattttttaatatgcttgggaggggacccccccttaaaaggggggaagcttcatggccttccctttaaccagcct

SEQ ID NO: 101046 - DNA, 210 bp, Zea mays
  Clone ID: MRT4577_23668C.1
acaagcctctacactgagtcgtattaagcaatagaacacccttccgtgtgcatcgctcctccgtccacacctccctggtcagtcgtatacgaggatcatgccggctaacgtggacgccgcggcccagtaccggtaggaggttgcccttagcagcgttcccggcgtccagagagtgccggtgtgcagtggactgttcggtcatcgaggccc

SEQ ID NO: 101047 - DNA, 372 bp, Zea mays
  unsure (1)..(372): unsure at all n locations
  Clone ID: MRT4577_23669C.1
tttnttttttttttntttttttttttttttttttttttttttttttttttttttttttttttggtttttttttttggttttttcctggtatttctggtcgggtcctggagggggtccaacttttcctaaaggggggcggattaaagcttggggggaaccagggcccagggggcccccgggggaaaacggtaggcgggcaccagggcccccaccgaaaaaccgggagcgcaaaggggaaggccggggggcccaaagaggggggcaaaccaaaataaagggggtgggggcaaaggccggtttcccggggggaaaactggccggcccaaatgaataaaaaaaaaggccacccgcggggaaaaggggaaacccggg

SEQ ID NO: 101048 - DNA, 510 bp, Zea mays
  Clone ID: MRT4577_2366C.1
cttcttcgaatgagtatacgtagggcctgagaacgcgaacttgcgtgttcatttttttcttcttcttcttttcggtttatttagacgactacatttaacacttgttattccgtaaccaaatagtacaaacagattgccacttttatgattttattacttgtgtcgtaacgtgtcaaaacaaaaatttcattcttgtatgactacgaaaagaaatgtaaattattaattagttctgtgtgaacatatatcagaatctatcgtatctatggcttattttgtctaacagatttttttaattcttcaaaccgaagattatagatatatatacgtacgtacgtacataaattataatggtctaaaatgcatacgtcgttcattggcaagccaaaaaagtgagtcaacccgaagcgtaacttaggttgtgtttggtttcgaaggcagttaggataaacggtccgtcttgaagggaagctagataattcaacacttaaacgtaattttttttagagc

SEQ ID NO: 101049 - DNA, 205 bp, Zea mays
  Clone ID: MRT4577_23670C.1
gtgcatgcgaggtggtatatcttttatattgtgacataaattcaatttactgtgcgcggttttacaccgcgttgactgtgaaaacactgtcgttacacaacttaatctccttgcagaacatatccctttctccagatgtcgtaatatcgaaaaggcgcgcaccgatcgcgcttttcaacagatgcgcacactgtatgtcgaatgt

SEQ ID NO: 101050 - DNA, 170 bp, Zea mays
  Clone ID: MRT4577_23671C.1
caagcaccacaatcactaacaccatctgtgtcgttactcgcggaccatgccatcgtgcctcctggcgcttgacataaaccaagtcttcctttttcatgaatcctaaggagtgctccatttatataagccgtacttctacctgcatgacctgaatctgctcaagcccatct

SEQ ID NO: 101051 - DNA, 915 bp, Zea mays
  Clone ID: MRT4577_23672C.1
ttgaactaatgaacgaaggtcttaaaaaagatgaagtcctaaattcattggtgaacaaaataaaataagacgaagttactatcaaaacccaagctgaagctcagaaatgcgaaattgaagatcttcgaaaacagctggctgaagcaaaattgaaatgtgctattgctgaagctgaccgagacgccagtggctactggaaaaattactgggaaaaaacagttgtagagcttcgatctttaaaagaaagatgctatgaaaaatctgtagcatgtgtaaaaaagatgaaaactagtttcgccatgttggcgcatattcaagtgaagacaacttcgtacggggcgatcccaaagcccaattgaatgaatcagcagcgaggccgaagcctttgaggagattttaaatgactgtggggacgtctgtgccttctctagcgcgaggggaattgcagctattttggagaaggcaggttgcgaacatgtgaaaactttggcgcaagccgaagctgctttatgtattgatgatacgaaggacccctcggccgaagcaagcttagttggtggaaaattcttcactgacatctgggaaaatggtgggcgagggatggcccacgaaataataaagaagagcgaaaaagatactcatgatgctaaggaagcaacgaaggcagctgaaaaagctgtggaactcgaaaggcggatagagcccttcgagtcattggtcgacccagaggcaaaggaatcaacagaaattattaacatggccgaaagcattatggacgaagtcgttactcaactgctgaccgaagctgcagacaaagttttgaaagaagaagatagatattgtaaaaatattgctagaatattaatgtaacatttgttggactatgcttgtaatattggtgctcataggttctta

SEQ ID NO: 101052 - DNA, 288 bp, Zea mays
  Clone ID: MRT4577_23673C.1
agcagtggtaacaacgcagagtacgcgggtaatatgtgtgcagttttttttgtgggtgattcgtgatttgttgttgtacctatagtcgacgcaacaggagctctggcatttcgattcattctgtctagtgaaaggacactgccatcaaaaaaaaaaaaaaaaaaaaaaaaaaaaaaaaaaaaaaaaaaaaaaaaaaaaaaaaaaaaaaaaaaaaaaaaaaaaaaaccaaaaaaaaaaaaaaaaaaaaaaaaaaaaagtcctttgggtggtacccactgttaaagggca

SEQ ID NO: 101053 - DNA, 372 bp, Zea mays
  Clone ID: MRT4577_23674C.1
cccacgcgtccggttacctggatgttcactgttttgttggtacatgtcaaaaaaaaaggagaaaaaaaccatattaaaaaaaaaaaaaaaaaaaaaaaaaaaaaaaaaaaaaaaaaaaggaaaaaaaaaattttaaaaaaaaaaaaaaaaaaaacccaaaaaaaaaaaaaaaaaaaccaaaaaaaaaaaaaaagggggggccgttttaaagaatcaaagttaacgtacgcgtgaatgcaaggtaaaagtttttttatggggcaactaaaataaaattaatgggccggggtttaaaaacgtggggattggaaaaaccttggggtaaccaaattaaatggcttggaaaaaaatccccttttcgcaagttggcgt

SEQ ID NO: 101054 - DNA, 427 bp, Zea mays
  Clone ID: MRT4577_23675C.1
caacgcatccgccaacgcgtccggttctaaatcccaaccggccgcccttttttttttttttttccccaataaggattctgctcattcttaatttggacggatcagaatagaattgccaacatttggacttttttttttttttaaggattctaaacgatcacttaaatatcctgtgacattcctcccattaaccagcatattagtactacagcaaatgggcgcgtttttacagggaattataataatccttccatcatccatccatccacgaagaagaaaaataaatctaggcacggttccggctggccggaggaggggagcaagctaggcgaggagcgcatcggatccgaccactggggttggggccccggcggcccgagcccgatgacgatccgtcaccgcgtgtgcttgcaggggcccgcggcgg

SEQ ID NO: 101055 - DNA, 195 bp, Zea mays
  Clone ID: MRT4577_23676C.1
taaagggtcaccaaaattaaattcaatggccatctttttaaaaagtcgtgactggaaaaaccctggggttacccatcttaagccccttgaaaaaaacccccctttcgccacctgggttaataccaaagatgccagcacgattcgcccttccaaaaagttgcccaccctgaatggcaaatggaactccccctgtaa

SEQ ID NO: 101056 - DNA, 187 bp, Zea mays
  Clone ID: MRT4577_23677C.1
atcctattggagcatttcataaaggcctatggagcactaaaataccaactccctttttaagtaattcgccaaagactttatacaccgtccccaaaaaaaaaagccaccaacaaaccccaattcccccccccccggggaacaaaaaaaaacccacccaccccttaggcgcgaccacactaccctacac

SEQ ID NO: 101057 - DNA, 1164 bp, Zea mays
  Clone ID: MRT4577_23678C.1
cagctgattttcctgaatagcctctttggttacttatcactcctgattctcattaagtggtgcacggggtctaaagccgatctgtatcacgtgatgatatatatgttccttgaccctgctggagatcttggagagaatcaacttttttggggacagaaggaactccagatacttttgttgcttctggcccttgtagctgttccatggatgctcttcccaaagcctttcattctaaagaaacttcataaggagagatttcaaggtcacagctatcgtttccttgggacatctgaaatggatccagattctgaacctgattccgcccgagcacgtcatgatgatttcaattttggtgaagtttttgttcatcaaatgatacactccatcgagtttgtacttggtgcagtttcaaatactgcatcttatcttcgactttgggctctgagcttggcgcattcagagctgtcaacagttttctatgagaagttgctgttacttgcctgggggtatgacagtcttatcgtgaagtttgtggggcttatagttttttcttttgctactgccttcatattgctcatgatggaaacactgagtgccttcctgcatgcactgcgtctgcactgggttgagttcatgaacaagttctatcatggggatggttacaagttcaagccattttcatttgctctgctagcagatgacgaagattgatgcatgtgtagttcagcacgtaaacagattggttcatttcttacaaagttttggagcacaggtgtcaaatttcgtgggcaagatgggcttttcctgatacacagcattttgtcagaccgctagactttttcctagcgcatgagtgcagttgtcgttgagattgccagccttgtggaaggagattttgtaagtttacagcaatattgtagagggcaagttcatcgtacagttcctccaacggagatgcagattatagttgctaacaaaaaaaaggatagaaatgtagacttgtccgcgtacttttgacttcaaatttatcagcatgactgccccttaccacttatgaatgaaaaatatgtatttggccattcatacaaccgtcgctggaagaaagacatgcacgctattgtactgttttgttttacaaatcaaataaatagctctaatcgtgct

SEQ ID NO: 101058 - DNA, 587 bp, Zea mays
  Clone ID: MRT4577_23679C.1
ccggccggggtctgcttccctgctctcctctcatatccgctctatttttccctctcctctgcccccctctcctgtctcgcccacgcaagccgtattccgaagtttcccccctcggaccctctcaaaagcttccaatttattgtgtagcacacaagaatgtcggacgtgaacatctctgacgtaggagtctctgcagtgttcttcgctagctgcagcctagtctctatggacccaaagctactcatctgctcctcgaggagctccagccgaagtctgctccgtatagttgcaactgtcgtcagcccaaagacacttacctgaagctgtgggagatatggcgcttgtgttgtttggtgcgacacatcagaagacggatgatgtcattttgcttccgtctactgtgctgagtaagccaccgagaggtgaggctggtgctgtagtacatggaacggccctttgcgacaggaagatatctgtggatatatagattgtgactatatacggatactctaagaatggtgggactgaagtagaattcagtgacactatgcatctgattctcaaagaatacttaatcattgagattc

SEQ ID NO: 101059 - DNA, 299 bp, Zea mays
  Clone ID: MRT4577_2367C.1
attcggctcgagctgggtcgaccagctcactttagggccgacgcattttctttgaagagatgggattactcttgcaatggaccagatcgtcttctgtctcagaatgaatcggtgggccatgagagcacacagctgggcctagaatgtagcacacctggtgtatactctgacaacagggaaatacatgacgtgaagcagggaaaaagactgccaatccaggctgctagaggacggacctcctatggtgcataattataagcacgagcagatgcaggctcgccctgttgcggacaacgcag

SEQ ID NO: 101060 - DNA, 655 bp, Zea mays
  Clone ID: MRT4577_23680C.1
ccggccgggaacctccttctttcgcatacaatatcccaacaacacggcacgaaacgacaacgacttcttgatctcgaaaccccttctcgtccatcgtccattttttgcgcttcttcgattgataccccattgctattttctagcgctcgacagcttcacaaaacacagccaaaatgcctgagcaggaagccccctacgacccctatatccccagcggccaggctggagcccagcagcagcagggtactggcggcaatgctaggacgcaggcgctgcaagctcaaatcgacgacaccgtgggtgtgatgcgtgacaatatcaacaaggtatctcaacgtggtgagcgactcgacgctttgcaggataagaccgacaacttggctgtttcagcacaaggtttccgccgaggagccaacagggtccgaaagcagatgtggtggaaggatatgaagatgcgcatgtgcctgattatcggtatcattattctgctggtcatcatcattgtcccttctgttgtggctacccgttaaagcccaataaaagctttgggtattggtcctcacgatgcacacgcttgggacatgacgaattcgaataatcgcaagctacgaccatgggttatggaaccttttttgggcaactggccattattgca

SEQ ID NO: 101061 - DNA, 343 bp, Zea mays
  Clone ID: MRT4577_23681C.1
cagcaaatcgacggatcaacgagagagagagagagagcggacggacctacgatggctgcaggcagcagattggtgagagagaggcggagcggcttcacggtagaggtgaagatcgcacgagggaggagaggcttcgggagagggagccggagagcgtacggcacggaggaggataggcttcgggagagggaggcagagagcacagggcggcggcgcggggcgtggaaggaggcagcagagtactaggtcatcacgggagaggggttttgcgttgagcctcctggcaggtgggcctagtgggctgcagactcatgaagagaggaggtgggggccgacagcaacg

SEQ ID NO: 101062 - DNA, 351 bp, Zea mays
  Clone ID: MRT4577_23682C.1
ctgactcgtgggaaaaaaaaaaaataaaaataaaaaaaaaaaaaaaaaaaaaaaaaaaaaagaaaaaagaaaaataataataaataaaaaaattaactaactcatacattctacttcataaattcttatataataaaacctatataaaattaattaaataatctatatacaacattaatacatattaaaacattatcatttcccaactccttttaatttctatcacatttccctttatacatcttgctcaatttgtcaacatgttcttacccatctatacttcctatcagttcctcaattctgaatggctattttttattaaccctctaattttacattaattgcagcggt

SEQ ID NO: 101063 - DNA, 160 bp, Zea mays
  Clone ID: MRT4577_23683C.1
cggacctctcgcctcctctctggcgttgtcctcgcggcgccctgctccgggtcctcaatcctgcgccccgtcttccgtgcctaccggctgcttcgagccagatcgatacaagcggagccctgattcggtcaacgcgccgagcggttagccggattctctc

SEQ ID NO: 101064 - DNA, 423 bp, Zea mays
  Clone ID: MRT4577_23684C.1
ccaaagaatcaaacagccacccttaggtaaagagttagaaggagaacatcatatgttgcaatgtgagaaccagatagcggatgaagaatatatgagtggacaacgccagagagatccatagactttccatcatcgatttaagttgagaaccttattgaagcctccattcatgcatctggcggttatggaaaaaggattttcctcacatcagagacccccccacatgcggggcagcatctactgccgggctttcactccactggagcataaacgacacacgttctgcttgagtgtataaaacggacacgaatatggcctcttatgatgcgaacagtacgcggtcaacagctcgggtgcgggatgtatcctgctaaatccaccaaatagcccacagtcagagcccaacaccaccttattcacccc

SEQ ID NO: 101065 - DNA, 444 bp, Zea mays
  unsure (1)..(444): unsure at all n locations
  Clone ID: MRT4577_23685C.1
ccacggacccgcgggggcggggaagcgccgcncgcncaggaggacagccanggcgccggagccggagganganannangaacgagaagaanccccgcccgcncgacgaggacgacancgcgccccncaagaccgaaaagaggggaaaaactttttttttttaagaaggncgaganggagaacaaggaaagggccgggaaaancaangacccccccccccanaaaggagncnganacagggnnggcnccaccaagccagngggaaaagaaaaaagaaaaacagangangcangaagaacaaccgnnacaagnggcaagggggacaaagancanaagcccnaanacggangaagcnaaanangnnananagggaaaacaaanggcaaagnnngnngnnggacnggggganaaggggnccccaccgganancgaggaagggacgagg

SEQ ID NO: 101066 - DNA, 218 bp, Zea mays
  Clone ID: MRT4577_23686C.1
agtgcaatgctgggtcactaaaaaccttactagataaaatcccacacctcgtgagaagatcctagcaagaataagagtacatccagctcccaaatgttcaagtgtcaatagacatgaagttcattacatcaatagattagtaaacatatgagtaaacaacccacttttcaagctcttccagctcatgttgccccttctttctccttggccttggtctt

SEQ ID NO: 101067 - DNA, 1110 bp, Zea mays
  unsure (1)..(1110): unsure at all n locations
  Clone ID: MRT4577_23687C.1
tttttttttttttttttttaaaaaaaatcacattgctgataagataatggttatggcttcaagataagtatctcgtcattgggcttcagacaacaagatctgtaggttcatagattttctcctcggtaaaagagaactaaatacaaatgtcaaaaacttcccatcacagatctggtaggaggaacaacgtggacagctctgaagtctgtacaagcagcaaaagacaggcacaaaaatgtgatggcatcgtatgctggaaaacagtcataattctctaggcaacgctgctgtcggacattttcctaaggtgttccacagtatgtaatctccagaagaagcctgcattgagtattcagctggagcttttgcagaaggatagatgtttacagattttggatcaattgcaagaccagacagcgtgcctccagtaaccttaaaagaaaccttagcataattatacgcttgccaagacaatggctcttctaaatcaactgcctgaagatccttattgattttttccattatgtagtcatccaagctagctccattcttaacgttatcttgttcactgtcactatcttcagtatatccagtgcttgaaatgaatcgagatgatgaatttattctctgtgtcgttctaggctgaaatttaacagtaccagggaaggtagcgtcaatgctcctaccactaagtccccgtccacttgagacaattctccattcaattgaatgctctgtcattgaaactgtcccaattgatggatttccgtcatatgatgcaactcttcttcgagggaatggcattgtaatcatgcaaaagtccataatgaagggagacttgtaaccctccatcaatgtcagcttaaatagaaaagcaccttcattttcagaaaccatggacaactgatagaaccctttaacaggaggagcaatgttgcatggtgcttgataatgcatcaatacaaaatttcctaatcgtggctgtaaaaccagggtttgcttattagcagtgggctctgaagcttgaacacagtgatggaatgatgaaacctcaatatgagcagtttttaaaccagtcaatggcaaagaaatacagcccnnnnnatccgg

SEQ ID NO: 101068 - DNA, 543 bp, Zea mays
  unsure (1)..(543): unsure at all n locations
  Clone ID: MRT4577_23688C.1
tcgaggccnnggccgggcccgggactcccatgacccctacggctcccgagctccggctttagccgccgttactcgcctgtattcgcagacttggcgtaatcatatacatacctctctactgacgcccataagagtccagtcacattttcccacaaccatggatccggaaacgacacgcgtcaacactggggtgactaatgatggagattctgcaaattcgtaccacctgtggtcactggccgtttaccattggagacaccggccaccccaggagtgttactgaatcgacccacgctgccgaaaagaacatgctggccaatagaagtattcgtccgcgtcctcactcactgagtctgtgcggtcgagaggtattatgattgagattgtactgactcacttcgagaccagcatatactactgcactgacttcgaggacaccgcaggccccgacttgatcgcaaagatgctcgctgaggccccccaacctgacagagccgctcttatcgaagactccccactgtgcgtctccccgacagagcatca

SEQ ID NO: 101069 - DNA, 264 bp, Zea mays
  Clone ID: MRT4577_23689C.1
ctcgctgatcttcagtagtctctcctctggcgctctctctctctgtcttctctcccgaacatatgtgaaagtaactttatgcactcgatgtaattgttgcctcggaggctcattgatgaataagctcaccctgtgtagttcttgctaaactctggctggctggttcaactcagctcttctggttcaaacccgtctccaaactgactgattgaaacaggcctctcttggcttggaaagtctgctctgaactccagaactgaacgg

SEQ ID NO: 101070 - DNA, 473 bp, Zea mays
  unsure (1)..(473): unsure at all n locations
  Clone ID: MRT4577_2368C.1
gggnccggaatcccgggccacaacctttggaagctgccccgcagggagcagggcttgcccttcgttaccaggtggcgctccaggtccaggataacttacaagttttaccgggttttcccaaacggcaaggtgcattacttcaacccaagggccggcttttacccggagaaggtaaaccccggcggggggggcgtgggccaaaatttccgaagaatcggcaggaacgtaaacccaatcaacgtaaagttaaccggcagggccactttcaattaataaaacttaaggtacgccgaacgcccaagccgggatccaaattaaagaacttttttttttattaattccagtttattgtaattgggctgctggtccggtggtggcttgatttgagatgtgcatgatgatccttgtgtaattttaaaaaaaaaataattttattataaaataatattaaaaaaatttattataaatttttt

SEQ ID NO: 101071 - DNA, 117 bp, Zea mays
  Clone ID: MRT4577_23690C.1
tgaaacttctggcacactcagggattcctgaagatctggaagttggttatgtcccacctagttttaatggagcttttcctggcctgtacctttttaccaatccggctagatttgtcc

SEQ ID NO: 101072 - DNA, 879 bp, Zea mays
  Clone ID: MRT4577_23691C.1
cgcagaaaagtttattagctcgccgcgggggttgaaccgaggctcctagctgatcgcgcgggcacaaggcgagcggacaagaaagcttgctttgtgctcaccggcgggcggcggcacggaccccctgcgatggaagccgtcggcgtcactcctgcccccgtggcggcgccggagaagaagaagctgcttgacctcaaggaccccttccccgccgccgccaacagcggcgccaaggcgtcctcggcgagtaagtgggcgacgaagaagaagctggtgggcggcgacgccggctacgtgctcgaggacgtgccgcacctcacggattacatgccccagctcccggtgcgttcgagagtcccccatcctcttggtgtgtcacgttgggttcctgacggttagttcccggcgtgaactggaaagttccttcttttttttttcgttctgtgtgattctggtttctgccccccacccccttttggtctatcttaggttgagacttgagagcatgcggattctagtttggatttgagttttcacatactgatctgacagtaaaaagtggctggttcctccgatagagtttgtatcagagggagaatcagcatccgagagaaaggcaaacagcaaaaaacatgatatgaacttttttttatgtttcactgatcactgatgtcgtcgatctgcagacatacccgaatcctctccaagacaacccggcgtattcagtcgtcaagtatgaattcttcttcttcttctcgtctcgtgcttccatctcactatttccattccaacttgatccttatccatccagacacggatgttcgttccaaagctgacctttctccccgccacgtgttcttcctcccaggcagtatttcc

SEQ ID NO: 101073 - DNA, 823 bp, Zea mays
  unsure (1)..(823): unsure at all n locations
  Clone ID: MRT4577_23692C.1
agccgttctcctccccacagcccaagccaaacggcccaggcgcgcgcgccttcctctctcttttcttttggctgacagccgggccccgtccctcctctctcgctgacgctagggacccaccgtgcagcgctctcttcttcctctcgccgtaaacgcgtaggacactaccgggggcaaatcaattacgtttccttcaggatttgcttgccaaatcagttcgccagcaccctatataacttcgcaatcttcctcgcgcctctcttttgcttagacacacgcctgggaagccctagctcgcgacttggatctcaccgggtaaccaagctcgccgccgccgtggctcttgcaagtcgcgggtgttcggccgaaattgagttgttgacgagcttcgttttgaggttgcgaacctccctgcactccccatcccctttttcttcctctctgtgatgttctaatgctcaccgaatcgtgcagagacacctcgatccgctatccctcgtggccggtccgctacgagctccctctgcgcgtaataagccccaggtgagttcgtctcgtttccctcttttctcccggtgttcttcccttcgaaaaccgagctccctacgctattttccctacctccggcgagcttcaagcccctccggccatggcgtcgccgcgctggtcactgttccggccggcgcccaccctcttctttctcccataccagatctaggcncgtccggttctaatccgatggcccatagtggccgatacccttttcggcctggagttttgctaaagagccccctcatttgttatatatagaacccgcagtcct

SEQ ID NO: 101074 - DNA, 2637 bp, Zea mays
  Clone ID: MRT4577_23693C.1
gcagaaacacggttccttgtgtttcctaaacattgtgtcctaggttcagtaaaatttgggctataacatattgatccacatttttatgatttgatttgcctgagataaaatagtacttacgcttgctaccaattttgtggttattatagttatagagtgtgaagtccgcaggcaacatatgtcctcctcacccatctcaagaaaaaaaacatttctaagccctcctttacttctggctttcccccggcgcactgtccggcgttgcgtcttcgttgcgtgccgctcgagagcccggttcgcgcgtcgacggcgcgcggctgcatgtataagtgatataaaatcgataaaaaggacgagcagcacgactctcatttttttgggggagggttgcggtggaagaggattgcgctggagagaacccaattttagggcggtgccggcgcgaccgttccgggatcgggagctttatctggggggcgcgagggatcacggcagcggcgacgaccgaccgaccgaccggccggccaacccaaccccaccaccaccagtccccgcggcccgcgtcgaggaagaagaagggataggagacggagacggagacggagccggtggtcgcaaggatggccgggggcatgcaggcggcggacgcggcgggccggctgagcgcgctgctctcgctgctcgcgctgcgccggctcctcgccgtgctccagccgctggccctgctcctgctcctgcccttccggtggcgcgcgcggccggccggggccgtggccgcggccgtggcgtccgatgccgccacggcctccgcgccgggggccagcgggaggaaggggaaggcgtcgtcgtcgtcgtcggtggttctgcgggtgccggccgggtcccccatggtcgccgcgcggaggcaggcgtccgcgcgcagggagatcgccgtgcgccgggcgcgggaggccgggcgggagtacgagctcgtccccaccgctcgcggcgagacgctcttcacgcagtgctggtggccgcacccgccctccaccgttaaaccgagggcgctagttgttgtcatgcacgggctaaacgagcacagtgggaggtacgatcatttagcgaggcggttgaatgatatcggcatcaaggtgtacgggatggactggactggtcatggtggaagtgatggtctacatggatatgtgcaatctcttgaccatgctgtcaatgacttgaaaatgtacctcaagaaagtattagctgagaaccctggtcttccatgcttctgcttcggccactcgactggtggaggtatcattctgaaggctgcacttgatccagaggtagaaactctccttagaggtattgtcttgacatcaccagctgtccgtgttcagcctacacacccaatcatagcggtcatggcaccgatttttgccctcatcgcgccgaggtatcagttcacggcgtcccacaggaacggcccgccggtgtcgcgcgaccccgaggccctgcgggccaaatacacggacccgctcgtgttcacgggcgccatccgcgtgaggacgggctacgagatcctccgcctgacgtcgtacctgcagcagcacctgcaccggatcgcggtgccgctgctggtgctgcacggcgccgacgacctggtgaccgaccccaggggctcgcgggcgctgtacgagcgggcctcgtccgcggacaagtccctcaagctttacgacgggctgctgcacgacctcctgatcgagcccgagaaggacagggtgatggacgacatcgtggcgtggctgagccccagggtctgacgccgccggcgcgttgcggtgctggccgtaggacgcgagcggctttttgatcatctgctgagcgcggaggacctgcaggccgaggacgcctcgcctccggacggtgggtgatgacgcggtctggtctggtaggctgcggaccgagggagagcgggtgtgccttctcgcccccttggtgtgctgaactgctgagtgctgatacgatacgaggagcaggacaggagtacggagaactactactacctacggctatgggcgatggctttactcgcgcctcccggtgtgtcccgagattttttttcggggacacgtacgaattatgtaacggagttcgtttcgccgtgccacacgcacgagcggtgtccgatacacctatagaaaacgactttccatattgcgagttgtgtgatgtattcacacaattctgaatcagagttgcagaccgagggagagcgggtgtgccttctcgcccccttggtgtgctgaactgctgagtgctgatacgatacgaggagcaggacaggagtacggagaactactactacctacggctatgggcgatggctttactcgcgcctcccggtgtgtcccgagattttttttcggggacacgtacgaattatgtaacggagttcgtttcgccgtgccacacgcacgagcggtgtccgatacacctatagaaaacgactttccatattgcgagttgtgtgatgtattcacacaattctgaatcagagttgcaacttgcaacggattcttaaaaaaaaaaaaaaaaaaagtacctcctagcaccgtaggcattggtttatagtgactaattttttagtccctc

SEQ ID NO: 101075 - DNA, 279 bp, Zea mays
  Clone ID: MRT4577_23694C.1
tatgagctgggtcctgcttgacggcgaagtctgtgcgcctaatcttgctattaaccgttaatcggtctgggtagttcatacataaccttcaaaaggactatgatattacaattcactcccgtgttcacaccgaatggctatccgaacatgaaggccttccaatatcaaccagatcgcgaagagaccatatgttcaaccctatttccgatcagagtgaatcttaacattagaaagccgagatatgagatggacgtacagaatactggaagggaaccattg

SEQ ID NO: 101076 - DNA, 229 bp, Zea mays
  Clone ID: MRT4577_23695C.1
ttgtacccatggggatgaggtaacttcttagatttttgaaaaaccaatctcaaaatacatgatcatttatttacgaaggattaacatgctctatcgggtactatacaagtttctacatactctaaaaggtacaccatgatcagttcgactcgaggcctcaaaatcataggaccagggctggagataatctgaaacattcaatagcgcatgggatccgcatagacatcta

SEQ ID NO: 101077 - DNA, 204 bp, Zea mays
  Clone ID: MRT4577_23696C.1
ttactcccaagtgccgtcttatatggggccggggactttctaaaacccttacccctctacctctcaagatggctttacctcccacggctcccgccgcatccggaggcccaagctactctgcgtcctgaccgcctccatcggcgcaagtggtgggcaaaacctcattgcattattactacaacatgctgcaccagtcgcctgaac

SEQ ID NO: 101078 - DNA, 1089 bp, Zea mays
  Clone ID: MRT4577_23697C.1
atggggcgggaatgggactccgacgagagctccatcgactcctcctccgacgaggacgccgccaatatcgccgtcaacaagggtcttctcttctccaacgtcggccacaaatgcctcatggataaggagaacaaaaagaagaaggtacattctagctatacccccaaatacactacttctgatgatgagggtaactctagtgatggcaatgatgatttaactgctctttttgcaaaccttaccaaagatcaaaagaagaagattaatcaattgatagaaaccattaacaagaaggatgaactattggaaagccaagaggacttgcttgttaaggaaaatgagaaattttttagctcaaggatgcctatgctcttgaatttaattgttaagattaaagaattgagtgcttgcaatatttctacatctactattgagcacgtcactatttgcactagatgtagagatgttaatattgatgctatgaatgatcaccttgctatgattaaagaacaaaatgatcacataactaaattaaatgttagaattgccgagcatgaaaaaaatgaaaaatttaaatttgctcgcagtatgctttataatgggagacaccctggcattaaggatagcattggcttccaacaagggagccaaagcaacatcaagcttaatgcccctaagaacagactgtctaactttgttaagggcaaggctctcatggttcaggatagggaaggttacattctatactctgagaactatcctgagcataaaattagaaaaattcatgctaggaaatctcatactgtttctcataatgcttatatgtatagtaatgaggcttctagctctaagcattcaactcatattaaaatgcctaaaaataagattgttgatgcatccaatgaatataacatttcattcaaaatttttgatgcatcttttgtgctcactaacaaatcaggcaaggtagttgccaaatatgttgggggcaaacacaagagtcccaagacttgtgtttgggtacccaagatgcttatttctaatgtgaaaggacccaagaccgtttgggtacctaagaacaaggcctaa

SEQ ID NO: 101079 - DNA, 270 bp, Zea mays
  Clone ID: MRT4577_23698C.1
atcaaccttgcacggtacgaaacggcatactaccacactaaactatggatcaatctggcgcgtatcataccgttatcgagcggattagcggccttctacgatatcttgacggtgccatacagactaagattctacagttctgtgctggtgatactcgacgagccggtgagccatggtgtcaaggcaggcgccgtactccgactattcgccgtcacctaaggaccatctaaacctctggaagaagcggctctagcaattgcgcaagtagaa

SEQ ID NO: 101080 - DNA, 307 bp, Zea mays
  Clone ID: MRT4577_23699C.1
gggaaaaaaaaaagcccaaaaaaccacctgtaaaaaaacaggggtcccgggttaaaccgaatgcaaactaagatcccacgggggaaccgcaaaaacacaaaaagattaccttaaaccgcggggccacccccaaaaaaacaacaaagggggaaaaaaaccaaacaaaaccgggccccgcctcttgggtttaaggcaccctccaaatcaaccctaccctaatcaacaaaccccgtgggaggtgaacccaaaggagatcccccccgattttaaaacggccaaacacaattcggaaaagttcgctcccaac

SEQ ID NO: 101081 - DNA, 516 bp, Zea mays
  Clone ID: MRT4577_2369C.1
aatgcagggacaccagcttcatatgaagcatggccatttattttttaaacttaacaaaagtgtggccatggctcacaataatttctagcaaacattggttgattaaaggggaggggtgcacgctcattaacagggggcgggaacatttatttagttcttgtttgaaggggctcacaccggggaaaccatggcatgcatatgcatccgtttacttggggctagcaccaactggggtgggagtgcaaaggcgctcgcagaaattgaagaggatggcggctccacggtgggcgtgcccgggcgggatgtcgacgccaccgtcggaggggaacctgatgcactggttgcgctctgggtgggacccgcccggccagaagtccaggcattggcactggggcgggtcaaacaggtagcagaaaaccgcacttgtttgcaggatggccacgagctcgttccggcggcggggtccacgcgcggggactgcctcccctccttcttctttctcctccccccctttgg

SEQ ID NO: 101082 - DNA, 3381 bp, Zea mays
  Clone ID: MRT4577_236C.1
atgagtaagctggacgacgaagaggaacaagcactactggttccaccacccgggagggcgacagatccgatgaaggctatctactttatatccactggctctgtatttgggattaatctccagcagctgcatttatacgatttggttttagtggttccacaacccatcctgccagatgagcaacccattcagcaggacgaactacaactcagtaaccagcactctggcttgtcgtttgatagctccattggtgctggtcagcttgcacccctttcgaatggtcattttgttgagaatggacatgtgctgcttggggatgggtttgctatcaatgctgccccattcaatgggcctcaggaggttgatggaccgatgtttgaggagagaaaaagatctgcccagttctccaggctctgggccaaatactttgctcctgctgggttggctgaccactcggtggacatccctaagaagtgggcaccttttttcctttcaaatctgcttcaacctgatgccttcaattggtcgaagacctttctgttgtcagaaattcccccaactctgcaggagccgggactaaaatccctcccttttgtcgtccctaaggaatgtccgaatgattcctctctggaggatgtcctttctgggatctccaaggatactgacagttgtggtgggccgacaccaatcattgtggagtcagaactcagaagaagcaaacgcttgaaagaatcacgtgctgggttcagacatggggcctgcccaaaaaggaactgcctcatgtgccaacataacttcgatggcccccacgctatcctccaaggtgctgcggaatctgggctccagtggtctgtgctgagccacaacgttagaggaattaactctaccactaagtggaatgctattcgttgttctattcgggatgctggttgtgaggttatttgtttacaagaaacaaaaaaggagttctttgactcggcttaccttaaaaacttctgtcctgctcaattcgactcatttgcttttgtcccctcggtggggaactcgggtggatctgctatcatttggaagagttcaaggctttcggggaatgttatctttcaaaacaattatgctcagtcagtggaatttacttcaaatttgtcggcttgttcttggattattacaaatgtttatgctccttgtactccccatgggaaaattgatttcctcaactggttgcataatatctctatgccttctgacaaactttggcttctcattggagacttcaacttaatccgtcggccagaggacaggaataggattgggggtgatattaaccttatgctgaagttcaatgaagcaattagcaacttagatttgattgaaattcccctccacgggctaacaatccctaaacctaagttatttcggtttgagaacttctggcttgaattggatggtttcatgaatctttttcaaactacatggaatgggctccctagcatccccgacaaagctaaaaacctgactgccaagttcaagtatgtccgaaaagttctgaaagattggcagagatcgctgccaaaaattgataaaacggtgaaaaacatcaagctgctaattgagcttattgacaacatggaagagcatcgggatctatctattgaggaatggaatttcagagaaattctgcaacaaaagtgtgcggctattaagtgggttactgatggagacatttgctctcgcttcttccacgcccatgccaccattaagcacaggaaaaattcaattgctaccttgactgacgacaatgggatcaccctcctcgagcttgaacataaatctggtctcctctgggacgctttcaagtgcagattgggatcgtctgacttctcaggcattgattttgacctctcagaacttttaaccagtaatgagcaacttcacaagttagactccccgtttactaaattggagattgacagcattataaaactattaccttcggataaatctcctggtcccgatggtttcaatacaaattttatcaagaagtgttggcatgtcattgctccagatttctatgatctttgtgataaattctatcaaggtgaggtctgccttagaagtatcaacgggtccttcattgttttgatcccgaagatggagaatcctcagaaggtgggggattataggccaatttcactactaaacaatagtatgaaaatcttaacgaagctgttggaaaaccgcctgcaaccgttcatgtctcggttaattcacaagaaccagtatggattcatcaagggaagatctattcaggactgcttggcttgggcctttgaatacattcacttatgccactcctcaaaaaaagagatcattgtgctcaagctggacttcgaaaaggcttttgacactgttgaacatgaactgattatccaggttctgactcacaaaggtttcggtcctagatggatcaactggattcggagcatccttctttctggcacgtcttcggtgttactcaatggtgttcctggtaagccctttcattgcaagagaggtgttagacagggtgaccctctttcgcctctgttgtttgtcttggcagctgatctccttcagagcatcattaataaagctaggctatggaatcttcttaagctccctttaccggatattggtgaccaggatttcccgattgttcagtatgcagatgacactcttttgattttggaggcctgccctaagcaacttttcttcctcaaggcaatcctcaactcttttgcttcttctactggcctgaaggttaactataataaatcaaatatgtaccctataaacgtgccttctgacaagatggagatcctatcccgtaccctcaattgccagattggagaaatgccattcacctatcttggtttgcctctgggccttgcgaaacccagaaaggaacactttttgcctcttattcaaaggattgagaagagattgtcttgctcctcaaatttcctatctcaagctgggcgtttggaattggtaaattcagtcttctcagccttaccaacgttctttatgtgcacgctcaagatacctaaaaccatcattaaggaaattgacatgttcaggaagcactgtctgtggagaaggaatgacattagttccaagaagccacctctgattgcttggaatgcagttactcagaggaaagtgaatggtgggctgggggttcttcgcttggaaacccagaacgaggctcttctaatcaaattcttgcataaatttttcaataacagtgacttaccctgggtgcatctcgtctggaataaatacttttgtcccgtggtctccctggtcatagaaacattggctctttctggtggaagagcatga

SEQ ID NO: 101083 - DNA, 425 bp, Zea mays
  unsure (1)..(425): unsure at all n locations
  Clone ID: MRT4577_23700C.1
ggagagtgggagaatgaagggcgttgggggcggtgcggtctncctgggggactatgtntacttnaaatntgtngtnctgtttcacaagatctgcattgggttnaaaatgtggaggtactatgactttggacccaaggttgtgacagctgttgtttgtatataaggaattgtaggaacggttgatgtatactataaatagattatgataatttgtatgaagggttatngagtaatatatattgatgttgctgaagtttggaatgattatgaatggatttatttatttgaaaaatttttggattagatgaatatgtatgatgttaatatttatggtatatgtattggtggatttatggaataaatatttggtggaaattgtgtaatgagagtaaagtaattggtagtatgaaatagttatttttgag

SEQ ID NO: 101084 - DNA, 269 bp, Zea mays
  Clone ID: MRT4577_23701C.1
gggccccaggtaacacaccggagatgatcaattccataaaagccttggcggttcatacacggggattttacaaggtcgcccccacacaaacaaaattattcccacttcctaaaccatttttaaatttataaaccacttgttttgaacaaaccccgtgaacagttggacgacttccgtttccaaggccgcccaagagaatgcattttaaggggccttgttttttatggccttttcttttggggacaaaggttttggtttaaataaaagtt

SEQ ID NO: 101085 - DNA, 342 bp, Zea mays
  Clone ID: MRT4577_23702C.1
aaaagccaaagccaccaggccagcaacaatagaagcgagcgagcgagcagcagtaggcgagcggcgcgggcgaggagcagaccagcacccagcagccctcgtcggggggcgggagttgtagcttgatgaggcgtcgcctttgcgcgtgtgctgtgactgtgactctgccgctaacccggttgcatttctccatcttatccctctcccgcttctgcttcctcgtctcttacttcgttctgatcccgctggcgaggatgcattcgcatttgcggcactcaatgtagccctaccagaaggtggtgaagatcgtggacgtcactgtcagtgtggtgtacaatgtgc

SEQ ID NO: 101086 - DNA, 956 bp, Zea mays
  Clone ID: MRT4577_23703C.1
ggactttcaattaactaacaactaacataagatcctctgtcatcgttgccatcagttgtcgtttatcaccttctttttatattcccatctgaggacatataatcagcttgataaaatggtcgcagacgctctggtctaccacccctcggtggctcactacctacgctttgtcgcaacaaccctcggtagagacaaagccctccgcacaattcaatactttgcccgcttctactcctggtatctcttccgcaccaataacccaacctccgccattgcgccctgggacgccgtcaaaaagcaattcggcctcactcgcaaaatcctgcggtttggcaaattcgtcgaacacatcaaagccgccgccgtcgcctttgacaataaggctcccgcagatgcagtgttgaggaatctgactgttggtcggcagctgggttatgcgggttatttgagtctcgatgcaattacgttgtttgatgcgctgggattcaagaagtttgattcagcgaagaagctgcaggagtatgcgtatcgggcttggttgtccgggttggtgtgtagcgctgttgcgggtgtttacaccttgtaccgattgcaggagagggagaaggccgttaataggaaagagggtgagggcgttgttgaagccaagaaaatcgagcgggaacgcgtcgccgctcgcatccaactcgtctctgatctttgcgatttgaccgtccctctctcagcattgggctatgccaagcttgacgacggtctggttggtattgccggaactatcagctcactcattggtgtatggtccgcctggaagaagactgcttgatttgatctacaagaggtgggatgagttgaatgctctacaatcgagttttcacttgtctattatttataatccttctagtctatatgtatatttttgttctgcctgccattaggcaagatacatccttttatcg

SEQ ID NO: 101087 - DNA, 523 bp, Zea mays
  Clone ID: MRT4577_23704C.1
ccagaattcatcccccatttttttagctcccaaggcatgggccatttcaacccaaaagatccaccccctactttaaaaaggggccctttacaaaaaacaaacccaaggggggcccatcgccacgggggcaaaaccttcggaaaagaaaaaaaaatttaaccagaccccgccagataaacaggaaaggctggctacggggttttggcgggggggaaaaaatacatcacagggccaggccgttcggcataagttattttggccttggggggcccccttccgtttcggggggccccggggccaaaaagatttgtgggtttttgacaagcgccaatcctccgggtttgggtgggaaaccaaaaacccggggggcagctgggggggggtttcaggccagggagggccctttgcagggacaacaacttccaaagggggctaaattacccacccttaagaaaacttgttattagcccgggcttaaaaacaaagccaccacagggggacctttttcccaaagttgcccagg

SEQ ID NO: 101088 - DNA, 374 bp, Zea mays
  Clone ID: MRT4577_23705C.1
cctttctttttttttttgcggtcagccgagagtaatatatactaataaggggaaacacaacacacattggccttgttctagacagagaaaactactagctagccatatacatatatgtagctgtcctagaccatcgtacaaaatatgttgaaatagccggagggcgtggacgcggcgaacatcactacaggtaaacgcgcgagcgtttcatcattgtcactggagacactaaaaaagatcttaaatggaaacgaagaaaaagctctgtcacgcatggagagaggttagacctctgtactaaatggaagaggccagcaacaggctactgtacttacaaccacagagagagagaggggtctctattgcggtagcta

SEQ ID NO: 101089 - DNA, 601 bp, Zea mays
  Clone ID: MRT4577_23706C.1
cattgggtacctcgaggccggccgggatccccatctcaatctccctcacggtgtgcgtgttctctagcagggagctcccttcctccctccccacgccagcctccaccaccggccacagctccctggtgctcgcccctcccaggtccgcgctccagccctccccatcctcctcttgctatggtgcccagccgagctctctccccttcctgccatggtcgacgcccctcctgctgcagctcgatgccctcccctgcagcaagccgccatggagctcgccctggcccctatgttttttttattttttcatggagctcgcccttttcccctgctcctgcacgccggcaaccaacccatcttcctccccaagctgggctcgcccagtctctcgctttctctgctccagcagcaaccgtctcaaggtatttcagttcgtgagcagcagcaatcgatatagctcctccgcgccgtggcgcagccagccgtcgatgccatgtccctgcaaccccgtgtcgtcgtcgtgcccgccttggtgattcctagcttcctctattgtttcactagttcctggagcaaaccaatcttagttaatgttaggctgata

SEQ ID NO: 101090 - DNA, 628 bp, Zea mays
  unsure (1)..(628): unsure at all n locations
  Clone ID: MRT4577_23707C.1
gtgtgttccttctatttcatccttgcacataatacgcagatgcaaatgacaacgtcgtttgttttatttcttgtcgcagatgcaaatgacaacgtcgtttgttttatttcttgtttggcgtttgagatctgagaccgtgagagctggacacgctgatgcaggtgtatccagcggctcacgagatcgttgacggcatggagcggtgcgcctgccgtttcgcggtgcagtggtcggatggaccgcgcgctgggagcatggaggaggtcggcattgagcgggtttgctgcgtgcagtcctcgccggtgcaagacccagtgcttatggagttcctggacggcgtgaccaagctggccggggatgccaacgtggaaacagtgtctcaggagatccacgtcgcgccggtagtcaaaggcggcgtccctgcaaacgcctgtcaccgtgatttcaacggaaaatttggtccagcaagtaggcaagcggtttgatgtgcgtggttctgaggttggctatttggtgcctctgattttgtgttgctttaacaatctgatcatgcacataaatcttctcttannnnnnnnnnnnnnnnnnnnnnnnnnnnnnnnnnnnnnnnnnnaaaaaaaaaaaaaaa

SEQ ID NO: 101091 - DNA, 403 bp, Zea mays
  Clone ID: MRT4577_23708C.1
cggacgcagtcgtccgacgcctcgtaaaaaatttacccaaccaaattaacgggcttgtcctggtctcatagaagggggaccccgttgatcttgactctaatacgacttgtaaaatgacttgagacctgtaaaataagcgtgagcctaagctctcaagtcaaataccactactactaacgtaatattacttatttcgtgaatcctaagcagttcaccgtccgtccttttggctacaaggcccggtctcttcgtgccgatccggactaactacatcttcatgtctaaaagcatgctcaatactcacatttattaaacgataacacaggtgtcctaacatgaccatatcaagaacagatttctagtacctaacaaaatgctaaatgctcgtcacattctcaatttc

SEQ ID NO: 101092 - DNA, 357 bp, Zea mays
  Clone ID: MRT4577_23709C.1
acgctcttgtagcccgccggagatccatgcctttttgatctctcgagtggacagaaaaaaagtgacaggtttatatctaacgaccgtgatgctccagaatctgtgggactacgtggtggcctgtcctcactcgtagactatcctcgagaagctctacaatgcctccaccttccaccctctcgttgtcatcaacatagtttctttttgatgcaaatgatgccgtaaacaccgacgactccgttgactccttagaccactacgactccgctctgtgccagcactatgtggcgcatcgtgttctcacccattgagcaaccttgccaccaagatcatgttcgccaacctcttttacctcct

SEQ ID NO: 101093 - DNA, 150 bp, Zea mays
  unsure (1)..(150): unsure at all n locations
  Clone ID: MRT4577_2370C.1
acgacntaggcggttgctgaccgccaanaggnatcagccctttnaancccctagangtacnccttctaaanacatgcagtcctctannatngaggagtgcgcaatgatatgagnccatcanngcctaatagnnggnaaccgnaaccatat

SEQ ID NO: 101094 - DNA, 378 bp, Zea mays
  Clone ID: MRT4577_23710C.1
cattgacagcgctcagtgcaggactttaagtcctgcttcccattgcctctaaggcagttctctcttcaactccacaatctcagctacatgcccagcgtttcttcagaaacctgtgccaccatggagtactccctcagattctaccaacctcatatacgagacacggtgttctacagaccagcttgatggagatttgtcactgcaacagcagccgcaacaagaaccatcgttttttgatttttccttgtttgagcgtgattcccaaaacagtttttcgtcttcgtcttcgtctacttctccacattctgtttcgccatccgatcataatacttcacctgcattatggtcaggctctcatcaagtggcctgtgctgcacc

SEQ ID NO: 101095 - DNA, 274 bp, Zea mays
  Clone ID: MRT4577_23711C.1
ggggtgcacccaaaataaaactttgggcccgggattcccttaagggtttaaaaattcgcaaaattttttctaggcccctcgtgtttacaaacaataacggtccactttttcaatttggaaaccctaaccgttgccgtaaaatattttgtggggttaagtgctaaattaacttgggaacttcccctttttaaacaaaaaacttggtttttaaaggattcgaaccggtgcttccttattttttttttttttatttaaaaaatctttccttttcctt

SEQ ID NO: 101096 - DNA, 1831 bp, Zea mays
  Clone ID: MRT4577_23712C.1
aattcggcacgaggcaatctcgccgccgccgggttgccgtcctgtgctccgcttcgcaccgccgcaccgctaggaacagcccgtgctggagctgggggaacgaacatctcaacctccgtcacccccataccgtacaagtattcctatggagacgatctcatcttgtcccatctgcaacagacaagttcttactgtttttctggaatggcatgccgatagccactttgatgatgatcaactccaaatggacatggaattagcacatcagatgtcagttgctgaatcaagtacagatgccaatgccatgaacgacccaaaacattatagtggatcattcactagtgactctaacgctctaggggctctatcgagtcatagtggatactcgcaccattacagtgagctactggatgaacaaatctcttgcttggtccgagcacaaattcgaagccaaattcaagaggtggaaggcggtattttgagcttgttgaggagctgcttggagtcagaagcgggttcctcgacaagtatgatatcgtgctatattgaccatcatcagatcctttcatcagaagataagggatgggcgatgtggatgtgaggaacattcagatgctgagctctcatctactcgaggccggccgtgaagctttagaagtatatttggtctggatttgttcctgacatcccttcactccagagcttgagattggcttgggacaaaaaatttgatacaattggctccagccactttcataacaaaatttatggtgccaagaagtggatagggaccacagagtgcgctgccctcttccgctcctttggtctccgtgcaaggattgtagattttgatagcacagaatcatctgacctccatagtaacaacggaagccgtgcagcgagccaagtacgaggacctatggacaagttcttgataaagaataagcctccaaaatcatcatctgaactttgtcgagaggatgctgaaagtacgagaggccaacaggcccttgttgactgggtttggaactactttgcaagtgagcgctctgacagattagccacacagcgtgtcactgttagcaataaaacactaactaaagaggtgccattcatagaccattgtatttccaacatcaaggtcattcaaggacaatagttgggattcaaaagaaaccggatcgtcgtggatctcaagaacaatacagccttttgattttagatccgggccatagaactgcagatctagaaaggtgtctaagaagcaaaaaaggatggcagcgtctggtgaagagaggcgtccacacgctcaggaagccacagtatcagctgtgttatgtggatcctggaattgctagttcagaagaggtggagcgactgaagactattgatggcacactagtcaggttttaggttcctggttgtagtctgcgggatcttgatggtggttgtggcagtcggcaattttgccaacactatgtatacactggtggtactgaagctgaggtttaaagcaaagatgaagagagcaaggggcagacaggatcccccacatcaaaactgacaggcatgatcgttcctggaacacaaggatgcagcagctgctggcaccatctcttctgtaaatcctttgacctgtgtcaacattttttggtgctgccgtgctagtagtaggagtatcttgcaagcttttgttttggatggtgtggtggtccagaaaacactctgtctgctaaattaccagaaacatccgcagttgtatattgcggcaaaaaacaagaaaaaaaaaaaaaaaaaaaaaaaaaaaaactcgaaaggaggcgccggtacc

SEQ ID NO: 101097 - DNA, 383 bp, Zea mays
  Clone ID: MRT4577_23713C.1
atacaaacgaacccagtcgtacagagacgcagagagcagcagagtccatcatgacggtcgcccacaaggatacatggtcgcagcgatggtgaccatagctgctggtactagcaactacagtggagttccaacgacggacatgggcgcccgatcgcgcgcgaggacccgagacggatggctccctcgccacgacgccctgggggacggtgctgtcagaccgatgagctacacggggcagaaatgtgaatgacagttggatgtctcagtcctgtgtggtcctgcgagtatagcgatggcctatgctacatgcatatatactcctgaagcttgaagacgttcttttttttcaccacccccacctgcatgcgccgaacgacgacgac

SEQ ID NO: 101098 - DNA, 198 bp, Zea mays
  unsure (1)..(198): unsure at all n locations
  Clone ID: MRT4577_23714C.1
ggcagcagcgcagaccacgctaaatctcgcccnatcatccccgcccacaatggcgactcctcggtttcggcagctcgcgaccgcgtgctcacggctctctcatccttctcctcaacaccatcagccttctccttctcccagccggcgtctgcctcctccccggcctcttcggtgcgtccgccactggctctgcggcaa

SEQ ID NO: 101099 - DNA, 477 bp, Zea mays
  Clone ID: MRT4577_23715C.1
gggggagaaaccaaaccaaaccattagggggggcaacccaaacaaggagagggggtaccaccaccacttaaaaagaaggggcaggcccacaacttgccgggaaaattaaagacaggttaaaaccccatgccgggggggaaggttgccaaaaaaaaaaaaaccatgcccccaaaggattggccgggggacaaaaaaaaaaagaaaacgggggttcaaaaataaaaaaaaaccccccgcagggggggggggaaaactttggggagggcaccaaaacgggcaaaaattgccccccaaaagggggcccagggaaaaaccacccccaggaacaacggggacctttgttaaaggacggccccaaaggaaaatgccaaggttttaaccaaaaaccctgggggaaataatgggttgggtggaaaccccaaaaaaaacccggttgggcccataaatttttggcaaaaaagggttttaaaaaggggg

SEQ ID NO: 101100 - DNA, 282 bp, Zea mays
  Clone ID: MRT4577_23716C.1
ccgggccgaccacacccttccgaccattattttgcggacctgtcccagtcttttcaaagttgttttccaaaaaaccatttgccgggtattcaataatattggggcgcccgtccaatcaattaatctgttttttccaatcaaaatccaccggtacctgttttttattttttaaccttttccacctgaaacctattccctattttttttttaactttttccacctaaaatagtagtcatcgaagttttttgattggatccaccaatatttttgattgtttggtt

SEQ ID NO: 101101 - DNA, 224 bp, Zea mays
  Clone ID: MRT4577_23717C.1
tctttctttcgcatcgacagtcacattgcagtatggctgtttttcttccttgtcaaacgtgggggggggctctcgatgggcggacgcggattatgtatcctgagtatcctgtacgcggcgctaggcggggccagttactgctcctacgcctagctgagcaacgccttccgtaagctcgccattaaatgggacccgggcaaatgcgccggcgcagggagctccgg

SEQ ID NO: 101102 - DNA, 297 bp, Zea mays
  Clone ID: MRT4577_23718C.1
ctcggtttttttttttaaattcaaaatactatccatgactataaaaaatattgcctacactttgtaaggaatttctagcgtaacaatcctagcaactaatcggaaaaggaggatcatcaaatggacaatttaactccccttccataatgatgttgcatgcctgtctatgcatgtgcatgccatcacaattcacaaaggggtgtggtgcataccatagctgtgctgtgccattagcactacatgctggtgtggtatgggacatagccaccacaacattctactagaggatcaccaata

SEQ ID NO: 101103 - DNA, 359 bp, Zea mays
  unsure (1)..(359): unsure at all n locations
  Clone ID: MRT4577_23719C.1
cactcgggggtggcgagatctcgacgccgccggcgaggcccccatcaccgatcgtggcagcagaggaagagagggaggcggtgggcttgtccagggcgacagcacctgcaccttttttttttttttttgatgaagggagggaggcgggggggggggggacggcgaaaatggccatctccggcntggtcgcccctagctctagagacggtgccgnggtagggtgggctgcgcgtggcggctgcccaagtgcggaggngcggncgngatgctcgggagccgcaacagccagccgccacctcctccgnggccctacccccaaacccncnancctctcnngccgcccccaccccccnnccccc

SEQ ID NO: 101104 - DNA, 214 bp, Zea mays
  Clone ID: MRT4577_2371C.1
tcggtctaccacgctaatacatgaagcttgtgtaaagcgtgttcagtgccggtatccagctccatggcgggatcagcgttgctcaacgctctcgtccttcgctgcgccatccctgttgctctagttctattctaaggtccgtaacgccggcgcctttgtgttctcgaacccaccgcgctttccatccctgcgttcttagcgccttgtcgtcctt

SEQ ID NO: 101105 - DNA, 371 bp, Zea mays
  Clone ID: MRT4577_23720C.1
ggaactttgggctgctttatgtgcttggtaggcgtatcggtagaacggttcccgaccatatcatatcaaagttccgcctagcaacgcccaaccctacacggaccgcggaccgaaaaaaaaaaaagaaaaaaaaaaaaaaaaacaaaaaaaaaaaaaaaaaaaaaaaaaaaaaaagaaaatgacgaaatggacccaattcaatccaagaagcataatgacaatacaaattacttaagggtgttcacatacccaccaaagggagtggcaagacatcgtgaagactcccaacgaatacaccgacaagccaaataaaaaggctagtatcaaatctaacgacgaacaataggatagtaaacatcaaagctttaata

SEQ ID NO: 101106 - DNA, 153 bp, Zea mays
  Clone ID: MRT4577_23721C.1
aggacctcacaataaaaagcttgataagtacacatggctacagggtactcctacagatgcatgggacactggcacatatgcatactaggcaataggaggaggccataactgcagcgctgacactcctacgaagcggaccatcatacgacggcg

SEQ ID NO: 101107 - DNA, 368 bp, Zea mays
  Clone ID: MRT4577_23722C.1
aagagactggtaaatggaaagtgatttagttcacaacataaaaacttatgactcacttaataaaaattagatgcgtaatttttaaaaaccaagaagctaatctctacatacctaaaacataaaaacttgtatttatattaaacaggtccataatcggcgacagcaaaaattcaagggacattaatctttgacagaacttagattgacggggggcccttattttaggtatgcaccagagatcattttatgaggatcaggctttcattatttaggagtacatggtttcaacaggacccgcataaaaaaaataatggtggcctgcaggatttctcaaaaaaggaaaaaaaagggacacaaaaatttgttgc

SEQ ID NO: 101108 - DNA, 430 bp, Zea mays
  Clone ID: MRT4577_23723C.1
cgccattctgtcgcgcaagcgccgggccgcggagatgcagcgcgccgtgctgctggccagggccgacgccgcggagctctgcctggccacgctcgccaagctcgcctccaacactcgcaggggctgggcccgagactcctacagcaactacgcccagttccggtactcgtaggccgccaacgtcgtagggtttctgtactcggtgaatcagaactgtgcgctcgccgagctcatgaggaggaacaagcatttgattccccatgccaagcgtgatctctttgacttaacaatggatcaagtggtagcataccttctgatatcgtcatggtcatcagcaactgctcgagcaagtgatctgattgacaaacaggagagcgatttcttcccgagcatggtgaacggctacattgtcatatatttagcggcattt

SEQ ID NO: 101109 - DNA, 312 bp, Zea mays
  Clone ID: MRT4577_23724C.1
aaacattacaaatcattagattatttatattctctttttacaaacatggataaacatcaatggtttttatattacatcaataccttcggcttgccagaaggtgaaaatgcaagagtgacccgagagtgattaccattcagcgtgaacagtatggggttactggtcatctatttataagcacgtggcgcagtccggataaaattacattcatgtccctgatttttactgataatcataaggggggctttcaagggctaaagagtttttcccctttagggcgggttcattttccaccttcattattattctaaa

SEQ ID NO: 101110 - DNA, 183 bp, Zea mays
  Clone ID: MRT4577_23725C.1
gcatgagtttggatgtggccagtcactgtctgcacctccacagttctgtggtccgaggcagtgagagtcacaagatgatcgacttgtccgggaatccggtgcttcggatctactacacctcgaggcctgctctgttcaccttgtgtgctgggaatgagctcttctactgcctcctttacctgt

SEQ ID NO: 101111 - DNA, 110 bp, Zea mays
  Clone ID: MRT4577_23726C.1
attcggctcgagcgaggatgcaatcagccaccacgtgaatggaccgactctagcatatggggattgtttaagtacttacgccgctttttagaatcttactaccctctggc

SEQ ID NO: 101112 - DNA, 557 bp, Zea mays
  Clone ID: MRT4577_23727C.1
tgggtacctcgaggccggccgggaccggctggtagtaataatcgactgtccgcaaatatgaatgaggccacgcatcccatccgtgcgcgcgctgatgtgtgtgagtccaagcacaaggccaccgcttacgctcccatggagagccaggtagatgcaatactcagccctcgtcgctgcactctacgccgaggggtctgtcacgtgcatgctgctgctacatcatgtgggccggccgggtcaccgtcaagggcatccaacccgagaaggtaacgtaccacgtggtgcagcccatcaacggcgacccgttgatcgccaggctggagacgccggtcacctccagcccgctcgtggcgtggtacctctccaaactcccggcctaccgcaccgccgtgagcccgctgctgcgtggcgtcgaggtcggcctcgcgcacggctacctcctcgtggggaccttctcgctgcacgggaccgctccggagtacgcccgtgcacggccaggccagagcgctacgagccgccgagctcgttgacatcctcaatgtctgcctcaccatgta

SEQ ID NO: 101113 - DNA, 229 bp, Zea mays
  Clone ID: MRT4577_23728C.1
atatctttgttttttttatgttttttttttttttttttttttattttttttcccaatggaacaggaacagatcaatcacacacatttttaaaaaggtgtgggtttacaaaacatttgccagccaaatttttatttgggggagcaaaaccaaaaatattagccaaaatgccctgtcccacaaaggaacaaaaaaattttgctaaccgatacactccttggataaattggc

SEQ ID NO: 101114 - DNA, 349 bp, Zea mays
  unsure (1)..(349): unsure at all n locations
  Clone ID: MRT4577_23729C.1
actgagcctttgaaagctaaattctgagggccaggcgaggaaggttgtaggctgctcncgtgtagtagtcaaggacatcagcaaaaaaacaaaaagcacaaaccttatgcaggagtccgtcaaaacaccctaaattccgtcagtcagttcctggaagttgtgttcacccctcctttttccccctgagtataaattttgtgctttggttccttgggccctgcttggagattagaaccgttttcaagtgaccctggctcctttgaccgatttgaatttctcgcctcttgtcttgcaagtgttctcttctgcttttaattccaaatcaacaagaacttatattttgttcttt

SEQ ID NO: 101115 - DNA, 473 bp, Zea mays
  Clone ID: MRT4577_2372C.1
aatcaaatacgaatccaaatgataagctttattcagttttccttagctatatacatccctgcaaattgtcttcattcacatatttaataaacaattacacatactcaaaacccttttacgacgtatacatattacattcttgttgataaaagaaagaaagagaaagggaattgtataatttatatactataccaagattgaagtggctgaagcaggtgcaccaaaaacaagctccgtttgcggataaatggaacgggaagaggaagaagagagacaggcgatgagagggacgaatagaatgatatttatactacaaacaagaataatagctagtaatattgtaaaattaaataccctttgaaagaagataatgaaaacgaaaggtgaggtgcatatatagaaaagtgtctttcttttcttgtggtggaataaaaaacttctcttaaaacttttattctccatcattaatattt

SEQ ID NO: 101116 - DNA, 305 bp, Zea mays
  unsure (1)..(305): unsure at all n locations
  Clone ID: MRT4577_23730C.1
cgacgcacgcactcatacgcaaactattaattctcctccaccttactttctacaccctctaaaccccanaagggtgggttcttaaaatttttaagcaccccacaaaaaaaacatcacaaacaacttctcaattcccccaaacataaccccaaaacaaacaaccacatcaaccataaatacaacaattcaacaacaacccatccccatacaaatacataccattaactcaaaaacctcatacaaccataatgccacaaccactatccaatccactcctacacttaaaacaaaatctttcacacaca

SEQ ID NO: 101117 - DNA, 459 bp, Zea mays
  Clone ID: MRT4577_23731C.1
gcgcccacgcgtccgcccatgcgtccgatcgtgatccaaacttgctgaaaacactagaggtctatgatgagacagcaagattcctgagagagctagaattggatgatgatgcactcacaaaagctattattggaaccataggcgatgttgacgcctaccagctaccagatgctaaaggttacagcaggtatgtaagcctctgtttatgctggtgctcttgtccagcacaaattaaccaacaattgatggtacaaattaaccaacaattgatgatatgccttaccattggtggttttgatcgaaacatctactctgatcagagatgatagtgatgtactgtaagctggcatcttgtcacaagtaggcctgtttttggacagggcagtacgccgaaactttaaaatgattattagaataactaaaatttagtaaattggtaatttggtttggggaaatggg

SEQ ID NO: 101118 - DNA, 1358 bp, Zea mays
  unsure (1)..(1358): unsure at all n locations
  Clone ID: MRT4577_23732C.1
ggtggacttcgcttttttggggggggggtcccccacncctcctcttcaccccncgccgtgtgataaacaacctcccccagccactcggcggcgccgccagctactcccgccgcaccaccaccttactacggagggatgccgcccatgggcgacgccatgcncctcgacggcctcctcgacctctccaccctttttgccggcgcccacgagttcttccccaccgctgcggcggccactgacaagggacaccactatataagggcgcgtggtgagccctccttcgctagagaggtgtcgatatatgcacgagctgcctaatcagtcgcgatacaattaatgatccagaccgaggaagctgcggagctggagtggctatccaagttcgtggacgactcctattcggacatgccgaattactcgtccgccacgcatgcggcgatggcggcggcggctgctgctgctgctaacgcggcaggcaacggaggaggcaccacctcggccggtcaagacagcggcgtcgccgcggcgcctggccgcggcgcgcgcagcaggcggtcccgcgcgaccgccgcggctgccgcggcgtggcactccctcgtgccgcgcccgccgtctcagtcgtccccgtcatcgtcgtcctgctcgtcctcggacttcccgtcgtcgaacaagccggcgcgcccgaacggcggcggcggcagccgcggcaagaaggtcccggggccacccggcggcgggcccgctggcggggaggcgggcctggagggcggcggcgtgcggcggtgcacgcactgcgcttcggagaagacgccgcagtggaggacggggccgctgggccccaagaccctctgcaacgcgtgcggcgtgcggttcaagtccgggcggctgatgcccgagtaccggccggcggccagccccacctttgtgctcacgcagcactccaactcgcaccgcaaggtcatggagctgcgccgccagaaggagctcatcctcatccgcggaagccaccgcgacgccgccgcaggatccccccccggcgggccgaggccggagctcatgttccgtgactacggcgtgtgttagcccgctgcccggcaaaccggcaccgaggaggctcgcgtcgtgcgttgcatgcatggagctttagatccttttgcgaaattctgccgtttctgccttttttttaatctttccctgcgcgttccagatatttccgtttctttctcttttgttaattcttaaattgttggtacctacctacctcatccctgcttgagagatcaatgaattctgttgtataaaaaaaaaaaaaaaaaaaaaaaaaaaaaaaaaaaactcgaggaagggccgcgtgtacc

SEQ ID NO: 101119 - DNA, 186 bp, Zea mays
  Clone ID: MRT4577_23733C.1
accctacgtaagctcgaattcggctcgaggacctgatgagcattttactttttcactcacaactctcctggacacagggagcgacaccatggcttttggatacctaaatccagaaccatacccttccacacctccccactaaacaaaacaagtgctgcaacaaggcgctagtcacttttgaccata

SEQ ID NO: 101120 - DNA, 621 bp, Zea mays
  Clone ID: MRT4577_23734C.1
taactttatgttatttgttttttaaagtaaaaatgtgaactttgttatgttttagtgctttatggctatttcaaaagtttatttattgtgctttttggttgcctttggtatcatgatcttacgagaaactaaaattatttatatttcccgaaactaaaagagctaccatttcaactttctaactgtagcattagttacaaaaagaactgagtagttactagaactttttcgattttagttatacctggtttacggatttaatgtgttacacttacttctaggtgaggtaaatcttgtaagggtaagctttgcaagtgaaagttaaatttattagttattttaagaacaagatttaatagtgatctttattgcgtgtcattatagctatctctatattttattttaatcttaactttatacttttttaatccgtatttttcaatcaattacacattgtaatcaataatgtaagtattattaaacttattactattttataacaactataatataagaaatcagaattcggctcacttgctgcaactgtttattaaaaacatagctctaagaattatttagagtgacttctgccctatgatagatattaaatggccgcagtac

SEQ ID NO: 101121 - DNA, 235 bp, Zea mays
  Clone ID: MRT4577_23735C.1
ccgactgactcttcccctgaggttataaattatttaggaaataaagcatgtgagtgctacatctcaattgccgattgggctgctgtgcaggaatggcagaacgctatccatgacttgaaaaagagtaccagtagcacttccctcaacctgaaagctgtcttcaactatataaaatcattaagcagctttgagtctggaaaatttgttgaatgtaccgagcagttagaattgttac

SEQ ID NO: 101122 - DNA, 1173 bp, Zea mays
  Clone ID: MRT4577_23736C.1
cacgctgcaaacactgtattttggctgctgtaactggatttgacactaaaatagaggatactaaatatgagtgtctaaaaacactaaaccatggttatatagctagccaacaaagggcgcggcatgcatgtacgtatgtcccaataatatatattatatacacttcattcaataagggcgcacgtcgtccgtcggtggcgatacgcgtcacacctcagcgcgtgccagcgagcgcatgcagctcgtcgtatgtactgtacgtgcacctactcatgcacgccatgtcgctcatcggcgaaattttgcatcacacgggcaccacggtggcgcgccccatccccatctcctcgtccagcacgtcctcctccgtcgccaccggcggccccgccttggggtcgaacctcttgctcttggggttcgtggccgggtcgtacctcttgatcaccagcacggacgccgacgtcctgaactcgggcgacaccaggtagctcccgacggggcccagctcgtcgggcctctccaccagcggcgccaccggcggccatccgccccaccacgaacacgttgaacccggacagcgactcgatggtctccagcacctgctccctggtgcacgcctccggctcctcgaaccgcaccgacccgtccttcacggccccgaccctggccttgaacgcctccaccgcggcctcgtcggccgcgctctcggcctcgtccagcagcggcggtcggctcggctgcaacctggccagcgtcacggcgacgcccgggtgctcggccatgcgcgtcgcgtaggccagcgcctcgcggtcgtccggcccgccgaagaagagcacggcgacggagaaggacacgttcttggccgacacctgggcgtgcccgccgaggccgcggtccacgaggatggcgaccgagcagggcgcctcgcggagcacgcgcttgttgacggcgtggtacgccgaccccagcgacgcgaaggagccgtcgtggccgagcgcccggtggtacggcatcaccacgatggcggcgcgcttgtcggcggcgctgtcgatgacgtcgcggtggatggtgtccaggtccgagatggccgtcatggcgcgcacccgcacggagctcagctgctggaacgcctcgaacgccaccaccacctgctccgcccgccggacgcgtggg

SEQ ID NO: 101123 - DNA, 270 bp, Zea mays
  Clone ID: MRT4577_23737C.1
aagccatttcttatctgtagatgtgctgcactttcagttttcagcgatgttggaatctagcatcagaagctcgttccttcacactcagtggcgtctgtgcttgtccacatgcgctgggcgtctgggaccttgaatgcctgccctggttgtgtggactccttaatgccaatcatttcttcacttctctgggacacccagggcgcctgttgacaagtgtggagaaactcctaatttaaatgtcacagacaatgtcctagtgttgactactac

SEQ ID NO: 101124 - DNA, 321 bp, Zea mays
  Clone ID: MRT4577_23738C.1
aaaaaaataactttgattatattttgacaatttgactgcaattatgaaatggaaatcaatcaattccatttgaaatgaagaaataaaaaccgaaggcggcactggattttggaacacaggaaaatattaccattacaaaaatcctcgcaggaagaaacaagtctttctttgagatggagtataatttatttaagatcattccctccaccctcgttcatgagtttgccgacttcgactcacattctaaagatgcggatgaaaaggacataaaaatgtaagatgtcatcatcaaccagtcaatgcagcactgagcgcactggg

SEQ ID NO: 101125 - DNA, 600 bp, Zea mays
  Clone ID: MRT4577_23739C.1
cggacgcgtgggttgtgtcaaataaaggaaaatcagctttcaagggaagagtttcagattttttcttgtctaaaagtaaaaggccaagaaggcagatgcctgcttatcatcaatctgattgtattgctgaggggcttgaaggctgtattactcataatagacaggactgcatcataaaatggatgccatcgagaaagcgatgcattacgatgatgaattcaatagtttttcgacacgaatatcaactagcataccagatagaacaacttctggtgcatctgtttcattgggcagttcaaccggaaacctggataaactaggagtaaacaaatgcctaaatggtaaccgtgatcaaccaagccctacctcagttcttgatgcaccctctgaagatagcagttgttatgagcctgaaacacttggaacaactacttccaagaatgctatattaagatcttcagcaattgaaactgtggcccgtttcttgtcattaccgaggatctcttatggggagtaatggatgatctgagtgaagaagcgtttctggatttttacagtctgttttagtgttgagatatcttttgtgtcttgtataacttt

SEQ ID NO: 101126 - DNA, 297 bp, Zea mays
  unsure (1)..(297): unsure at all n locations
  Clone ID: MRT4577_2373C.1
ccggggggggaacccagnacgccggggagccgtaccaatacgccggcggccgccagggcgacgctccccgcgtgatgccaccagcctcgctaggggcgctgggggaactcatcaggaagggggctgcccctcttgcagccttgctcctggctgccgccgctgtcgtgggctgctctttcaaggcgaagtaacgggggggggggcgggtgggtagtgtggctcaactgtagaagttccttttgtgtagcaagcgaggaaaaaaaaaaatgaccaaaaaaaaaaaaaaggggggggcgg

SEQ ID NO: 101127 - DNA, 695 bp, Zea mays
  unsure (1)..(695): unsure at all n locations
  Clone ID: MRT4577_23740C.1
cctgcaggtttcggtccggaattcccgggtcgacccacgcgtccggagatgctttatatcacatgatagctatagatatacaaatataacaccattttatgtaaggaattccatatctatggtgcattctgtaacccacacccctgggccactgagggataactctgtgtatatgtctgcattcattatctgcaagcttattgtaacccatgtcacaactatgacacataacccttttcccaagggtcctgaggtcccctagtctcgggagatgagctgtctgtgagcatctacccatgtgaagagcattgtgtaggaggtgtgtctggcagaggagaggccacgctgttctgccacacctcttcggcagggaaatgatacaacccatgttttatgtgccacagtagagcaagtctgcacccccatggtgtgctctcgccctttttgtgtgctcctgtttgtagcagctaattgtcatcctctcgccgtgtccctgtgccttgtgcttctttgcttctcatgaataggtccctgagggtctgtgtgccagctctcctacgcttaccagccctatggagtatccatctccagttaactcgctgcacaccccacctctccaccggcacaatgtcttcaagcgccacagcatgcgggaggaggacttcatccggnccagtagccgagaagaggccagc

SEQ ID NO: 101128 - DNA, 346 bp, Zea mays
  Clone ID: MRT4577_23741C.1
agtttgagtggtaccttatagaaacaagtgggggaaactgggggggttttgagcccattcattgaattaacgatgaacagaggtcactctttgttggaagcctgtcacatactaataattcaacttcttccatatcattggcctctccacagatattagaaagacatgctactatcacatgcaaaaataaaactttctatctgactgatctcggaagcgaacatagtacctacattaccgacaataaacgtagactttaccacgtgccaccaaactttccagttcaagtccatccctacaatgtcattgagtttcgtttcaataagaaaggtatgttcatgatgaa

SEQ ID NO: 101129 - DNA, 311 bp, Zea mays
  Clone ID: MRT4577_23742C.1
tttttaacggaaatggggagggggaaaaaaaaaaacaggcaatggggggagaaagcattgaaaaccgtcccaaaaaaagggtccccgggggcttaatcatctccaaaatttatagggggggccaaaaaattgggcaaaaggaaaaatcctgggcaaaaaaaggcccctgggggcccggaatagtatgtttagggctaaccgggcaaaaaaaaacgggggggggaaaaaagggcccaaaatgtctgaaacaaacccgggcgggagcagttttttttgggctggccaaattccccccaaagaattccccaggg

SEQ ID NO: 101130 - DNA, 1496 bp, Zea mays
  Clone ID: MRT4577_23743C.1
actcctatgggccattggtcccctcggggccggccgggaacgccagttaccactcaccagtcaccagtctccactctggagtctggaactcccctcatcctccacatctccaccgcatcggaactaggaaggcgaagccgaaggcgcggcgcggcgcggcacggatcgagcgatggcggtggcccctcctacggcggcggcgctggagcagctaagcagcagcaagatgttcgacggcttcaatctccgcttccgccaccagagcgccacccttggctgcgccatgactttctccatctacctgcccccgtccccggcgtccaaccttcccgtgctgtactggctctcgggtctcacctgcaccgacgagaatttcatcataaagtccggcgcccagcgcgccgccgctgcccacggcatcgccctcgtggcacctgacacctccccacgtgggttaaatattgaaggagagtcagacagctatgattttggtgtgggtgccgggttttatttgaatgccacaaatgaaaagtggaaaaactggcgcatgtatgactacattgtgaaggaacttccaaaagttttaagtgataactttgaacaactcaacacgtcacaggcatcaatttttgggcactcaatgggagggcatggcgcgctgacaatttacttgaaaaacactgataaatacaagtcggtgtcagcatttgctccaattgccaatccgataaactgcccttggggtcagaaagcattctcaaattacctgggctcaactaaatcagattgggaggaatatgacgcaacctgcctgattaaaaagaacagcaaagttcccactactatcctaattgaccagggggaggccgacaagttcctggctgagcagcagttgctacctcacaagttcgaggaggcgtgcaaggccgcaggggctgctctgaccttgcgcatgcagcctggatatgaccactcgtactatttcatcgctacgttcgtggacgatcacattgcgcaccatgctcagtttctcaagagcgcctgactgtaaatgtgtagcgtgaggaagacaaggaggcagcctagcatgggtgttttatctatgccgacagtgttgtctcgtgtggcagcttgaggagaggtgaacagcacaccccacatgcgaaataagatggaagatttgctgttcctgtccattgacattgacgagctcgaatgggactgatgttgcaccgaatgtagtttccctgtcattcgctatgcgcaattatgttataacggccctggtgcaaggaatgattgcccgagtgcttgtgtgtgcggcgcgcgcggttgactcttcttggcattctgcagggggtgtacaaatctgtatggatcagagcttggtttagtgttgtcctcctgttcgaaccagaattgagcgcggacggtccggccctgaggccggacggtccgcggtccggacggtccgcgcctgtgggccggacggtccg

SEQ ID NO: 101131 - DNA, 318 bp, Zea mays
  Clone ID: MRT4577_23744C.1
aaaacaacaaccaaagataagaaataaaaaaaataaccggcggcatcagcgtcggctcctcggacacctgtggctctgtccgcggatcgcgccagatccatcacgaccagcggctccaccgcggtcgcagtcgcgatcgtccgtgctgccttggactccttcgtcgtttaccacattcactgacttgccggactatgagcctgagccagatggaatagacgcaagtagggggacagagttggctgcgcttagctgttctgcagctcgcgcgcattcccgaaccctcggcgtgctcccacatgacacgggggtggtagt

SEQ ID NO: 101132 - DNA, 393 bp, Zea mays
  Clone ID: MRT4577_23745C.1
atgaaaagaaaaactcacagctacctttggtcccaccgaaggagggggtgccgatcttctacaggtgcgagaacacacatcaacggggaccaggccgtgaaacactctatgtaccaaaaggcacgagacataaaccttgcctaattacataaatgccagcaacatttgctccaaaggatttggcgaattaaccttggctaattaataatcaaggtctcagggcgacgacgctatagaacatagcttctagagcgcgcaaaagagcttacagccataggcttacaacgcattcatggtactttagggtggcatagatttaatacactggcctttattatacgacgtctttaatggcaaaaccttagccttccgcaacagatatgccatacagaa

SEQ ID NO: 101133 - DNA, 350 bp, Zea mays
  Clone ID: MRT4577_23746C.1
ttatttttttttttttttgttttacttttcttgcatttctttccaagcgtgacttacagtccgactacccgagcggatgaccggcaaacagggtgacaaagactaaggccagatcctgggaacgttctctcgaagttgagtttgaaccataaagccataacgggcttgtgcacaggaaactgaaacccacgcttacataaagttagcggttacagctaatctggtgatcactgatcagcccaggctgggcaggaaatactggacttcgacatccttggtcactgggaacacccactgctcatacatcttggggagcagtttgggacccaccttgcactccatggcaccag

SEQ ID NO: 101134 - DNA, 509 bp, Zea mays
  Clone ID: MRT4577_23747C.1
ctgggctctgcgctcccaactcgagaccaaggaaaaagagaagggggacgagtgcggctgtgggcgggattctgttcgaccgccgattcgaccccggggaagcctctggttaacacctctgcgcacccaactcgagaccgaggaaaaagagaagggaaagcatagggtgcggggaaggtatcgcctcggaaggactcaaatcaacggcaattcctcgccggacattgctttccgtcgtgaagtcgctccgctctgtggacaggctcgtcatcaagccaatcgcgggtacgctacaggatatggttgatggtgtgacttggccttctaccctgccaccgggttggacggttgagtgggatgctgcctcgacaggagaggagcaggaggagaggggataggccttgccctattcctcagtattcgacgtcatcgattatccgttgcactttaattatgaactagttcccttttatttaaaactcctatttatgtaataactctagtacctt

SEQ ID NO: 101135 - DNA, 693 bp, Zea mays
  unsure (1)..(693): unsure at all n locations
  Clone ID: MRT4577_23748C.1
gccggccgggtcgggctctgcgctcccaactcgagaccaaggaaaaagagaagggggacgagtgcggctgtgggcgggattctgttcgaccgccgattcgaccccggggaagcctctggttaacacctctgcgcacccaactcgagaccgaggaaaaagagaagggaaagcatagggtgcggggaaggtatcgcctcggaaggactcaaatcaacggcaattcctcgccggacattgctttccgtcgtgaagtcgctccgctctgtggacaggctcgtcatcaagccaatcgcggatttcaacctcgctgacggagagtgcgtgctcattcccgagcaaggagctgtccaaaaggaagcccaggagccaactcccgagcctgccaccgaggatctcctcgcagcctcagcttttgaaggtacgctacaggatatggttgatggtgtgacttggccttctaccctgccaccgggttggacggttgagtgggatgctgcctcgacaggagaggagcaggaggagaggggataggccttgccctattcctcagtattcgacgtcatcgattatccgttgcactttaattatgaactagttcccttttatttaaaactcctatttatgtaataactctagtaccttaatttggtggntncatgttttattgnaaaaaaaaaaaaaaaaaggccccta

SEQ ID NO: 101136 - DNA, 284 bp, Zea mays
  Clone ID: MRT4577_23749C.1
gtataaaggtttcatgattttactgcgggtcgaatgggaccacaccgcttatacatacgtaatttttttatttcaccgccagcattgattccaatagccatgatgatgaccaggctttttctaccaaaactcccaatttctccgttggacttgtaaaacgcttccttccagagcactggtatctgtttatcggtccctcagttttgcttacacttaacacgcagctgccagttcatcggatggcgccaaaatacttctatgacggacgggggcaacaatagaat

SEQ ID NO: 101137 - DNA, 380 bp, Zea mays
  Clone ID: MRT4577_2374C.1
ggaccctaggggggggtggtaaaaaaaaaaagaaacccggggaaaaattaaaccccccgggggggacgggaacccttgttttgtcaattcaaaggggtccctggggtaaattaaaagccaaaaaaaaaaaagggggagttccgggaaatccccggggggggggcccaccatttaaagggactccaagtcccgggacccgagggggggctaaaaacccccgggaatggaccccattttgccgggggggccgccaatttcccaccccggggggggccccccccaccgggaaacccacccttttggcggggaaaaaaatgggccaaaaaaacttctccaacccccccccctttggggcggggggggaaaaggcccctttcccc

SEQ ID NO: 101138 - DNA, 278 bp, Zea mays
  Clone ID: MRT4577_23750C.1
cacactgtgcacggacagtgcaagcaccatgaagtcaatgagaaggactccaaaccccttctctttggtgagaaggagggtgctgtgtttgtctgcgagaaccctgaggagatcccgtgtagttcgcttgttgctgaagtatgctgatgagtctaatgtagttttcactgaccaagacaaggctgtacttcactcgaagggcggcgcctatattgttggcatctctactcctagcaaggatgcccctatgtttgacgctatggttaacgacaacgagt

SEQ ID NO: 101139 - DNA, 435 bp, Zea mays
  Clone ID: MRT4577_23751C.1
tgtttgtttctaagcggtcctcgagacatcatgcctgtttcttcggatcttttgcgcctaggccaagggcgaaagcaagcggagtgacagcctcttcaacaagctgctgctcgaaaacccgctctcctgccgaaagcaaggcgatcacaactctgaagactttgggcacctgttgctgtcgctgcaaaaagactactgattgaccacgcataacatcaagggcatacttgggaacatgggagaagcactcatcgagacattatagctggtgctggagtactgcatgagcgagctgatgaacaaccgtcacgagctggccaagctccagaacgaggtgaggacggcgacgcccgacggccgcatggtgaaggaggaggacctaggcccgattgcctacctgaaggtcaccatcaaggagtacatgctgatgcaccc

SEQ ID NO: 101140 - DNA, 337 bp, Zea mays
  Clone ID: MRT4577_23752C.1
ccggaattaatggctcgaccgacccatgcgttcgcgcgggttggcttatcctgccccttcggaatccgttcctgcacattagagcatccggggttactgctcttgggtgaacgttccaaattcatcttcaaatggaagtaccacatcgttctcctcgacattctcatgtacaatgtatagcacttgctgcaaaacgtcttcaatacctatcttatagtggcaatacagacctactatcctcacccaatcaactcaaatggacatgatctactgattggttaagctatgcacagctgaagctaatcgtaacgatcctcgagggcatgaacgacttgta

SEQ ID NO: 101141 - DNA, 722 bp, Zea mays
  Clone ID: MRT4577_23753C.1
attatctcaaaaaaaaaaagtcttgagtcccccctctccttccccttcccaacgctctcgctgcagaggaaaggcgaagatggcgatgaccgtcgaagtgcttgctgcactcgcgttcatgttctccacgagtattctactgcagatactggcatgcgctttgtacagcaactggtggcccatgttagcagctctcatgtggattaatgctgcaaaattcttgactggtgcatcggccatgggaagccttgctattccagcaattctgaggcatgctggcttaatcgagaccggggccatgttcatcgagttcacgtccttcttcatccttgtatgcacagtgctgtgcttccatagggcgactctggatgaagactggtaaatgcgcatttcaccgacaccctgaaccctagcggttcttggctgcttctgtccatgctaagaaatattcctgttggaagctaacatggatctgtacaaagaagcgtatttcgagcgtagccgtagctgatgtcttatgtagacacttgtgaagattatgtggtcatgtggcaatgcagatgttattaccttcactttgactttgtcgtcacatgttctatggtgaaggaaggaatcatccgtgtaaaccatggccagggcacgccctacttggctcctaattctatcgcaggctttggggttaacctattatgaatggaataataggatcttgatgaccg

SEQ ID NO: 101142 - DNA, 487 bp, Zea mays
  Clone ID: MRT4577_23754C.1
ttttttttttttttttttttttttttttttttttttttttttttttttttttttttttttttttttttttttttttttttttttttttgggcccaccggggggaaaaaaattttcaaaaaaaaactgggacgtacaaattttgggaaaggggggtttttttttggtaaagggttgcccaatacacaaacaaacgggggaaaaaaacaccaaccccccaaggataaagtttccaccccgggaggaacctacaagcaaattttacttgatgaaaatttttcggggggggggggtccctttttggaacaccaacaggggataaaaggtaaaaatccttttggggggggggggttaaaaaaatttttggcgggttattctttattgggagaacatttttcccatgggggaagttttcaacccttttccctatttggggggggttgtttttagggacccttggaaccacccaacccttggggggggttcagg

SEQ ID NO: 101143 - DNA, 461 bp, Zea mays
  Clone ID: MRT4577_23755C.1
gaagactggtaaatgcgcatttcaccgtcaccctgaaccctagcggttcttggctgcttctgtccatgctaagaaaaattcctgttggaagctaacatggatcttcacaagtgtctacataagacatcagctacggctacgctcgaaatacgcttctttgtacagattatgtggtcatgtggcaatgcagatgttattaccttcactttgactttgtcgtcacatgttctatggtgaaggaaggaatcatccgtgtaaaccatggtcagggcacgccctacttggctcctaattctatcgcaggctttggggttaacctattatgaatggaataataggatcttgatgaccgaaagaaaagggagagctaattagtcacatggctcggtcgatgtattttttttcatatttgcattcatgaatctgtctaggatattacatattgtggtctgaatctttat

SEQ ID NO: 101144 - DNA, 1129 bp, Zea mays
  unsure (1)..(1129): unsure at all n locations
  Clone ID: MRT4577_23756C.1
ccgggacgaatattatctcaaaaaaaaaaagtcttgagtcccccctctccttccccttcccaacgctctcgctgcagaggaaaggcgaagatggcgatgaccgtcgaagtgcttgctgcactcgcgttcatgttctccacgagtattctactgcagatactgaaggcagcatgaagttgccatgctattattgtttgtcgcttcttcaatgttggatttcattttatggtactggcatgcgctttgtacagcaactggtggcccatgttagcagctctcatgtacgtccttgtaccaatgccatgcctgttttttggtggtggatccacacacttcttgaccagcagagaaggtggagggtggattaatgctgcaaaattcttgactggtgcatcggccatgggaagccttgctattccagcaattctgaggcacgctggcttaatcgagaccggggccatgttcatcgagttcacgtccttcttcatccttgtatgcacagtgctgtgcttccatagggcgactctggatgaagactggtaaatgcgcatttcaccgacaccctgaaccctagcggttcttggctgcttctgtccatgctaagaaatattcctgttggaagctaacatggatctgtacaaagaagcgtatttcgagcgtagccgtagctgatgtcttatgtagacacttgtgaagattatgtggtcatgtggcaatgcagatgttattaccttcactttgactttgtcgtcacatgttctatggtgaaggaaggaatcatccgtgtaaaccatggccagggcacgccctacttggctcctaattctatcgcaggctttggggttaacctattatgaatggaataataggatcttgatgaccgaaagaaaagggagagctaattagtcacatggctcggccgatgtatttttttttcatgtttgcattcatgaatctgtctaggatattacatattgtggtctgaatctttataaatcacttgttttgcggtctgaaaaaaaaaaaaaaaaaaaaaaaaaaaaaaaaaaaaaaggacaaacaatataaaaaaaccaaanntnacnnacccnnncaaaaaaaaaaaaaaaaaaaggggcggcccctttaa

SEQ ID NO: 101145 - DNA, 307 bp, Zea mays
  Clone ID: MRT4577_23757C.1
acacaacagggggcggggggagaatctgaaacaaaacggctagcaactctgggtgctggagacaagggaaacatggtaaaaacgaagcagaatccatccctaggagccgagctaccagaactacattcatactgctgtatggggggggggaggaggaactatggcaatctcgaggaagcgccaggtggcaggaaggggggtgccgctacatgtcactgccagatagactaattagctacacagggcacattggcgcacaagcacgtaaccttgcatgttcaacaacaggctcgcatgcctcagatcg

SEQ ID NO: 101146 - DNA, 301 bp, Zea mays
  Clone ID: MRT4577_23758C.1
aattagctcatcgactccagattgtatatctttacaccatgaaggtgctgatcgttgcccttgctctcctggcgctcgctgcgagcgccgccttcagtacaagcggcggttgtggctgccagacaccaccgtttcatctaccgccttcgttctatttgccgccttcgatctatctgccgtcgcatcatcattcgcagccatggcaataccccactcaaccaccgctgcttatcccgtgccagcagttctgatcctgcggtgttcgtagcgttcgtagcccgtttcttgggctagagcgttt

SEQ ID NO: 101147 - DNA, 2909 bp, Zea mays
  Clone ID: MRT4577_23759C.1
ggcacttgacacttatcacgcggccgtcgtcgccgtcgcgcgcgcgtcgtctcgtctcgtctccccaaccgcacccggctcgtgccactgacatccgccatttaacgcgctctgcctctgatcctgcttctagacttctagtagatatgagcgctgagcgagcgcgcggccatggtggctaggctgctagctggtgctggtgctgctggttttctccgagctcccattgaataacacgctggagcattgatggtccctttcagatggtagatggcgcgcatttacgccgccacggtacgagccgagctcccctcgctcctctgctatatagcgctagctccaccccggggaccctcccccaccgccattgctcagcagcagtagtaaagccacgcctgacagacagctggttcatttctggttgctgccttgctggtggtagccctcggcgcaggcagccaagaacagagagagcgagatggatgtgaacgacgtgctgctagtggtgctggcggcggcgctggctgccatgtggtggcgtcggtgctccaagaccggcggtgtcgacggcctcccgccggggcctccgggttggccggtggtggggaacctgttccaggtgatcctgcagcgacggcccttcatgtacgtggtgcgcgacctccgggagaagtacgggcccatcttcaccatgcggatggggcagcgcaccctcatcgtggtcacctcggcggagctcatccacgaggcgctggtgaagcagggccccatgttcgcgagccggcccgaggacagccccacccgcctcctcttcagcgtcggcaagtgcaccgtcaactcggcgccctacggccccctgtggcgtgctctgcgccgcaacttcgtcgccgagatcgtgtccccgcaccgcgtcaagggcttctcctggatccgggagtgggccgtggacgcgcacttgcgccgcctctgcgccgagctcgcggcggacggtgccgtgcgggtcatggccagctgccgcctcaccatctgcagcatcctcatctgcatctgcttcggcgccaagatccccgacgagctcatccgggagatcgaggaggtgctcaaggacgtgatgatgatgaccatgcccaagctcccggacttcctgcccctcctcacgccgctcttcaggaagcagctcaccgaggcccgcggcctgcgccgccgccagctcaactgcctcgtgccgctcgtccgcgcgcgaagggacttcctccgcgacggcaccgcggcagcggcggacggcgtggagatgatgagcgggcccggggaagcgtacgtggactcgctcttcgacctggagccgcccggccgcgggaagcgcctcggcgaggaggagctcgtcacgctctgctccgaggtcatgagcgccggcacagacaccagcgccacagcgctggaatgggccatgatgcacctcgtcctcgaccccgccgcgcaggagcgcctctacgacgaggtcgtcgccaaggtcggcaagaccgcccggatcaccgaagccgacgtcgaggccatgccctacctccaggcggtggtgaaggagacgttccggcggcacccgccgagccacttcgtgctgtcgcacgcggcgacgcgggacacggagctgggcgggtaccgcgtgccggcggacgccagcgtggagttctacacggcgtgggtgacggagaacccggcgacgtggccggacccggacgcgtggcggccggagcgcttcctggaaggcggcgagggcttcgacaccgacatcaccggcacccgcgcgctgcgcatgatgcccttcggcgccggccgccgcatctgccccgccgccacgctcggcgtgctccacatccagctcatgctcgccaacatggtgcgcgagttccgctggctgccgcccgccggtgagggcccgccggaccccaccgagaccttcgcattcaccgtcgtcatgaagaacccgctccgggcagccttcgtcgagcgggccacgacggagacggcgacaaccgcgtgacgagtgacgacggaaagtaaaaaaaaagggagagagagagaagttactagtacaagttactctttcactgggctctggcagggtgggtaagttgctgcaacgtgcgtgtcgtgcggggttaattcggtcccgcactctgcggtataaattacagttattaattaattagtccacggggaaggtgcgtgatcatcatatactgtatggatggattgatcggttcatcctacctgttggctggtcgacggatggctggatggacacgtgccgccaggcggatggatggggttcatgggaatgcaacgcacgatgctgtcctcatatcataatttttttttctttagtgtttctatgtgctattaattttaatagtagaagtactgtttcttagctttctatttctcttttctctgttcaatttcatccaaaagtgtacctacgtacgtactagctattgcatgatcgatgtggtcaatatattggttgtcatctcatgtgcaaaaataaccaaaaaaaaaaaaaaaaaaaaaggggggcgcgtgatcatcatatactgtatggatggattgatcggttcatcctacctgttggctggtcgacggatggctggatggacacgtgccgccaggcggatggatggggttcatgggaatgcaacgcacgatgctgtcctcatatcataatttttttttctttagtgtttctatgtgctattaattttaatagtagaagtactgtttcttagctttctatttctcttttctctgttcaatttcatccaaaagtgtacctacgtacgtactagctattgcatgatcgatgtggtcaatatattggttgtcatctcatgtgcaaaaaaaaaaaaaaaaaa

SEQ ID NO: 101148 - DNA, 2925 bp, Zea mays
  Clone ID: MRT4577_2375C.1
atgactctcttgccaagttcagcagcatattcactatcggtgaggatcagttctaggctggaggacaatgtgtgggacctcacgggggtttacgggccacaactagaaaatgagaaaatgatattcctctctgaactccggtacatccaatcaatggtcagaccagaatggattctcctaggtgacttcaacacgatcaggagagcaagagagaaaaacaaagggtcaatcaacagaagagtgatgaggcagtttaataacacaattgatgatctgcatctccttgaacttgagctaactgatagagcattcacctggtcaaatgaacaaatgagtcctaccatgactaggattgataggttcttcgcaacaactgagtggcatgacctgttcccctcggctgacattcattccatgtgcaccatgacttcagaccactgcccgcttttattgcaaagccactcttcgggtactttctaccaagggtttaggttcgaatctttttggcctaagattgaggggttcaacgaggtggtccatcaagcttggaactctacagtaacctcaaatgatgccatacttcgactgcacgtaaagatggctcgcactgccaaagctctttcggcttggagacacaatacggttggcaacttcaaagtgaagatggccatcattcagatcaccattactctactggataaagctcaagagaatagacaactttcctctgaagaatttgatttcaggaggactcttaaaagcaagattcttgatattacctccgctcagagggcaagtgcaagacaacactctagactcacctggatgcgactgggcgatgctaacactaaattctttcacctaacagccaataatagaaggcggaaaaatttaatcagatcgttaattaaagatgacactttgttaacgagtcaggaagacaaattgagtgaggtacagcttcacttcgatcagatgctaggcacgacaggtaggaggagcagtgctgttcactgggaccacctggggtatgccccctttgagttatctgagctggacaactcgattgaggacaatgaaattaaggatgttgtgatgggtcttcactccgaaaaggcccccggcccggacgggttggctccaagaatgaacgatattatctccagtgctcagaatgccttcatccagaaccggtcaatccatgacaattttctgtatgtgcaaagggtgattatgaacctgcataaaaatgggcgcaattgggtggctgacattctgggatcttcctcctcgagaataattatcaatgggcaacgttcaaacgcaatcaagcacatgcgtggggtgcgacaaggagacccactttcccccttccttttcattttagcgatggatccacttcaccggatgattgagaaagccgctgacgagggattgcttggacaggttttacctagaggggctaagttgcgatgctctctatacgcggatgacgcgggtgtgttcattaaagctgataaatcagacttggaggtgctcaaagggattctcaacgcgttcgaggggtgctctgggctaaagatcaactatgacaaaacagaaatttacccaattcgttaccccgcagcattatggcctgcgctatcggaggtgtttccgggcaaatactctagcctccccgggaagtaccttgggttaccccttcatttcaagaaagttaaaaggaatgaccttcaacctttaatcgataaaatcaacaataggttggcaggctggaaaggcaaaatgctgtcaaaggccggtagagaaactcttgttaaagcggtgctatccgcacaaccaatctaccatttaacggtttttccacctcaaaaatggctgctgcaaacaattgatagaatgcgtagaaacttcctgtggaaagggagcaatccagaagtttgcagcggggggcactgcctcgtcaactggaccttaacttgcctccctaaggacaagggaggtcttggaattctggaccttgatcgttttgtgagggggcttagactaagatggttgtggctacgttggaagagcaaagatagggtgtggactgccttgcagcttccttgtgacaaaactgatgaagatcttttcaacgcttccacaattgtcacggtaggcaatggaaagatggcagaattctggaattctagttgggttcaaggccaagcccctaagaacattgcgccatcgttgttcaagaagacaaagaggaagaacatcacggtggccaaagcgctcaataacaacaactggattcgtctttgctctccgtattcgggggagggtgagtttggagagttaatctctttgtggcgggccttaggcgacatgcaagagcttaacgggttggaagacaacatcgcttggagatggacggcagatgggcagtacagtgctagtagtgcttacaaaatccagttcgcatccaattttagtataatgaatctatgccccatttggaaggctaaagtggagccgaagtgcagattttttgcttggacacttcttcataagagaattctgacggccgacaatcttcaaaaaagaggctggccatgcaacccagtatgctgcctctgcaactcagccccagaaacaatcctccacttatgcaaggattgcccctttagtagagaggtgtggatcaaagtttggaatggggccaacgttccattactgacggggtctaccaatgacatttctttatacgattggtggatggacctgcgcagcctttgcagcagacagaccagaagaggcttcgacggtcttctaattcttttttggtggaacctttggctggaaagaaataatagaatctttcaaaggcagcatcgaagcgttgatcaagtggctctggcagtcaaggattttgggtag

SEQ ID NO: 101149 - DNA, 256 bp, Zea mays
  Clone ID: MRT4577_23761C.1
gccggccgggttgggcttatacgcccgcccgcccctgccgatccatccacctaataaagcgcctgtacagatccaacccttaggatccggatcgccttacccccccgcgacgatttgcgcgattcgattcgattatcctccgatgctccccttgttttatgtggtgttggactaatgattactacactaaaaaaaaaaaaaaaaaaaaaaaaaaaaaaaaaaaaaaaaataaaaaaaaaaaaaaaaaaggccccta

SEQ ID NO: 101150 - DNA, 785 bp, Zea mays
  Clone ID: MRT4577_23762C.1
aatggtatgatcatattcaatcttattcaacaatccactctcaaagcttttagtaaccagaatcatattttcaaagaccaattggtcaaagacatgacatcgataattgaaacttaaaatactacaatatttagtatacaagataaatagaataatcaataaattatttcattaacaaagttagcaaataaatatacatgtatacaataggatgttagaggtaccttatgatttgaactttttgggcttgtttggttcgctacctaacttgccacactttgcctaacttttctggctaaggttagttcttcaattcgaacgactaactttaggcaaagtgtaacacagttagccacgaatcaaacatgccctttgtttcctaaatatcaagacacaaagcaagcgacggagggggatcgttgttgccgcgttggctgcctaccgctagacgacgaacgagtgtagtgtagacgacagaatcacgttgtgcgctggtggcaggcgaaacaaatgtccgtgatcgtcgcccatcaggcagcagcacactgggcgcttggcagcaggcgaaacaaggtcacgtcgaacggtatgagaaacgattaaaaaaagacacattgtatccgtctagcaggccgcacccagcaggatttactttctagttcctaatagtctaattagcattactaataggtcatacatggaaagttggggccccaaagaaatgggggccctgttcagccgaacaggctgcactgtcttgtgcacgggcctaggttaactaaata

SEQ ID NO: 101151 - DNA, 618 bp, Zea mays
  Clone ID: MRT4577_23763C.1
taggggccttttttttttttttttttatagagataaatgtcataaaacatcagagtatttattacatagcggaagacttattacaaaataaaataacaaatataaaacgaactaaggatcgtcggcgcaaatgtcaactgagaaacgccacctagatcaagtcgaatgcctcagtgctaggcggctcctcttcgaccacctgttcttctccttcaacgagctcctgctcagctatctctacttgctgaacctcagattccacagtgacttgctcgtctgtaatgagctcctgctcagctatctctacttgttgaacctcagtttccacagtggcttgctcgtcaacggacggccgagggcggacgacgctggtccacggggaggggcggaactcgcttgcagtgacacggcggcgagcaattcgcccaccgcaccaacgcacgactccaatcgccggcgctggcggaaaccctgacgactacgactccacttagccacacgccgaagcaaattcgcccgcaccgaagaggttcaccggcgacgcgacggactcatcctggcggcgtcaattccttcccctagttctctctctctccgcaacggtggggttcacgaggt

SEQ ID NO: 101152 - DNA, 340 bp, Zea mays
  Clone ID: MRT4577_23764C.1
acgtaagctcggaattcggctcgagattcagcaatgcctatttcttttgatggcatggcggacgaggacgcgcaacgcatatcgcctgacctggccctaaacgacacgaccacggttgggattgacggacgggtccctcatattaagtttcgcaaggcctcctggctctgcactgggatgctcagctactttcaccagactgtgcttggacaaccgaccactgggcccctgggaaaccccaacgaggtgtcctcgtaacatccctcaactagcattctgtggctcatgggtcacctcaaaactcctgggcagttagacacatacttggagaatggctacg

SEQ ID NO: 101153 - DNA, 2779 bp, Zea mays
  Clone ID: MRT4577_23765C.1
gacgtggttcaggacacgtccgtaaagaaatggaaagacgtggcaaatgattcacgcaaacaattgcatgacaaagaaaaggaggttctagacctgcggcaagaagttattgggttaaaacattctctaaaagaggctaacgaccagtgcatacttcttgttcaatgaagttcaaaaagcctggagagtttcatcttcactccaagctgatctcaagtctgaaaatttaatgcttgcttagaggcaccagactgagaatgttcagaatcaccagctaggggatcagatttctcatcttttgaaagttgaacaagagcaaaacctaaagatgcaagaacgggatttaacaattcagtcactacagactaaactcaagtccattgagtctcagcttaatgaagccctcaatgctagcgatgctagatcaactattgggtctgaatctgcttcagtaatatcttccccaaagataacagaatcaactgctgactcatcttcagtgacgaaaaggcttgaggaggaattggcaaaaagggatgcccttattgagaaattacatgaagagaatgagaagctttttgacagacttacagagaagtcaggattaggaagtgctccacaggcttcaagcccttcagcaaacaagccagctaatggtcaaggaagggagataggcaggagtgacagcagcaaaagtcgatcaccagatgtgtttgcatcaccagtgtctcaggataaaactggaaacagtggagctattgtaaaatcaagcaatgagctagcaaaaactacacctgctggggagtaccttacgtctgcactaatggattttgatcctgaccagtttgagggatttgcagcaatagctgatggtgctaataagcttttgatgctggtcttggctgcagttatcaaagctggtgcagctagggagcatgagatacttgccgagatccgtgatgctgtgttttcattcattcgaaagatggaaccgaaaaaagttatggatactatgttagtttcaagagtcaagatattatacatcagatctttgcttgctaaatcacctgaactacagtccatcaaggtctctccagttgagcgtttcttggagaaatcaaatactggtcgaagtagaagttctagtaggggaagtagtcctggcagatctcctgttcaccaccatggtcatggttcccgaactgcgcttgttgatgaacatgtgcatggtttcaaggtgaacattaaacaggaaaagaaatcaaaattctcctcaattgttctgaagcttcgtggtatcgaggaggagacatggagacagcatgttactggagggaagctccgcgaaattactgaggaagctaaggccttttcaattggaaacaaggctttagctgctctctttgttcacacgccagctggtgaattacagcgccaaattcgtgcatggcttgctgaaaactttgagtttctatctgtaactggtgcggatgctgctggaggagccgcaggacagcttgaactgctgtcaaccgctattatggatggctggatggctggtcttggtacagcgcagccccctaccactgatgctttaggccagcttttatcagaatacacaaagcgtgtttacacatctcaactacaacacttgaaggacatagctggcacattggcaacggaggaggctgatgatcctgcacatgtcagtaaactccgctctgctctggagtctgtggatcacaaaaggagaaagatcatgcaacaaatgcgaactgacactgccttgttaacaaaagaagaaggtggctcaccaattcgcaatcctcttactgctgcggaggatgcacgattagcatctctcatatctctagataacatcttgaagcaagtcaaggaagtaattagacaaagctctacaggacctatgagaaaatcaaagaggaaagctttgctagagttattggatgacctcttgacacagatgccctctcttcttgatatagatcatccatgtgctcagaagcagatcatggaggcacggaaagttgtcgagtcactgcaagaagaccctgatgatcctgccccacagtctaatgcattgggagagggcgaggtttcacagtggaatgtactgcagttcaacacgggaacgactgcgcctttcatcataaagtgcggagcaaattccagtggtgaactggtgattaaggctgatctgcgagtccaggagcctaaaggtggcgaggtgatccgtgttgttccaagaccaacagttcttgcggacttgagttttgaggaaataaaaggtgtgtttgagcaattgccagaggcagttagcttgcttgccttggcacgaacagcagatggtacaagggccaggtattcaagattgtacagaaccttagccagcaaagtgacggccttgaaagagactgttgcagagatggagagaggtggtgttttcaaagatgtacgataaatgctgtgttattgtagagttatttatgatattgatgttgtatatggatgccatttgtcggcatcccttgtaactgtatttgtttttactatgtggaaacctatgttgtaacactattctttggcaagagatgagccttgcctgccccaacccgtaatactatggttgtgcaaggcattaatgtaaattgtagctgcagctgataaatgtctgcagtgctgcaagtctgaactttccaggttatggaactattcaatgtttatttgtattaagcttttaagatgttaaatttgtgct

SEQ ID NO: 101154 - DNA, 584 bp, Zea mays
  Clone ID: MRT4577_23766C.1
gctccgctacgcttctgtgctcgtagtgcagactgcgctgcgagcgatggcggcgcggaacgagttcagattcaagaagcaggctacgggagcagttacaattcaggctcgctacaggtgctatagggctcataagtaccacaagaagctgaaatgcgcagccattgttgcacagtgcagatggagaggaaggatcgcgaggaaagagctcaagaaactcaagatggaagcaagagaaacgggtgcgctcaaggaagcgaaggacaaactcgaaaagaaagtggaagagctcacatggcgcgtgcagttagagaaacgactaaggacagacctggaagaagcaaaagctcaagaggtgtcgaaactgcagaactctatggaagcattacaggctaaactggacgagacaaacacaaagctcgctaaggagcgagaagctgctaagactaaaaaagaagcgcctcctgtggtgcaggaaactcaggtcctcgtccaagacaccgaaaagatcgattccttgacagcagaggttcaagaccttaagacttcattacaatcagagaaagaaagggctggcgatttgg

SEQ ID NO: 101155 - DNA, 155 bp, Zea mays
  Clone ID: MRT4577_23767C.1
tatctatcgagtggacgcgacgccaacagcgtcagcagccaactaccgctctccggctcctgtcctgctcgcgctcgtcgcccccctgccgctcggctccccttggcccctacaatgccaccacccatggcactgctgccgctctactacgcatc

SEQ ID NO: 101156 - DNA, 3643 bp, Zea mays
  Clone ID: MRT4577_23768C.1
tagtatatagagatttttaactagcatccaacattcaatgtcatatgtgctaaaatttagcattggaaatgaacgggcctgtaccagcgacgaagcgacaatcctacccgttccttggttcgtctgcatccatcgcggccctacgttcctttgcagcctttacccacggcccagcctctgtcgccgttttcgtgcgaggcaccggcggccgcatagaaactcagcttccgtctctaaaccctcaaccctagcccgtcatgtggcgccgtctccccacccgccgcctcgcctccgccctcctctcctcctccccactccagcgcgccaccgccacgcacgctcctcctctcgagcgccacttccccactacggcctccggtctccttccgccgtcactcttgcccccgtggcagcaggagccgcgatggttctcatcctccgccgccgcggaggctgtgtcctcggaggatgccgaggagctgcaccacgcgatagaggagatcgtccggccgcagccgagtccgaatctgcctcaacctcaggcggtggcagaggagtatcaggcacccgggcgggaccaccgtagccggcataggagaagtgggcgcgggcggcatgcggaagtgttggcggcggagcacgggatgacataccacaggtacacctcccttcgccggcgacaaatccgcatcgagacggaggcgtgggagcaggccgccaacgagtaccgtgagcttctcgcggacatgtgcgagcagaagctcgcccctaacctaccctacgtcaagtcgctctttcttggctggttcgagccgttgcgggatcagatcgccactgagcaagaacttgtggcagaccccgggtcccgggcctcgcacggtccatttttcagtatgctccctgcggacatgatggctgtcatcaccatgcacaagctcatggggttgctcatgacgggcagtggggacggcagtgttcgagtcatccaggccgcgtgccagattggcgaggcaattgaacacgaggttcgaattaacagatttctggagaagacaaggaagaaaaacaacaaagagatggaaaatgaagaagaagctggtgacacaaacattgctgtagaacaacagcgtctaagaaagaaagtcaccgacctaatgaaaaagcaaaagttacggcaagtcaggaacatagtgaagaatcaagataaatccaggccgtggggtcaagatgctcatgcaaaagtcggtagtcgtttgattgatctttttattggaacagcacatatacaaccaccggcaagccaatcatcagatggtctgcctgacatccgtcctgctttcagacatgaaatgagaacaatggtgaaagaacagcagaagagtagtcgcagatatggtgtgatcaagtgtgatccactggtccggcaaggcttggatagaacagcaaagcacatggtcattccgtacatgcctatgttgattcccccaatctgttggacaggatatgacaaaggagcacacctctttttaccatcatatgtaatgcgcacccatggtgctcggcaacagagggacgctgttaaaagagctccaagggaacagatgcaatttgtttttgaggccttgaatactcttgggagcacgaagtggagggttaacaaaagagttcttagcattgttgacagaatctggtcaaatggtggccggcttgctgacttggttgatcgtactgatgttcctgtaccggagaagcctgacactgaagatgaaaccttgctaaagaactggaaatggcacttgagggcagccaagaagaagaacagtgaaaggcattctcagagatgtgatgttgaactcaaacttgctgttgctagaaaaatgaaggatgaagagggattttactatccacacaaccttgattttagaggtcgggcttatccaatgcacccttatctgaaccatttgggttcagatctttgtcgaggggttctagagtttgctgaaggtcggccacttggcaagtcaggattgcgttggctgaagatacaccttgcaaatttgtatgctgctggtgttgataagttgtcatatgatggccggattgcatttgctgagaatcatttggaggaaatatttgattctgctgataggcctttagaaggcagacgatggcggcttggggctgaagatccattccagtgcctggcagtatgcatgaatctcactgaagctttaagaagctcgtctccagaaacaacaatctcacatattcctgtgcaccaggatggctcttgtaatggtctgcaacactatgcggcacttggaaaggataagttgggagccattgctgttaacttagtcgctggagaaaagcctgcagatgtttacaccggaatagctaacagggtgatggaaattatgaggatggatgcacaaaaagatccttctgtagaacctgatgcagctcgtgctcgtctgatagttgaccaggtggacagaaaattggtgaagcaaactgtgatgacatctgtgtatggtgtcacatatattggagcacgtgaacaaataagaagaagactaaaggagaggggggtcattcctaatgactccgaactgtttggtgcatcatgctatgctgctaaggttactcttacagcacttggtgagatgtttcaagctgcccgtagtatcatgaactggcttggtgactgtgccaaggtaattgcttgtgaaaatgaaccagtgagatggacgactcctcttgggctcccagttgtacaaccatatcgcaaacttgggaggcatcttattaaaacgtcattgcaggttttgacccttcagcgggagacggataaggttatggtgaagcggcagaagacagctttccctccaaactttgtgcattctcttgatggttctcatatgatgatgactgctgttgcttgcaaaaggcaaggtctgaattttgcaggagttcatgattcatattggacccatgccagtgatgttgatacaatgaataaaatactccgggaaaagtttgtggaactctatgatacacctattctggaaaatctgttggagagctttgagaaatctttccctaaattaaaattcccaccgttgccggagaggggagacttcgatatgaaggaagtccttgagtctacgtattttttcaactagcacaatcaatgttaacagttgcattatacacgctgctgcccggacatatctgagttctgagtgtagatctaccaactcgaatgatgaaagctaggtcatacatgagcataacccgaagagtggctttgcagaagttatcagaagctaagttggtactctgagcattcacaaatgcatcggcatcatttatcgcgttgaagttggcaatgaggtttgctaaataaaagtgggaaccatatcaaagttaaacgagaatccctgtaaatgtaattatgtaatttttttttgtctttagtgtttttattttccttgatcttggtactgtcgagagaaattcggctgaccggtagtttgtcggctggtgctgactagagattatttcatactttgtagtttaacaatataatttagtaataaagtgatatactagtatttttctaaagaaaaaaaaaaaaaaa

SEQ ID NO: 101157 - DNA, 639 bp, Zea mays
  unsure (1)..(639): unsure at all n locations
  Clone ID: MRT4577_23769C.1
attgggaccctcgaggccggccgnggccggggattttctttcttctgagatatggcctctagcgacatcgctagcgatccggagagtctccagagcaccgaaacgtggtgacgtcattcttttccaaagattctcgatcagctggtatgaccacctcaccgacgaccagattcctgcagtgcaggatcctgtcttcctctgccaagggcctcagcgaggatgagaaagacccgaagaaatcgtacattgagatgatgtaactggagaagatgccgaacgtcgcatcaaatgcccccatgtcaagagagcaaccttcgtcaactacacgtctctgatagaattgatgtgaatactggacgctcgtgccacacagagtatagcaggatgccaacgtgtctaccggacaataacaggaactaccctgtcctgccacgaacaattgatgctctgcatgtcctgggttggcatctattgtcagatgctaaacaccggaagaagctgagcgactgaagaggtcgatacgaatgcgagctagggctggttggacttatatgtcaccatggactactatctgcgcacaccttctgtgaataactggtgagacataccttgcagaatgcattactagctctgaggact

SEQ ID NO: 101158 - DNA, 261 bp, Zea mays
  Clone ID: MRT4577_2376C.1
atctatgttagccttgcccataattatgttggtcagtttattagggggggaaatcctgatatttcctccttggaggaagtcacagccaccctctgtgcccgggggtgttcatatatagtgcatgctccacgcaacaaacttagtttggttcatcttatagatcatgcttccgctattgtagcatataaatgaacatgatcatcatgttgctgcttaaacatggaaaggtcatcatgcctagcattaacatcaatcattttc

SEQ ID NO: 101159 - DNA, 776 bp, Zea mays
  Clone ID: MRT4577_23770C.1
gccggccgggccggggtctgcctgccctaccgaatctttcgccgccccatcagcccagcagttcttcgctgttcgttgccgttggttccatcggttgatcgaccggcctggagcagagagacagagagagatgggcaagtcctgggcgctcatcagccacctccacaccgtcgccgggccgagcatcaccctgctgtaccctctgtacgcgtcggtgtgcgcgatggagagcccgtccaaggcggacgacgagcagtggctgtcctactggatcatacactccttcgtcaccctcctggagatgctcgccgagccgctcctccactgggtacccgtgtggtacccggccaaggtgctgttcgcggcgtggctggcgctgccgcagttcaagggcgcctccttcgtctacgagaagctcgtcagggaacagctccggaactaccgcgccagatacccgcgcaagggcgccgccgccgccgtcgtcgacgacgacgaccataaggtgcacatagccaagtgaaagcgtgtggagactggagacgacgcaggagctgaccggagatcatcatcagaggaacttatgtagatctggtgttccaaggtgttcattcgatgtatcatcctacgtatctctgtaactcttgtggactgccggtgtcgcgtaatgtatctgaactcttcgtgagtgcgatggaacccccctccccttgcagcacgagatgcttctgtaagaacgataacatgtagacaagccaagcgcctcagctccttaagtg

SEQ ID NO: 101160 - DNA, 348 bp, Zea mays
  unsure (1)..(348): unsure at all n locations
  Clone ID: MRT4577_23771C.1
aacaccccggcgttcgcacacggaagcccaaaatncttctcgagcttttgcccaacccacaccacataccgctgacactctaacagattttgcggacaaaaaacacgaggcacccagcaccaacagccaactacgcctcatgcctcccgactccgtgacggcccacatacacatgccaccgaataacgcacacatccaaaccatccaaaaacgcccaaacacccccccgacaaagcccacaccctaatcccccgactaccgcgccaattaactcaccccccactacggctcccaatgaactaggagcaagcatgcactccaacgccaactcctcctactacactacta

SEQ ID NO: 101161 - DNA, 662 bp, Zea mays
  Clone ID: MRT4577_23772C.1
gtcttgtctgtcccttccttccctcccgtttcgcaggcctggcatcaccctgctgtacccgtgtgtaagggccttcatcaccctaataatagcagggaccagttttaccagtgcagcagtgaccgaccacggtccacggcgtacgtgagctgagggcatacgtgctgggacatgcgtgccgttggtggtgctgcaggtacgcgtcggtgtgcgcgatggagagcccgtccaaggcggacgacgagcagtggctgtcctactggatcatacactccttcgtcaccctcctggagatgctcgccgagccgctcctccactgggtacccgtgtggtacccggccaaggtgctgttcgcggcgtggctggcgctgccgcagttcaagggcgcctccttcgtctacgagaagctcgtcagggaacagctccggaactaccgcgccagatacccgcgcaagggcgccgccgccgccgccgtcggcggcgacgacgacgaccataaggtgcacatagccaagctttgtgcacggatgaattcatgcatcgtgcccatccccacccaaggactagattcaagtcaactacatgctatgcattacaacaagcatctgttgcttgcacaaatggataaatggcataaagggaataaaaattgggctagataa

SEQ ID NO: 101162 - DNA, 916 bp, Zea mays
  Clone ID: MRT4577_23773C.1
gccgaatctttctgccgccccaaatctttcgccgtcccatcagcccagcaattcttcgctgttcgaggacccctcggtttcgaccgaagcccagcaagccgaccacacaccgctgccgttggttccgtcccaagagatgggcaagtcctggtcgctcatcagccacctccacaccgtcgccgggccaagcatcaccctgctgtaccctctgtacgcgtcggtgtgcgcgatggagagcccgtccaaggcggacgacgagcagtggctgtcatactggatcatacactccttcgtcaccctcctggagatgctcgccgagccgctcctccactgggtacccgtgtggtacccggccaaggtgctgttcgcggcgtggctggcgctgccgcagttcaagggcgcctccttcgtctacgagaagctcgtcagggaacagctccggaactaccgcgccagatacccgcgcaagggcgccgccgccgccgccgtcggcggcgacgacgacgaccataaggtgcacatagccaaggtaggtaaggatcggactagatgaagccgtcgcgttttgtcgttctagcgtatatgtgctgtagctgttaacccacctgtttcttcctgtcgggctgggaaacaaaacaaatgctaggctgaggctgagcacgaccatgtgcagtggaagcgtgtggagacgacgcaggagctgaccggagatcatcacaggaacttctgtagatctggtgttccaaggtgttcattcgatgtatcatcctacgtatctctgtaactcttgtggactgccggtgtcgcgtaatgtatctgaactcttcgtgagtgcgatggaacccccctccccttgcagcacgagatgcttctgtaagaacgataacatgtagacaagccaagcgcctcagctcct

SEQ ID NO: 101163 - DNA, 1133 bp, Zea mays
  Clone ID: MRT4577_23774C.1
cggaattcccttttcttttccacacgcccgcctcatgctgggcaatgagcaaaaagaatgttgagtcgcttgcagaaaggcacatcatgccatcgttttcaaattgcttaagttcatataggcatttattgcctgaatctcagttggagaactcatacagtggatggccttgggatgccatgacaaattatgcggaagagttatcaccagtatctgagcaccaaaatgaattgttcacatttcttgctgaagtttcatggaatgcatttcttgttattcatcaagctggtgggcaaggagttaccttgagagaactttcgcaggcactgcatccgttagccatgcagctggtcttaataattgttgacactctcaaaagatttcagctggctgttaaggtcaatgcatatgatggcgttcagattgtggactcattacattcgtcaaagtatcatatagctacacttgcagaatgtgatagttgctgctgtacagatcctccaacttctcaatttgttgataatgaaaacacaaaaaatctactgaaagagaagcataccaagcctattaattttcctggtccaataaaaatgcttggtgatgggcacacagtgacagtaattaatgttcaaagcaagttgagcccaccttacatgcacagcaaagatcctggggatgcggaaaggttatctactccaggagagaacaataaggagagtagtttctatcataattgtgaaaggcattgttatcagcctatattaccatggataaatggtgatggtagtactaatagcactctctatgaaggtttaagtcgccgagttattggttatgtcatgcactatccaggactatcggaggaagatgttatccgtaggatggatgtattgaatcctcagacttgcaggaccctgctagaaaagctaacgctcgatgggaaccttcatgttcgggtttttgaagaacctgtgccaatggctccgaccacactgcaggatccagacttgtgagggcatcaagatttggaatgtttaaatgttaccgtccccagaactggtaaggccatctcgtggtaagaccatctccgccgtgtaaatagtcgtgcaaagtactattttgcacctgtttgc

SEQ ID NO: 101164 - DNA, 1300 bp, Zea mays
  Clone ID: MRT4577_23775C.1
cttcaagctgggcaatgagcaaaaagaatgttgatttgcatgcagaaaggcacatcatgccattgttttcaaattgcttaagttcatataggcatttattgtctgaatctcagttggagaactcatacagtggatggccttgggatgccatgacaaattatgcggaagagttatcaccagtatctgagcaccaaaatgaattgttcacattgtctcctgaactgcacgaggcctgatgatgtaatttcagctgcacagaggtacattgagcaaaatggatcaaaagcgtttgagaatcttgttaacaagccatgcagctggtcttaataattgttgacactctcaaaagatttcagctggctgttaaggtcaatgcatatgatggcgttcagattgtggactcattacattcgtcaaagtatcatatagctacacttgcagaatgtgatagttgctgctgtacagatcctccaacttctcaatttgttgataatgaaaacacaaaaaatctactgaaagagaagcataccaagcctattaattttcctggtccaataaaaatgcttggtgatgggcacacagtgacagtaattaatgttcaaagcaagttgagcccaccttacatgcacagcaaagatcctggggatgcggaaaggttatctactccaggagagaacaataaggagagtagtttctatcataattgtgaaaggcattgttatcagcctatattaccatggataaatggtgatggtagtactaatagcactctctatgaaggtttaagtcgccgagttattggttatgtcatgcactatccaggactatcggaggaagatgttatccgtaggatggatgtattgaatcctcagacttgcaggaccctgctagaaaagctaacgctcgatgggaaccttcatgttcgggtttttgaagaacctgtgccaatggctccgaccacactgcagggtatgttcaagcaacactctagtaaagagccatcaaaatgtgtaaagcgctacttcgcaaacccaatgagcacattacaactgtaactgcaagaagattttaactttgttctagatccagacttgtgagggcatcaagatttggaataaataaatgttaccgtccccagaactggtaaggccatctcgtggtaagaccgtctccgccgtgtaaatagtcgtgcaaagtactattttgcacctgtttgcagagtaaaatttaaaatagagagtaagatagggagtggaatagagagtctgctggtctgctggagagctaaggcccttaactg

SEQ ID NO: 101165 - DNA, 353 bp, Zea mays
  Clone ID: MRT4577_23776C.1
cccgacgtgagctcgcggaccgtgaaccgggccataatggctgagctggtccgcctctaccgctcgtccgacctggggatgcggctcccggcctacgacggccgcaagaatctctacaccgccgggaccctcccgttcgacgctcgcgagttcgtcgtgcggctcaccgatgaggacgacggcaccggcgtcccgcctcgggagagggagtacagggtcgccatcaagttcgccgcgcgcgccgacctccaccacctcaggcagttcatcgccggacggcaggcggacgcgccgcaggaagccctacaggtactcgacatcgtgctccgcgagctcgccaaccagaggtacgt

SEQ ID NO: 101166 - DNA, 978 bp, Zea mays
  Clone ID: MRT4577_23777C.1
ctcgaggccggccgggctccggccgcttgccacgagtcatcgggcgcgaacgcacggcggcacacacccacgcgcggatttatatggcgaccgcgcgcgcaagtccgcctcgtcacacgccacaggctgtgtagagcgcgcgcctggcatgacgatggctcgttctggggcggctttgccgctgctgctggtcgtggtcggcgcttgctgcgcgcgcctggcggcggcagtgcacctctccgcgctcggcaggacactcatcgtcgaggcgtcgccgaaggccggacaagtcctgcacgccggcgaggacacgataaccgtgacatggcacctcaacgcgtcggcgtccagcgtcgggtacaaggcgctggaggtgaccctctgctacgcgccggcgagccaggaggaccgcgggtggcgcaaggccaacgacgacttgagcaaggacaaggcgtgccagttcaggatcgcccggcatgcatacgccggcggccaggggacgctccggtacagggtcgcccgcgacgtccccaccgcgtcctaccacgtgcgcgcctacgcgctggacgcgtccggggcgccggtgggctacggccagaccgcgcccgcctactacttccacgtcgcgggcgtctcgggcgtccacgcgtccctccgggtcgccgccgccgtgctctccgcgttctccatcgccgcgctcgccttctttgtcgtcgtcgagaagaggaggaaggacgagtaggccgtaagcggcacacgcgatatataccagggaggcgccaccgtgcgagctagcgcttggtgagccgtcatggttgtgtagtgcagttgtaacacaagtattaagctaagcacaagtcgtaccatgtatccagctccagcatgaatccaaacccagcgtcagtcacaagctggacctgcatggtgcctgtcaaccaaaattcttcttggatcatactaatactatcgtctacagcg

SEQ ID NO: 101167 - DNA, 316 bp, Zea mays
  Clone ID: MRT4577_23778C.1
ccggccgggatgtattttgtgaatctttggtaaattggtgagcctctgctcttgttgccctcagagattctggtcccattttattcggttctggtaggcttcaggatggtttgtttttcttgtgatcagtgtctaaactgttaatcggttggtaaatttgtaactgctctagaatagaggttacatagtagcatttgagcttgactaagttatttgtggggtgcgaggttccatgtaattatgtaaatgttctactgagctgctcagagtcttatcctactactgtttttggaaaaaaaaaaaaaaaaaagcggcc

SEQ ID NO: 101168 - DNA, 415 bp, Zea mays
  Clone ID: MRT4577_23779C.1
cccaccaaaccaaaccttatttaaattaaataaccaatctggctaggaatagttccgggtggccagtcccccaaaaaccgaacggacctttagtggaaacaaacccagtttccttgatctagcttaaggactagtttcaaaaaacacaaattcctttgcaaaataacaggttgctaactaacatacatgacatggcacatttgaatccagccttccaggtccagcctttcctttcacacataaaaaatcccttggaaacaaaacccacaggatggatggccttggtacttttaaagcgtaaaaaccactgtttgaataaaaatacaattaatacggccttttcctgttcgtgttcccctaaagggggggaaaatcgccgtttttttcatcgaaatttggttccttgtaaacctgg

SEQ ID NO: 101169 - DNA, 411 bp, Zea mays
  Clone ID: MRT4577_2377C.1
ccaccacgactatatctgccacgtgcgcctgctcaacaaccccgacgccgtctgcgccgagatccagcactcccgcgaccgctgccgcgtcccgctcaccctcagggggggcatcaatcacagcggcgtccgctacggcgggcccatctccttcctccgcaaggagccgctccccaacttgcagcaagctgctccgcgcctacgacctctacaacgagacgtccgataattcccaagcatgcaaacaaactttctctcgctctctttttttttaacaaaaacatcccatatacatatagcacatttgtttccgtttgtttatgcccgcatgcatgctatcagacatccttcctaagaaaaatttatgttatttccatctcgcattattttagtatctaccattcaagtttt

SEQ ID NO: 101170 - DNA, 194 bp, Zea mays
  Clone ID: MRT4577_23780C.1
gcgtgtcgacctaagccgttacgcgcccaccggccaggcagagcggtgaggggccggcctatcctccgttcgaagcgccactactgagccaccggagtcggccgcatccgctggtgggctcggccaccagcatgttgacgatcgggatgctatgttactccagaaaaaaaagatcttgtagcaaaaaaccagga

SEQ ID NO: 101171 - DNA, 410 bp, Zea mays
  Clone ID: MRT4577_23781C.1
cccaacaaaaagttcccaaaccttttttttccttaaaaaaaaaccccttcccattcaaaggggccatccaggccatggcccaccccgccccccagggggaggggggacactacgttacccatcgccgttaaaggagaaaccaaccgggctaggaagctagccaggggccccattacattattacaacagaccccgggccgggacccccctaggggcgaatcccccaccacgggggggcctaactaggggaccccgcccgccccccaagcggggggcaagcaaggtaaaaggcgggcccgtggggaaaaggtaaccccctcccatttcccccccgcatgccgcccccggaagcaaaaaaagaaaagcccggggggcccagggggggggcccccccacattaaatggcgggg

SEQ ID NO: 101172 - DNA, 141 bp, Zea mays
  Clone ID: MRT4577_23782C.1
ccttctcagcgtaaggaggggagccggagatgttttactcgcagttcattttggccaaaaagggtcccctcgggaccatatggattgccgcgcacttggagcggaagctgcgcaagaaccaggtcgcggacacggacatcg

SEQ ID NO: 101173 - DNA, 767 bp, Zea mays
  unsure (1)..(767): unsure at all n locations
  Clone ID: MRT4577_23783C.1
accatagatacactagtgtaattgatgtcttgatgaccattagtttacagttccaacaccacaactgcgagccaaccgagaatcattagtttacatgttcagctatatatacagacaaaataaacaatgcagacgacacaactcacagtctgaatcggtggtgatccactgcgccgtcctgcagcagcaggcttcctcctcctcctcgtctccttccatgttcttcaacatactctgctggcttatggacgacagccttgacatgcaatagtctttcctcagtggcgtcagcagcgtctgctccgaggactttgccggtgccgacatcaacgacagcggcgaatacgcaaccgacgatgccgaggagcagctgcccacgtcccacttgaagctcagcttgcccgagctgcagcttatcgcctcttcctgctgcttctgttgccgccctccctttgtggccgcagcgctatcccttgcgtggaagctcagaaccttcttccatttctttccactgacagtgacgctgtgaggcttggcctgngcagcccgcttcagaagctccttaacccgagcaactgccttcttgccgtcaatcctatgcgccatcatcttcttcattgcactgtcaacaatgccatgctcgggtgaagatcggcagcactttgcagccaatcacaacagtgccggtaggctcagcaatgtgccccatcctcagctcanggcagaggcttgttgctgcaacccccagccttcattgnatcccctgc

SEQ ID NO: 101174 - DNA, 1945 bp, Zea mays
  unsure (1)..(1945): unsure at all n locations
  Clone ID: MRT4577_23784C.1
ggatggcctggggttgcagcaacaagcctctgccctgagctgaggatggggcacattgctgagcctatcggcactgttgtgattggctgcaaagtgctgccgatcttcaccgagcatggcattgttgacagtgcaatgaagaagatgatggcgcataggattgacggcaagaaggcagttgctcgggttaaggagcttctgaagcgggctgcccaggccaagcctcacagcgtcactgtcagtggaaagaaatggaagaaggttctgagcttccacgcaagggatagcgctgcggccacaaagggagggcggcaacagaagcagcaggaagaggcgataagctgcagctcgggcaagctgagcttcaagtgggacgtgggcagctgctcctcggcatcgtcggttgcgtattcgccgctgtcgttgatgtcggcaccggcaaagtcctcggagcagacgctgctgacgccactgaggaaagactattgcatgtcaaggctgtcgtccataagccagcagagtatgttgaagaacatggaaggagacgaggaggaggaggaagcctgctgctgcaggacggcgcagtggatcaccaccgattcagactttgtggtgttggaactgtaaactaatggtcatcaagacatcaattacactagtgtatctatggtaaggtctgtgtctgtatcagatcagataccccgacggacttcgctgcattacacttacagttgccccggcattgcttcctatgtactcgtatatgtattatatgtgtcttgaatacaatcctaaggataggaaaggtattcatataaattctagtacatcaaatgtgacaccagggtacctaaggttccggtgattgattgatcaggagagcagtgccgtagagtttgtctaccaaggcatgacacactaactcaatagataactctagagaggttcggactgcgtaaaagcagtgtacgggtttacaagcctaggagagaagagatcctcctctgagcctaccggcactgttgtgattggctgcaaagtgctgccgatcttcaccgagcatgggggtgttgacagtgcaatgaagaagatgatggcgcataggattgacggcaagaaggcagttgctcgggttaaggagcttctgaagcgggctgcccaggccaagcctcacagcgtcactgtcagtggaaagaaatggaagaaggttctgagcttccacgcaagggatagcgctgcggccacaaagggagggcggcaacagaagcagcaggaagaggcgataagctgcagctcgggcaagctgagcttcaagtgggacgtgggcagctgctcctcggcatcgtcggttgcgtattccccgctgtcgttgatgtcggcaccggcaaagtcctcggagcagacgctgctgacgccacggatgagggactatcgcatgtctgcgctgtcgtgcagtggccactgtgagttgtgtcgtctggcattggttaattttgtctggatatatagctgaacatgtaaacaatggattccgnccgattcagctttgtggtgttggaactgtaaactaatggtcatcaagacatcaattacactagtgtatctatggtaaggtctgtgtctgtatcagatcagataccccgacggacttcgttgcattacacttacagttgccccggcattgcttcctatgtactcgtatatgtattatatgtgtcttgaatacaatcctaaggataggaaaggtattcatataaattctagtacatcaaatgtgacaccagggtacctaaggttccggtgattgattgatcaggagagcagtgccgtagagtttgtctaccaaggcatgacacactaactcaatagataactctagagaggttcggtttgggtaaaagcagtgaaggggtatacaacgcctaggatacacagagatcctcgt

SEQ ID NO: 101175 - DNA, 247 bp, Zea mays
  Clone ID: MRT4577_23785C.1
gtgccggctctgctctcctcgcatgctcctgctcattcccagccgcgccgcagttcatgcatgctttcctcagcgctaggccggggtcggaaaggagacttgaccgtggatatgagtatgtaaccccaccgcaataccggacttgctggaaaagcagatcttgatccgttcctgttcctgttcctgctgctagctactagttgctaaggccgtgtacgtacgcgttgatgaaggtgaccgtgtgagg

SEQ ID NO: 101176 - DNA, 180 bp, Zea mays
  Clone ID: MRT4577_23786C.1
ttgggcctgttttaatatagctgctagagaaatgtcaagttctgtgaggctttgcttccattgcactgtgctgctctgatctggggactccaagggcaggagctctcagcattttctctatccctagttctcagcacgtggagtacagaggagaagcttcataaatgcagctgagtggat

SEQ ID NO: 101177 - DNA, 710 bp, Zea mays
  Clone ID: MRT4577_23787C.1
ggaagagagtagaccaataaaaaggggaaaatgtagctgacttctctaaatttgaggttcaagctcatgtttgatctctctatggaattggggttaagaatggcaacccagaagaattccttatgaaaaaaaataattctaatgattcaaatactccaaagttcctgctatccaaaggagcacttatcatttacaaatgcataaatgcttaggtgcatcaaaatggcgtacatacaaaagcagagcacactagataattcccacaaaaccctcttgaattgtattcctagagctcgagctaatctccaagccaaacaccttccgtattccaactccattatttgtgaagctactccacaacgaagattttgaactacactcattctgtccaactgctgcgttcatcaccttgtcgattgcccagctggacaaaagaatagccaagatatctattttctttcttgtccttgctctctatagataactttataatgagaggatccctgccactgattttgtagatggacagttccgcattcccacacctggttttttcatttcaggaccgcaatggcaacttgcgggaaacagaacttgaagtctacctgtgctttaaagcaacccctgatcgtcagtcatacgacgccccagcagcttccagggatcaaccaggttcagcatggctcgctcagcatgcaccaaatggacta

SEQ ID NO: 101178 - DNA, 347 bp, Zea mays
  unsure (1)..(347): unsure at all n locations
  Clone ID: MRT4577_23788C.1
agaccggaaaccactttgatttcgatttttttattaccaaaatcaaatttttgggggtagaatttgatccaaacaggggtaatgtttnnnaatggggaaaaaaggctatcccttcccttactttactcagccaaccactacatttttttggagggttttatacaggttcaaaaaaaaaaattattgaactaagggacacattgcatttttgggggggccgccgccaggatatgggtcgcattcatattcgtacaggggaccggatcccttggggggtccttggactagtaggaggcaaccatcggtgggaattcatgctggatgagggtgggattccttggccattt

SEQ ID NO: 101179 - DNA, 1496 bp, Zea mays
  Clone ID: MRT4577_23789C.1
cattgggtacctcgaggccggccgggtttgcttcagaattactgtttccagttcgcactctggtaaggaggatctgaaggctgcatgctctgatcttgaaatgataagaagactgaagaaagaagctgagcttcttgaggcatcctttctagcaaaagcagaatatctggaggccgatgcaagtagcggatcactatctcctgcagaggaaggacctgtaaagacaagtagcaggacgaacgatacatcagcaccacaaaaaacaggaagcagggtggataataaacgtcgcccattttgggacttctttggtcggtctttgaaagttgatccagctcttgcagatcaggatctgatcactgtcgccaatgtggagaaggaaggcatggagtcaaatgacatcctccgcttcgaacagttaagacgtgagctgattgagttagaaaagagagtgcagaagagtgcggatgaagctcaaaaggaggaggagatggttgtcgcagaaaaaacaactgcaccatcgcctggctcatcagtttcttctcgtcagactaccaagaaagaaaatgtcataactaaatcagtggagaaggtcaaagagactacaacgactgtgttgcaggggacacaactattagcaattgatacaggagctgctatgggtttgctaaaaagagctcttattggggatgaactaactcagaaggaaaagcaggctcttcaaagaacattgacagatttggcgtctgtcgttcctataggaatactcatgcttttgccacttaccgccgttggtcatgctgctattttggctttcatccagagatatgtgccatcgatgatcccgtccacatatgcccccggtaggttggatctccttaggcagattgagaaggttaaggaaatggaagttgctgaaggcagcagtgaagatatattggaggaactgaacaaatgaaataagctgggcatgtacagatggacatgattatactgcttagcttacggtctttcctgtaaagttgttttggaacaagacatttgagggggtttgttttatctaaagattctttgaatggcatacccgctggaaacagaagtgcaaggccctaggaataagtaaccaatcattgtgtcgacaaatgttccacgtctgtaggctgctgtatacataacatactccacattatactttacatgggcggctcacggtgcccttcaacatagtagaggatgaatgtccaagttcctcctggacagtgttctgtgtagggtagtggttttgatagaggattgtatatctagttggtatgttggtgatcacctttgttttgttttttaggaaccaagcctactacatgcattattgtctgtacccaaatgccaagttcagtgatctcctacgggattgagtggtgcgggcattttctaataataagccaagcccgtgagcaaaaaaaaaaaaaaaaaggcccctagtaggcgtgaacagtgtt

SEQ ID NO: 101180 - DNA, 1998 bp, Zea mays
  Clone ID: MRT4577_2378C.1
attgggtacctcgaggccggccggggcgccagcagactctttttaatagccgacctcccccaaggcggccgggaaacccactgttgcagcgcgagtgtagcaggctgcacacacaaggaaggggacaaccacaagcgcctaagatcccgtcctccgcgtcgagatctttgccgaggcggtgaccgtcgagggatcgccatggcgttgagggcgtcccccgtgtcgcatggcaccgcggcagcgccgctgccgcctttcgcgcggaggaggatggcccgtggggtggtggtggccatggcgtccaccatcaacagggtcaaaactgtcaaagaaccctatacccctccacgagaggtacatcgccaaattacccattcactaccacctcaaaagcgggagattttcgattcacttcaaccttgggccaaggataacctactgaacctactgaagccagttgaaaagtcatggcagccacaggacttcctaccagagccttcttctgatgggttttatgatgaagttaaagaactgagggagcgggcaaatgaaatacctgatgaatactttgtttgcttagttggtgatatggttactgaggaagccttacctacataccaaacaatgcttaacactcttgatggagtccgggatgaaactggtgcaagtccaaccacgtgggcggtttggacaagggcatggacagctgaagagaacagacatggtgacctccttaacaagtacatgtaccttactggacgggttgacatgaaacaaattgagaagaccatacaatatctgattggttccggaatggatcctggaactgagaacaacccctacttgggtttcctctacacatcattccaagaaagggcaacatttgtgtcgcatgggaatactgcaaggcatgccaaggagtatggtgatctcaagctggcccagatatgtggcacgatagcagccgatgagaagcgccacgaaacagcctacaccaagatagtcgagaagctcttcgagatggaccctgattacacagtgcttgcgtttgctgacatgatgaggaagaagatcacgatgccagcccatctcatgtacgacggtaaggacgacaacctgttcgagcacttcagcgcggtggcgcagaggctgggcgtctacaccgccaaagactacgccgacatcctcgagttcctggtccagaggtggaaagtcgcggagctcacagggctgtctggagaagggagaagggcgcaggactttgtctgtaccttggcgccgaggatcaggcggctggatgatagagctcaagcgagggcgaagcaagcaccggttattcctttcagttgggtttatgaccgcaaggtgcagctttaatcaagaacgctaggcaatgtgggcatttactacgtatatcattttcagtcctggggttctctataagaaacagtctctaggttatctagcagggtagaattcaactactcgtggatctcactcggtgcaaagtagtgcaaagtacgctatctgttgttaccgtgcaagctgcagagtttggattactatgtgggcctggtggtggagaggaattctgtggggtgcctgcagccagttatgagtggcagctccatcgcaactgagttgttgtattgaatatgttacaggacctatagtaaccgaaagtaataatatggagtttgtatatcgacaagcttgctttggtgattgatgagaatctgaagtaataatatggagtttgcatatcgacaaaaaaaaaaaaaaaaaaaaaaaaaaaaaaaaaaccacctccccacgggtcatcctcctccgcgcgaaaggcggcagcggcgctgccgcggtgccatgcgacacgggggacgccctcaacgccatggcgatccctcgacagtcaccgcctcggcaaagatctcgacgcggaggacgggatcttaggcgcttgtggttgtccccttccttgtgtctgcagcctgcagcctg

SEQ ID NO: 101181 - DNA, 184 bp, Zea mays
  Clone ID: MRT4577_23790C.1
ccgacgcgtgcgttgaacaccacacgaattttctgaccaatatgatcatatgggactacgcactctttaaccataaacagatgttcctaccaatgaagacagcttagattacaatataattcgcccatatctttctaaatacaactgacctggaaacagatatgatactctactaatccctatg

SEQ ID NO: 101182 - DNA, 411 bp, Zea mays
  Clone ID: MRT4577_23791C.1
ccgaattcccaggctggcaggtcggctaggagggcaggaagaccgaagaccgagccgggccgcggctcgggacgggaactggacaggacctcaaaatctcagatccttgctgcccgcccgaccgtgcccgtcgacgcgtcggtattgccggccgagccccacctccgccctcttctactacacggggatcggatacgccacaggctgagcgatggtgctaggggtcttcggctacggctctctcatctggaaccctggcttcgacttcgacgacgaaatgctcgagttcatcaaaggctacaagctcacctttaatctcgctggcattgaccacagatgcacaccggatcatccgtcgaggacctgcacgcttgataccgacgacgaggccatatgctggagaattgcata

SEQ ID NO: 101183 - DNA, 354 bp, Zea mays
  Clone ID: MRT4577_23792C.1
gtgggctgctgcggggcctgcaacgagaactattgtcttatgatcacgtttgccatctttctgtctcttatcatgttggtggagctggccgcagccattgctggctatgtgtttacagataaggtgatgtcagcgtttaataacaacttccggcagcagatggagaattacccgacaaacaaccacactgcttcgatcctggacaggatgcaggcacattttaagtgctgtggggctgctaactacacagattggggagaaaatcccttccatgtcgaagaaccgagtccccgactcctgctgcatgaatgttcctctcggctgtgggattaatttcaaccccgaggcgatcca

SEQ ID NO: 101184 - DNA, 716 bp, Zea mays
  Clone ID: MRT4577_23793C.1
acaaccactgtcctgtcctgcctataaaccctttaacttcgcttccgcctccctccctccaccaccacgacacacctcgccttgcccacgcaccgggccaggtggaatggacctcgacgccgacatgatcccgacctccccctccgccgactcctcgccctcctcctccgacctcgacaccgaggtaactcttcaccctcgcccaagttcatgggtcttcttggatcgcatttcctctttgcttggctgacacggcctgacatgctggttatggatgacgtctcgctttcttgtgtgtgtgtgtgtgtggggtgggggaggcagtcgacggggtccttcttcccggaccggagcacgacgctggggacgctgatgggcgtgtcggcgttcggcgggcgaagggcgccggcggcaggcgaggggagcgcggaggggccgcagcgcgcggcgctgggtcacggagaggaggcgaggggcgcgggcgtgaggcggcgccgccgccgccggcggaggcggagcgcatagctgggggcggctgagccgtgaccacggtgggcccacgactgcaagtgcatgagatgctgcacctgcaatgaagcctgcggtgccggctattaagagcaacatgccaggccttggtgccatgatgagagcatatgacgccagggccttcaccaatcaatatgctcaggcagctgaaagggacaccatcagtc

SEQ ID NO: 101185 - DNA, 282 bp, Zea mays
  Clone ID: MRT4577_23794C.1
cgacctctaccagcggtgtcttcggatgtgaaaacccattttaaccctatagaccacggcatccagctgcatctacctttatacccttgttcctccaacaatcatcagccctattatctttagttacctttggtgcatttattggcacaaaacatcagggcacaacaactacaacagacttgtgcttagcaagacctatgcatgccctacttcttcagcaaacaaccaggttgtctttccatttcaaaccaacgtagcttgcaagttgaacctcttgcttcc

SEQ ID NO: 101186 - DNA, 760 bp, Zea mays
  Clone ID: MRT4577_23795C.1
gtctctctcgccatcgatgccaaggccctctccacgcttctagcacatgccagctcctagaagtctccctacatcctcgcgtggtggcctctggctgttgaacgccagcgtcgtttgcgtctagctcgcgctcacctctgcgtgctccactgcacagcgccctgtgtccatcgagtcccgcagcgtcctctccgtgcctacgttcaaaagcttcatcgtctcgtcaagcttcttatgtccaggaggccgttgtgctcggcgtgctttccccgtgtggccttatgtgttcctgtcgcttcatcggcttgtcgcgtgttagagtaggcatggttcagatatatatgtaaatgtagaagaaagttcgaaagaattggttcttgtgtgttgtggtcggctataggtagcgtcatcgtccttatcccgtgtttgtgcggggtggattggagaagaaacgatttagattgtgttttgcgcaatacttcgggcgttgctcaccagttgtccggtgttttggctgaactagagatcaccgcagtttcatggtctctgagtctaaattagtcgaagttaattaagtccgctactcccgctagctagcatgttgtatggatgtgttagaataaaatgatggaaacccagaataatttttgagtgcaaaaagggtttatgaaaaaaagaaaaaaaaatggtaaaaaaaaaatataaagaaaaaggaacaaacgagtcccagccattttgtccccttaaaagaggggtcaat

SEQ ID NO: 101187 - DNA, 447 bp, Zea mays
  Clone ID: MRT4577_23796C.1
cgtccgcggacgcgtgggcttcgctgccctagttgccgtcagccattcctagcaaaagaagtacaaaagccaccagcagggaacgtggtacaagattcaaacatcagtggtgctaatcaaaacacaaccactaatagaaatttgcagtggcgtccattttcaagggctgctggtgcatctagtgccactgcatcgtctgctgctgctgctcaagctgctaatgtagttcatcagacatatgaaaaagctaggagggagagggaggaagcacaagcaccgtcaagaatggaagaggctattcgacctatgtcattgctcgagagaggcatgcaagcatgtcagggaatgttaatcttggaccaggtgatgcaacatctggaaagaagacaaggactatgactaaagacgctgaaggtgggtcttcatccaccatattcagtccaggag

SEQ ID NO: 101188 - DNA, 739 bp, Zea mays
  Clone ID: MRT4577_23797C.1
gatacgtcaagtctctggaaatgttctatcatcctatgtctctcaagccatcgatgccaaggccctctccacgcttctagcacatgccagctcctagaagtctccctacatcctcgcgtggtggcctctggctgttgaacgccagcgtcgtttgcgtctagctcgcgctcacctctgcgtgctccactgcacagcgccctgtgtccatcgagtcccgcagcgtcctctccgtgcctacgttcaaaagcttcatcgtctcgtcaaggtatagctggccggtttgtcatcgacttcttttcaattggaaaatgttagctaagtgtctaatttattaaattagtgtcgtcttctcctgcagcttcttatgtccaggaggccgttgtgctcggcgtgctttctccgtgtggccttatgtgttcctgtcgcttcatcggcttgtcgcgtgttagagtaggcatggttcagatatatatgtaaatgtagaagaaagttcgaaagaattggttcttgtgtgttgtggtcggctataggtagcgtcatcgtccttatcccgtgtttgtgcggggtggattggagaagaaacgatttagattgtgttttgcgcaatacttcgggcgttgctcaccagttgtccggtgttttggctgaactagagatcaccgcagtttcatggtctctgagtctacattagtcgtagttagttagatcgctactcccgctagctagcaggatatatgga

SEQ ID NO: 101189 - DNA, 550 bp, Zea mays
  unsure (1)..(550): unsure at all n locations
  Clone ID: MRT4577_23798C.1
gcaccacctgcaggcgtcgtaccagcagcccgccgcggcgtcgccggcgacttgctacgggccccggccccggaacgcgctcaccgaggccgagaaggaggcgaagcggctgcggcgcgtgctggccaaccgggagtccgcccgccagaccatcctccgccgccaggccatccgcgacgagctggccaggaaggtcgccgacctctcgtcgcagaacgagaacatgaagaaggagaaggacgtggtgatgcaggagtacctgtcgctcaaggaggccaacaagcagctcaaagaacaggtggcgaggacgacggccaagaaggcgccggcgggatccctggcggcggcggcgtccccgccggcgacgccgccgcggccggggntcctgtncagcgcggcgccgccgccggtgccctncgtctggggctcctggccgccgngcgccgccgccgtcgctgggttcgagctgctcggtcgcccgccgccgccgcctctctgcctgctgccctgcgcgtggtccttcccggtcgtggcggcggccccgcgcggg

SEQ ID NO: 101190 - DNA, 271 bp, Zea mays
  Clone ID: MRT4577_23799C.1
acatacaaataaacaggacgctgatgcaagaatacatggacattggaccgaggcaactacaagcatacccatagctaactacagtgctagcagtaaagggaacgaagaaatagcctggttgaacaaccagcactggggacttaaatagcgagggcaacaagatgagtagcggtggggaaaatgctcatacacggtcggaatgtacaacttgcggaccaaataaaacatttgggagccattattgccttacacaaaatccacaggaggtcac

SEQ ID NO: 101191 - DNA, 246 bp, Zea mays
  Clone ID: MRT4577_2379C.1
gaatattgtgttcctttttatgaggcaacctgattgtaaacttcatgtaactatagactggaaaaaatgagccgtgccaaagtctcccttctgtttcttcagcacattgacccatagcacacacatacacaccaccaccaacaacgcttgtgaatgtatttttctgttagctgggtttacatgtgatgttttagtgcttttgcaagttcaatttgttagttcctgtatgaaagattgtgggggaaa

SEQ ID NO: 101192 - DNA, 633 bp, Zea mays
  Clone ID: MRT4577_237C.1
atgccgcgagatatctccgatcatgttccttgtttggtttcctttaagtctagaattcctaaacctaagttatttcggtttgagaacttctggcttgaattggatggtttcatgaatcttttccaaactacatggaatgcgctccctagcatacccgacaaagctaaaaacctgactgccaagttcaagtatgtaagaaaagttctgaaagattggcagagatcgctgccaaaaattgataaaacggtgaagaacatcaagctgctaattgagcttattgacaacatggaagagcatcgggatctatctattgaggaatggaatttcagagaaattctgcgacaaaaggtgaccgaattgcttaacattcagaaaatctattggaagcagcgtgcggctattaggtgggttactgatggagacatttgctctcgcttctttcacgcccatgccaccattaggcacaggaaaaattcaattgcctgctggaactaccagagatatgctgagaaggagaaacatggagctggattcttattcttgcgagaactgtctatggcaaagagaggagactctatcatctgttcctcagatgcaatttcacgaaagcctgctggaattcaattggcataa

SEQ ID NO: 101193 - DNA, 421 bp, Zea mays
  unsure (1)..(421): unsure at all n locations
  Clone ID: MRT4577_23800C.1
cctcttgcttggattccctccgctccggctctgctgccaagctcctcgtctcgtgcctcctacgccattgggctagctgcctgctcgcccgccccttgcgccgggcatggcggccacgctggacggagctgccggatgcaggaagcgcaagcgcgcggcgcctggccttgccgacctgcacgacgacatgctcgagcgcgtgctcgcgcgactcccgccggccagctacttccgcctccggggcgtctcccgccggtggcgcgccgcggcggagtcccgcagcttccgcgccggctgcgcgcgcgtcacggaccgggacccatggntcctcatgctcgaggactgcgaccaccaggaccaggacgagcggtggccgcgccccgccgccgtgttcgactccgccgagcgcgcctgggcgcgg

SEQ ID NO: 101194 - DNA, 409 bp, Zea mays
  Clone ID: MRT4577_23801C.1
tcggaggaatatgatgacattgtgaacgacatgaaggaggaaggacacaaatatggtatcattggagagggttacaattccactgccatgcccgagcggctctgctgttgctggtgtctgaaagatgtttagggctcaaccttggctaagaccggactgcattgtcggaaatacggcaggaacctcatagtagctcgtttctaccttgatgacaaatgcgaagctgatgcagacgactgaaacgatgctagaaccccgatcatacagttactgttatggcacacaatgctgttgattcgaccttatgtagttaacattggtgatcgatccgctgataaattatataagtatcatgcactggtattatataaatcgcagtgtatctgggctgaattggcttgacggttat

SEQ ID NO: 101195 - DNA, 1221 bp, Zea mays
  Clone ID: MRT4577_23802C.1
aaaaggagaactgctttaaggaaactactacaactacaagaaagaatatatttcaaaaccaacaaggatgtggcccaactgataaatactaattgtagtaaaagccaaaatcaccatttgagatagtataaaactaagcacaacaataagttaccgttacagcacggctcctggatttaggcagttgtccaagaaactcttggaaagcagtaatcctcactctacccttgatctcaacaaagcggcaccactcatttgttgatgtcttttcaccactgcaaagtagaaacattaggagttaggatatgataacagaatgttaagatgtgtgttttggggagggccctcacctcaaccaagtaaccaacatcaaaactgaccaccatgcattggtccagtgtggcctatccttgtgccaatgaatctaacaattctttttctgggatgcacgtggtctgaacaggcctgatcggcggaactcagctcatgacggcattatgtctgccaatgctgacataggatgtttacatgagacaagcttgttcggctgactgcagtcgtagctgcaatgtatagagataaaatactgtagccgcagcgagcaagctgtttgagagcaactacgacaactacatcaatttgccggctgagggaaccagaggacggatcattgtcacctggaagagatcgatgtgtcaagccatcaccagtagagtggataaatactcagcctgaattcagtttgctgaacaggatggtcgcaattagtggttcacctgagtttatgttcctcagcttgaaacagaattacagataaaatcatttttcctgcaagaattgtgtgatatcagagccctgcattctggcccttggctgttagtgggggactacaatctcatataccaggctggacaaaagtaatgataaacctgaatcgtgtgctttgatgggtcgtttccgatgcttcctgtggtgctcagctggagctaaggatctccaagtgattttagtagaggccatgagtgaaagatatgttcggcacctgaaggttctttctcgtctagttttatttcctgtaataaagttcttgttatgtattgtccagggtttagatcccttttatacttctttcttaataaaatgatgaaaaaaagatttttttcaagaatggaatgtggcatacaagtttatatataaaaggggtggattaatctgtgttat

SEQ ID NO: 101196 - DNA, 329 bp, Zea mays
  Clone ID: MRT4577_23803C.1
ctttgccagactgaaaagaaagagagcagacatgaattgttgcgccgcgtagctgcgggtggaggggtttttagaaccataagaggcctaagtgccaaattcctgaggcaaatcgtaatgacattgcaaatcaagcagatgatctagtagagtcaatggaatctagggacaccattcctgatcgaaaacttcttgcaagattagttatagtaagagaagaagctcggaatatgatgggaggtggcctgttagatgagagaaatgatcgtgggttgactaacctccctgaggcagaggtaaactttttgagcaagctcgttgctcttaaa

SEQ ID NO: 101197 - DNA, 389 bp, Zea mays
  unsure (1)..(389): unsure at all n locations
  Clone ID: MRT4577_23804C.1
caaagtccggaaccttctagccgcacctagggtttggattgggncggagcatggcggacgtnaaccacnccttctccatctccgacgatgagncaccttgtgggttaggtcctggtgaccgaggtgccagcggaggtcccggcgggccaggtggccgaggcgcccaaggcgaagaaggcgccctaagagaagaaggcgcctagggggggggggtatntcgggtgaagaagccggaggngcaccctccctacgctgagatgattgtagaggcgatcgcttcccctcaaggagaggaaggggtcgagctaggggaattaggggggacgncaggggaagcatggtggtaaggtccccaccggggggggggggaaaaataactcgcatttttt

SEQ ID NO: 101198 - DNA, 273 bp, Zea mays
  unsure (1)..(273): unsure at all n locations
  Clone ID: MRT4577_23805C.1
ccggccggggaccccacggtgacggtgaccgagcgcggaggcaaggacaagcacgaggacggcggcgacaaggagcagggcggcggcggcttcatcgacaaggtgaaggacttcatccacgacatcggcgaggagatcgagggaggtcgtcgnggttcggcaaagccacggccgacgtgtgcgggatccacattcccgcaccatagccttcaccgggcccaccttgtcggggacgtgcttcatcaagaaccccgacccggtcccgatcccgct

SEQ ID NO: 101199 - DNA, 396 bp, Zea mays
  unsure (1)..(396): unsure at all n locations
  Clone ID: MRT4577_23806C.1
cgggnccgaaatccccgggccgaccacacccttccgccaacccttccggaaggttaaaattttttccttttaaagcctgcccccctttctccgggtggtttacttgggttggttgagcggtcccaataaccgtttttttgaacttttgccttgaggaaatcgtttggtaaatttttggatgattcgtttacatcctatttcgtcaattcttgaaaataaagtgaatttttactttttgtttaatttcccttgaacctttggaatttgtccgtttttaaccaaattttttaatcatccctaatttttggccaatattatatattaatttattgggggtgtggggttgtttaaattatttactaattttgtgctttcttttttttttttccaatttta

SEQ ID NO: 101200 - DNA, 753 bp, Zea mays
  Clone ID: MRT4577_23807C.1
ggccctaggggcctttttttttttttttttcgggggaggagacgcagttacacgacacatgtttatgtacatccaatgcgcaaacattcctacacaaaagatggccaaattaaaggctgaaaccccttcaccaagcacacatttatttgtcgcgggctcgcggcatacactaatggagccatgcatggcatgtccggtcaccaggtttgcctactaccggaggagttcagaacccgacggtggccatgggcccgaaggaggcggcgtgggcgcagtcgacgccgatgggcgcgtgcagcgcacccacgagcatgctgccgtcgacgagttcacgcagggcctgctcgtagctcgtcctcagccgccgcagcgcgcgccggtacacggacgcgagccacggccatcgcagccgcagccgcagccgcagcgccccgaagaacctccccttcctcctcccttggccaccgagcctcaccaccgcattcctcttcttcctccgtccgctgctcggctgcgactgcgacgctccgggggagtacgccctccgcttctgcgccatgcggaactgcatggctgatctctccctccctgcctcaacgcctacgaaatatatggtggcactggcaggaagctgatcgatctcattcttctacatgctaccgggaagaagctacgcgtgagaggcagctttcggcggacgctgggcggacgcggggcggacgcgtgggcggacgcggggcggacgcggggcga

SEQ ID NO: 101201 - DNA, 409 bp, Zea mays
  Clone ID: MRT4577_23808C.1
gagggtcaaacatgcactactattgccatgaagatccactcacggctgcatgcaatccgagattgtcaatgatgcatacatgctggctatctgtatacaggcacttggactacaatctttcacatgacatgaacgccttccataaactggtcattgacgatcaacagctgctacgtacatcaagttcaacacctagatggctaagctggcctttaacctatgaacatctgctgtttacgatacgagatctacgttctttgtagcaaatgacaatgctagtccattgacagaatgtgctgtatactggtctaccgcttccagcataactaccattcggaaaccgccactctttgagtatgctgacagttccatgacaaatacttgtcgcacaagctttgtcttacactct

SEQ ID NO: 101202 - DNA, 670 bp, Zea mays
  unsure (1)..(670): unsure at all n locations
  Clone ID: MRT4577_23809C.1
ggcaggnagnacaggcaagttttataagatacgagacatttttggtatcataaaagggcaagaggaacctgaccgatatgtgatactcggtaaccacagagatgcatggacctatggagcagttgatcctaacagcgggacagctgcacttctagacattgctcggcgtcttggaataatgctgcaatcaggatggaaaccacggaggtccatcattctttgtagttgggacggtgaagaatttgggatgattggatcaactgaatgggttgaagacaaccttgaagatctgcattccaaagctgtagcttacttgaatgttgattgtgctgtgcaaggtgtgggattttttgctggttctactccccagttggacaaactcttggttgatattacaagacaggtaagggatcctgatgtcacgggaaagatggttcatgatacatggaatgaaatgagtggcggcatcaaaatagaaaggcttgccagaactgattccgattttgctccatttctacatcatgctggaattccatctgtagacttgtactacggagaagaatttcctggttaccatactgctcttgacacttataattggatggaaaagcatggcgatccattctttcttcgtcatttggctatcacagaanatttgggactattagct

SEQ ID NO: 101203 - DNA, 1090 bp, Zea mays
  Clone ID: MRT4577_2380C.1
attctcatcactcatcaggctgcctctgtcaatgggtcaccactcatccaaacccccccatccttgcaagttgtcggtccagccagccacatagagacatataatcacatagataaggcgaattccacggtcccatccaattgcttgcttcagacttcagaggctagaggcaatagttctctctcccggtcccggggaaagccatggaggaagagcagagcccaaggctgggccgggatccggcgaccgagcccagtcctgcgccggaatggccggattcggacagcaagaacgacgacagtgcgaacgacccggaggaccctgccggcggcagcggcagcggcagcggcaacggcatcagctccttggagcagccgctgctcaagcggagcaccaccctgacggccagccacctggccatcgtcggcgccaaggtctcccacatcgagagcctcgactacgagatcatcgagaacgacctgttcaagcacgactggcggagccgctccaacgtcgaggtgcttcagtacatcttcctcaagtgggccatggcgttcctcgtcggcctcctcaccggcgtcatcgcgtccctcatcaacctcgccatcgagaacatctccggcctcaagatgctccagatggtcaacctcgtccgcgggaagcgctactgggcgggcttcctctacttcgccggcgtcaacttcgcgctcaccttcgtcgccgcggtgctctgcgtcgtcttcgcccccaccgccgctggccctggcatccccgagatcaaggcttatctcaacggcgtcgacacgcccaacatgttcggcgcgccgcagctcatcgtcaagatcatcggcagcatcggcgccgtgtcgtcggggatggatctcggcaaggagggcccgctggtgcacatcggcgcgtgcctggccaacctgctcagccagggcggcgagggccggtggcgcctgcgctggcggtggctgcgctacttcaacaacgaccgcgaccgccgggacctgatcacgtgcggcgcgtcgtccggggtgtgcgcggcgttccgcgcgcccgtcggcggcgtgctgttcgcgctgga

SEQ ID NO: 101204 - DNA, 538 bp, Zea mays
  Clone ID: MRT4577_23810C.1
ccgggacccgcccgcccgccatccattgacgcatccgcatctcatatcctccctgcgattttcccctcggaacggatcacacagccttcactaccgcaaagatggttgctatgtacacgattttcggccgccaggtcggatcgcacgttcttgcgattgctacgctcgccaccacattcaccggtgctgcgctctcgatgggcggaaagaaggccgaggactccactacgcctcctatcaatgcgaagagcagcgaagaggagaactttgtcaaggagtacgtcaagaaggccgcagacaaggtctcaggaaaataaataagcgcaccgtttcgaccgcaagaggaaagatatggcagtagtataacccccattgtgacggatggacatatacctacctaatataccacggtttcgcagggggaggggggatgggttttttttgacctctctgcaacgttagacggagcaagaggggaaaagaaaaaatttgtgtagataaaagaatgaagccgatttggggatatcgaatgaccaac

SEQ ID NO: 101205 - DNA, 346 bp, Zea mays
  Clone ID: MRT4577_23811C.1
agcaggggtaacaacgcagagtacttttttttttttttttttttttttttttgggtttttttttttttttttttttttttttttttttttttttttttttttttttttttttttttttttggaaaaaaaaaaaggattagtttatattatgaacttaaacccaaaatatgaacggggggggagaacatctaaagttaccggcccccccccatcgggccaaaaaaacggatccatgccatgaggtattaaaccctaagggaaactcggggaaccttgcaaggagacgtttttccaacctggggccccaaaacctcaggcccccctaccccgggtgtgcaccaccgct

SEQ ID NO: 101206 - DNA, 500 bp, Zea mays
  unsure (1)..(500): unsure at all n locations
  Clone ID: MRT4577_23812C.1
ccgcgtcggcggcggcccgctcggggaagggctcgacaaggtgtaccccggcggcgccttcgacccggtgggctctgcgccgacgatcccganacatccgactgatcgagctgcaagggtgagaggcagactacaagnaacaggccagctctgtgaccatgtctcttccatagtatcggggtctcttgcgtagcatggctcatacgctgactcggcgaaggagccccatcgtggaacctcttagaccacgtcgccgaccccgtaagccaacaacggctgggcatacgccacgaactctgtgcccgacaactaactgtactgagcaacgccttacatgtgtactaccatcagatccatacattcgttcgtacagaccacgagtgaacagtgaggtctaatttgcactctacttggacagatcggaggacacgagtaattgcaccaggcggcgtatgctcatgatctgagtgtgctcatcaatcaatgaccaatggctgcct

SEQ ID NO: 101207 - DNA, 608 bp, Zea mays
  Clone ID: MRT4577_23813C.1
tcccaccaacctttcccttcccgtcccaagtcccaaccgccgtccgcctgctcccttccgctcacctgcttcatctgatttgaagaagaaaaaaaaaaaggaaaacagaaggaagagagtaaaagaggcctgcgctgccctgcgccccagagtatgcgcttctaacacttgcatatttggatggatgatgtatatggacggatagaggtcttcccccaacactttgtaccatcaaaagaagctatggagacacctgacggtctatcaacaagtaagaatagcctggatagtccaccaagttcatgtaagcgttcctggactccaagacgagttaagggagctgcatccattttgcatttgttgtccattccccgcataagatggtctacaagcaatgaggatgatgacaaggttggaaaacattgatgaagttttgagatatgcacggctttctggctatctctacattagaagtcgatggacccaactccctggtgaaccacctatattagatgatgctgatgtggatgactggcttcctcgctttgttgttctacaagggcagtgtttatactattatctgaaatgacagatctgagcccacagga

SEQ ID NO: 101208 - DNA, 1146 bp, Zea mays
  Clone ID: MRT4577_23814C.1
gtcccaagtcccaccgccgtccgcctgctcccttccgctcacctgcttcatctgatttgaagaagaaaaaaaaaaaggaaaacagaaggaagagagtaaaagaggcctgcgctgccctgcgccccagaggtcttcccccaacactttgtaccatcaaaagaagctatggagacacctgacggtctatcaacaagtaagaatagcctggatagtccaccaagttcatgtaagcgttcctggactccaagacgagttaagggagctgcatccattttgcatttattgtccattccccgcataagatggtctacaagcaatgaggatgatgacaagattgaattatctagagccgaagtagaaactttacgaaccgaaatagcgggtgctgaagaaagggaatctcacttaaaagctcggttggaaaacattgatgaagttttgagatatgcacggctttctggctatctctacattagaagtcgatggacccaactccctggtgaaccacctatattagatgatgctgatgtggatgactggcttcctcgctttgttgttctacaagggcagtgtttatactattatctgaaatgtacagatctgagcccacaggaatctacactcttatgtgatgttgttgaagtagggcagcttccagactttgtgccagaagatgaaaagacgagatatgcgttttacctgttgacccgtcaagggttgaggtttgaatgctccagtacctccgaaatacaggttgattcatgggtaagagcactgtcaagtgactgcaaattgcaggatggcgctggtgatgataagatgatgaatacgaggagtagccaagtagaagctgggtcatcatggtagacgatgtatggagtgctgtacagtacaatagtcaatgaaatgtacatacattacatgcatgtaaagggagcaacatatgtacgtagtagacgcattcaacacgagatgacatgttgctcttggtatttttcaacttttagggagcacacaaatgatgtatttctgtagcaaaaaatccgtcgtccgtttgagtttgatagaccgtaaagacctgcatatgtaataactagacaagtgaaaagtcattttaactggtgtaaaaaaaaaaaaaattaaagg

SEQ ID NO: 101209 - DNA, 443 bp, Zea mays
  Clone ID: MRT4577_23815C.1
caggctacatagagggagcggcggccgaaagtggtggaggcagagtggtcggcggtggcgggggccctgcagccagagtgacaagcgacactgtgacgaccgaacaaaggcgcgggcgggccgggggcaccggcgtgggcgtggggtcgccggacgaggcggaggcggcatcggtgtggtcaccagacagatggaggcgcacgagggggagaaatgaaacagaggtggttagaaaggaaagtcgagatatgggtaaagtcgtttttttggacgtacgtgttattttcgacgggctaaaaatagctacggccgacgaaaatgctattgttctattgtgtagcgtaactgtcgcactgatggagctcccatgcaaccatgatcggtgcaagcgtacttgtgacatgcacggtagtagtagcaagcaccagctagaatgatgatga

SEQ ID NO: 101210 - DNA, 884 bp, Zea mays
  Clone ID: MRT4577_23816C.1
gccggccggttctcgggtcatcgcccttgtcttcttcttcttcttcttcttcatgtccccaacctttcccttcccgtcccaaccgccgtccgcctgctcccttccgctcacctgcttcatctgttttgaagaaaaaaaaggaaaacagaaggaagagagtaaaagaggcctgcgctgccctgcgccccagagtatgcgcttctaacacttgcatatttggatggatgatgtatatggacggatagaggtcttcccccaacactttgtaccatcaaaagaagctatggagacacctgacggtctatcaacaagtaagaatagcctggatagtccaccaagttcatgtaagcgttcctggactccaagacgagttaagggagctgcatccattttgcatttattgtccattccccgcataagatggtctacaagcaatgaggatgatgacaagattgaattatctagagccgaagtagaaactttacgaaccgaaatagcgggtgctgaagaaagggaatctcacttaaaagctcggttggaaaacattgatgaagttttgagatatgcacggctttctggctatctctacattagaagtcgatggacccaactccctggtgaaccacctatattagatgatgctgatgtggatgactggcttcctcgctttgttgttctacaagggcagtgtttatactattatctgaaatgtacagatctgagcccacaggaatctacactcttatgtgatgttgttgaagtagggcagcttccagactttgtgccagaagatgaaaagacgagatatgcgttttacctgttgacccgtcaagggttgagggtttgatgctccagtacctcccgaatacaggttgattcatggg

SEQ ID NO: 101211 - DNA, 141 bp, Zea mays
  Clone ID: MRT4577_23817C.1
atcttgactgatgttgcagggcgctggattgatatccctgacgtcgcacacgtgattaacttgagatgcctagtccagctgacacatacacacattggattggaagaacaggtcgtgctggaaagaaagggggcggaaact

SEQ ID NO: 101212 - DNA, 2594 bp, Zea mays
  Clone ID: MRT4577_23818C.1
gatcaccagaccacacaagacgacacggcactgttgagcagagactagagtgagagagtagcagccggtgcagggctggcttggcagattgggatcccctcccctccctcctcccacccccttgccttgagctgggggttcgttcaggaagctgatctgagagctcgcgaccgcaaccacaaccaacccaaaaagctgcagcagatccatccatctcacccgaaacaatcgatcccctcttatagacttcgcctgcctccaacccttaatcttcagctatggattcagccgccgcgcgacccgacgaggaggaggcgcgccgccgccggagcaccgactgcatctacttcctcgcctccccgttgacctgcaaaaagggaagtgaatgcgagtaccgtcatagcgatgctgcgaggatgaatcccagggactgctggtattggttccatggcaactgcgcaaatcctaaatgctcctttaggcacccgccattagacaacatggccggagcaccaacgactccacgtccagctcaacagtctgtaccccatcaagcttcagcttctgttccagctcagccccagggatctgttcctgccactgccaagcagggtgttccatgctattactttcagaagggcatgtgcacgaaaggggacaggggagccttcctgcatgcgccccggtctgctggaaaccctgctccacagcctccggccaaggtcttcaccacccctgccttgcagcctaatctccatccaccgttgaacaactcgtggacaaaacccaacttgagtgctcctgcagtagccgtagttgacaagccaaaggccagcactcatcatgatggtaaaccgcttcatcacaaggaaaatctgacgagtaggaccgaaaacccatcaagagtagtttatcagaatcacagtagttcttatgcacagcccggtgcaccaaagcgttaccagcctcagccttcagcccgagatggcttaaccgacaatggtatggaggctggcgaatttgcgagagaaccatccgccggttcttgtgtaactgccggttttaatggtgctggagggatgacgaggcaaacacatggtggctatgaaccagaaaggtcatacagaaattcagcagagaggtcttcgtcagagaaaaggattccccagagagagcatatcccctctgtggctgccggcagttcggatctgcgccataggctactgaagcaaagaaagtccaataataattcaagatcggctgaagccctgggcaggcatgatacacatcttgaggatgagcgcaatgaccaacatcgtccgcgaggtgaacagcaggatggcctctcacggtctcgactgcatgatagaataagactacctggggagacagcgtttgacagtcttgggtcacggtcagaggagtgggatagagggtctagagccagattgtcgccaccaaaatcctcagatcttcgagggaggcttcatgaaaggctaaagggtagattgggtgaggagataccgggtagcagtgcaaaaggtttggcagtgaaggcaagtagcagtgaggatactgaatcactgaactttgctggtccaaagagccttgcagagttgaaggcaaagaaaggtgtcggcaggtcaggagaagatgccgtcgtcaagggcttaggttcttctcgtatgacttcagaaatagtttggagcagggaggctgcttcgtttgaaggtccaaagcccctaagtgccatactgaagagaaaaagagagccagcttctgaaatccccgctgcccagcctggcatcacacaggaagcagataactacgccgcaggagctgaagaagaaatccaaaccctagcaaatgacacggttggggagaacatggaggggattggagaagaagaggaggaagaggaagctttccatcctgaagatgatgtggcgtacgacgataacgccaatgaagctgcagtggcccaagagctggatgagtatgaagacgcagatgcggcagcacaagactatgacgatgaagctgcagctgcccaagaggtggaggagcatcaagacggagaggcagcagcagaagactacgactatgaggaggcagacgtcaacgccgaggaagagaatgagtaccaggactaccaagacgaggacgacgacgatttggaggatggggacgacgattttgcacgaaaagtgagcgtgatgatctcctgatagcgacagaaagcggttcattccccacaaagtgtttatctcctttggcgcgaggtactttttagttcactgcgcaaaagacagagactaatataggtgggagaagagagatagaagaatggacattgttgagaaaatgagctcctccatccatcggagagctcgcttgttgacctgtctgtctgtactgtactactcacgcaaatgtgatgcggcttctctatagactcctgcatgtatttttagttgacatgagaacagtactgtatccgtatttgctgctgcttctttttttttttttgaagaaaacatattgctgcctggtaaaaaaaaaaaaaaaaaaaaaaaaaaaaaaaaaaaaaaaaa

SEQ ID NO: 101213 - DNA, 153 bp, Zea mays
  Clone ID: MRT4577_23819C.1
cacctactcagcccaaacctcaacttctctttcctttttataccatcctcccacactcgtgttggtgtcctttttaacacaggcttccaccgcctcctttcaaaactaacaatcccttcatcgttaagtacctcaacgtattcacattcttat

SEQ ID NO: 101214 - DNA, 823 bp, Zea mays
  unsure (1)..(823): unsure at all n locations
  Clone ID: MRT4577_2381C.1
tgggtacctcgaggccggccgggnggacacgtccccacgcgtccgagcgaggacactacacagcgcgctactgacatgtcgatgctcaccagcatactgggccgcaagcatcagcagccgccgcagcagcagcagcagcagaagggcggcggcgcgcgcactggcaccggcgccggcgccggcacggaggcggcggcagtggagccggtgagcatcgacatcgcggagcaggggccgctagtggacgccatcacgctggcggcgttcgcggcgccggcgctaggcctgccgccgttcgcgacggccagcatggactggaaggagacgccgacggcgcacgtgttcatggccgacctccccgggctgcgccgcgacgaggtgaaggtggaggtggaggaggagaggctgctccggatcagcgggcagcggcagcgcgccgccgaggagaagggcgaccgctggcaccgcgtcgagcgcagctccgaccgcttcgtgcgcaccgtgcgcctcccgcccaacgccaacaccgacggcgcgcaggccgcgctccaggacggcgtgctcaccgtcaccgtgcccaaggacaacgaccgcaaggcctacggcaggcttatcaccatcaccaattaattagttattaatcatatatatgatgtcattatatatgtaagcggcatgtgtatcgttatcatcaccgaataaaaaaatgattatgccaaggtctcttatgacctttcctgacattcccccacatggactgaacggtccgggcaccaacgctgcggagcaccacgactagatctgcctggggactgttctgcgt

SEQ ID NO: 101215 - DNA, 916 bp, Zea mays
  Clone ID: MRT4577_23820C.1
actcgtttgcgcagattcatccaccgtcgtctacctcccgacctccgtcactctcgagaaaaccccagccccgataaacagtgacggagctgagacccggccagcccaggcacgtcccgggcttcggtggcccagcggcccagtccgcctcagtgttctcccaagcgaaaaccctacacagcgtgtcccccgggtgcactgctgctggccgcgccgcgttcgcgctgctggcacgccgcgtgtgcttggctcccgccccacgcccagtgcctccctccctctgtgcccccctgccgcggcgcgtgcctggctggctggttgccctccgcttgggccttggagagcccgggcttcgatttctagctggttccgccactgccgagaagcccgcgcgttgtcaggcacgggaaagaggtagtccgcgggaggttctctccggaggagaggtatggtgcccgcgagggctcgccatatcgatagatccgcctctgaccagcagcaagggcccgctccagcgggggcggcgacgctgctagtgcggcacctcccagaggctatcacgcaagagatgctatcccgcctcttctcccactacggagccacatccgtccgcccctgttccggtggaaagttgagaaattgcgcatttgtagattttagggacgaggcggcagctaatcacgcacattcgctcttgaacaggttgaggtttctgggaaaagtgttgactgtcgagcgagctaactgtccaaatgcaaatgagtctcacctgaagcatcaggaccaattagggcatggggcgtcccaggtaccaagtattagttcccaaactcagaaggaccacacatcgattgccgaaccaatttgccccaaacttagtgtggactacccattttctccacaccttgagtattca

SEQ ID NO: 101216 - DNA, 462 bp, Zea mays
  Clone ID: MRT4577_23821C.1
tggatctatctctcatagtggctgcaggtagcacccccagtcgtgatcttactattcatggtgttcgccgccgggcgacgtggattgtgggagttgtccaagactcgagtgttgcctctcaattagacgtctccttaagtgcatacgtgcgcattaccgtcgatgaactgcttcatgtgatggtgtctctcgccagacacgaagacgtcgcactgtgctccttcgcggtcatttatgaccagccggtgatcctggatatctgggagtacctcaaggacgcggtgctcatgtctcgtgtttaccgatgatctaggagttcgagaagatccgtcatgtatcacctccctccagagatgctcggtgaaatgcattgttgatctctgacatctaccacttcttgcgtggatcgtcgagaagatgagactgaactgctgcacgttcttcagaggaaggctcatgtta

SEQ ID NO: 101217 - DNA, 239 bp, Zea mays
  Clone ID: MRT4577_23822C.1
aattggtgggtcgacgcgttctttcgtcggaggccggccttcatactagcggttggagctgaaacgggcggatcacaattcctgacctgcggtgatggacaaaaccaaagggtcaatggagattcttgggcagcaacgacggcatctgccagcaaagccatcggcggtaccaggagtagtgcctgagaacctatgcgatccgagagtgctaaagtctctgaaccttttgagcgagtggg

SEQ ID NO: 101218 - DNA, 492 bp, Zea mays
  Clone ID: MRT4577_23823C.1
aaaaaaaacattggtaaaatgtatgcaaaacaaaaagtgggaatcacaatgtgttcatgaaatcgtacattgataaaagggaaaaaagacctatcaacctatcttgtactcagataccaacacatgtcctattgactctcacggtgtaatataaacaaactaccttatctgaactaatcaaaaaaatactatttaggacctataagtaactaggcatgctcaccaattattgacagatgcttcaatctaccaatctgagagcgaatgctttaccgaaaaaaagatggcttattcaccttaagagcaaaatacctatctcacaggtacttaaaatccaagaggatgtgctgcttaagccaataagcaataacactctaattcactgagtcattttgactgctcaattcaaggctattatttggccgagaagccatgcctgccattttacccatcttgccacttagctaacaatggttcaccagtgactgcacc

SEQ ID NO: 101219 - DNA, 782 bp, Zea mays
  Clone ID: MRT4577_23825C.1
cctccgctccgccgctgctatttctctcccctcccctcccgtcccgtccggagagaccacgccggccgaatccccatagatttccatcccatccccgccacggctcgctcgctcgctcgatcgatctgccctccgtcggggtcggttcttggcctggatcctgcggaatctcttcttgattgttttccggttgttggggttccaaatctcttccgcgccggtctcctccccgacctccaggcgggctcaattcaaggggatttgcttcttccttccttccttccttccttccttggatctccttcccgcctctccgcgccacatctcccaaaggaaatccgcggggagatctttcttgtctcaggccaacacaggcgaatccgttcctcggggtcctctgcctgtccatcccccttgtcgggctccttctcctgacaagtagaatcagatgggcgaggtgtacctggatcgctcagtcaagccggagccagcggacgtcggcattgcccagggcaaccaggttactaacctgatgtcggcgggatggacggatgagaggcacacggattacataagctccatggaagcctctttcatcaaccgactctacaatcagggacacaacgcgaacaagaaagatccaggtaccaatgggttcaaggttctccaaggtggagctgcagtgtggaagaaagtcgagtttgagaggcccaatgcttgtgctcaagtcggggcccaacaaagcctgcctgcaaacccctggatccagatttcagatcgcg

SEQ ID NO: 101220 - DNA, 265 bp, Zea mays
  Clone ID: MRT4577_23826C.1
attcgtctcgagaagagtctgacaccaccctttgttttgtcactcacaggaaatcacgtggcgtgggcataaagggtaaaccggccacaggaaaactgcatccagatggccgggtgtgcaccctacaaactgaacacaacttggatgaagatcagctgggctgatccaaggaaagttggcacaaaaattctagcgtaatatacggttcaagggatcccagaacggaaatgccctgctaatggaacgtgcgctgtgacttccgaga

SEQ ID NO: 101221 - DNA, 1092 bp, Zea mays
  Clone ID: MRT4577_23827C.1
cggcttcatcatcactccactagccagtcagctactggcctacagctagccgcctcctctcctctcatcccatcccatctcatctccgacaagcgaagcagagcactggcatgagcatggaccgcatggcgcggcgttccgtgtccttgctcctcgctctggctctcctggccgccgcggcgtcggcggactcgtggctgtacgagaagttcacgacggagggcaacgtgcgcgcggactacaacgcgcaggggcagcaggtgacgtctctgatcctgacgcagcagtccggcggcgccttcagctcgcggcagaaggaacgacaagaacgtcatcttcaaggtggacgacctcttcgtgcggtgcttcaagcggtacccggacctggcgtacccgggcgggaagcccatgtcggtgcacgccacgctgtgggacggcagctactgggccacgcagcaggggaaggtgaaggtggactggtccgccgcgcccttcgccgtctcctaccgcggctactgccgacggcgtgcccgacggcgacgccgccctgccccgccggcaccgaccgctggatgagccgccagctcgacgccgccgagtggggcaccgtcgcctgggccaggcagaactacatgcactacaactactgcgacgacggctggcgcttcccgcagggcttccccgccgagtgctcccgcaactgattcattggtttgtttgttatccccgatccgttcgcgcggtcgccgtccgtcccacacagtgccctgccctgcccccccgacgatttcttgcttcctgttcctcatctaattaatcatcaatggtgtttgttcgtcaccgctgttcttgatggatggatgcacaggacagggcaggacagatgttgttgccttccattccatgtacattttgccgcacatttatacactactagtgcccttgaatgttttcttctttctctctgtgtttttctttacggtttgtgagatttgttactgaaagggagttcataaagataataacgtgaattctactgtactacatacgccgtgaaaacaaaagggaaggcaacgttgtagtatccgttat

SEQ ID NO: 101222 - DNA, 440 bp, Zea mays
  Clone ID: MRT4577_23828C.1
ctctgatccggactcgtggctgtacgagaagttcacgacggagggcaacgtgcgcgcggacgacaacgcgcaggggcagcaggtgacgtctcctaccgcggctactccgccgacgcctgcgtgcccgacggcgacggccgcccgctctcctgccccgccggcaccgaccgctggatgagccgccagctcgacgccgccgagtggggcaccgtcgcctgggccaggcagaactacatgcactacaactactgcgacgacggctggcgcttcccgcagggcttccccgccgagtgctcccgcaactgattcattggtttgtttgttatccccgatccgttcgcgcggtcgccgttcgtcccacacagtgccctgccctgcccccccgacgatttcttgcttcctgttcctcatctaattaatcatcaatggtgtttgttcgt

SEQ ID NO: 101223 - DNA, 472 bp, Zea mays
  unsure (1)..(472): unsure at all n locations
  Clone ID: MRT4577_23829C.1
gccgggagatacgatacaccacagccgcggatagagaaggaaaaatttacccaaccctagcttcggatctcgatggcgaacccccgcgtcttcttcgacatgaccgtcggcggtgccgcaggcggccggatcgggatggagctgtacgccaacgaggtgcccaagaccgcggagaacttcggcgcgctgggcacgnacgagaagggcgtggacaagtccgggaagccgctccactacaagggctctaccttcgaccgagacatcccccagttcatgtgccaggggcggcgactttacccgcggggacggcaccggcggcgagtccatctacggtgagaagttccccgacgagaagtccgtncgtaagcacaccggccncgggatgctctttatggccaacgccgnccccaacaccaacgnctcgacgatttgtcatctgcaccngtggagaacccccgcgctgggatggaag

SEQ ID NO: 101224 - DNA, 212 bp, Zea mays
  unsure (1)..(212): unsure at all n locations
  Clone ID: MRT4577_2382C.1
aanaaaattaanaaaaattttattttatattnngnaaggaaaancaagggactttggggaataaacaatccaaattaagggttaaaacaacggancaactcaacttaaatatgattaactcaaatacttccaacaaaacagcttaagggggcaatgcttagcttttaatttttgagctggaatggaacaaaacaaaaagttttgggcattta

SEQ ID NO: 101225 - DNA, 858 bp, Zea mays
  Clone ID: MRT4577_23830C.1
agtcatcatcttaaaataacttgaaagatcctagacaatattttcaacctctgtcctgtttgaaatcaagttgtagtaatcagcaggctggagctcataaaagttgtcatctttcactgcaagaacgatgctttaatgtcactgtagaactagaataaatacaaggcagatttggtaaagacaaaaaaatgacatttaggtaccatgatctgcactaggcaactttctggattgtagagcaaagttcttacttgaaaaaaacttgaatctcatgtccaagttcatctgactcctgggattttccaaagaaaacacatttacacgttgtattgcatcaacctatccgactggtggagaattcagaatacaacggtttaataaaaaaggaagtatgatcattattcccaaaacatgaacagtttcaaaaccaatagtatttggatgtgggaaaaatcacatccgttgcttgcaataattatttgtatgcatccacaattcagtcaaattctaattatcacatgtaggctaatttccaacactaaactacctcaaaatgtgtcagagattcattttttgattcttcatcaatagcctccttaccctcatcaaaaagatcactcaacagtcgtcctggaacagggcatccatcatttcaaacataaatctgttcacgtatagttagccccatgaagttagcagatattaaggccttagaaaattctgacggaatactaaagtgacaaaaccatgacacactaatctaaataggaaatggttcaaggcttcaagcaggttttacatgatagattcagtactgtgactgttaattttcagaatttaacacaaggtgaacttact

SEQ ID NO: 101226 - DNA, 640 bp, Zea mays
  unsure (1)..(640): unsure at all n locations
  Clone ID: MRT4577_23831C.1
ttgggtacctcgaggccggccggggactttatcgacgagacgtccatctcgcctgttcgctcctcggaaaggcgcaancagtttggagaagcacctgcagcaccgtccagaaccccaggacctcaagaacaggcacattttgctagacaccacaacagctcccgccctccaagccaaagccctcgaactcgagcgacagcgcgcaacagacaaccttaagcgcggcctcaactcccgtcccgagcgagccgagctcgtcgaccgcaacatcctgcccaactcgacagcagcgcctgccctccaaggccaccaaaaggaactcgaaatgcacatgcgggctgatagcctggagaagggcctccagaacaggccaagtccggaagagcttgtcaagaagggcattcttgacgaggacgagaatcccgccaagaacattgcttaagcgctgcttgcctatttttctccttgggtacggatgtccttgatgctgtctctctaggatgacgtattcggcgttgatgagtttttgttatattttgaacacgatgttaggctgagttcatcatctagcttgtatcgttaaagtgtaaatgaccacacttccaactttttttacaaaaaaaaaaaaaaaaaagcggcc

SEQ ID NO: 101227 - DNA, 2305 bp, Zea mays
  Clone ID: MRT4577_23832C.1
gccatgccatctcatatgcgacaagcgaatcatagcactggcatgagcatggaccggatggggcggcgttacatgtgcttgatgatcgatctggctcttctggccgccgcggcgtcggtggactcgtggctgtacgagaagttcacgacttgagggaacttgcgcgcggactacaacgtcgcagggcagctactgacggattcgatcctggctcgatagtccgcgcgcgcctgcagctcgcggcagacgcgggtcgaccacacaccttgctattcggccgtgtgccatcctctgcatcttccggtctgccgggcatccctccacgaggcaacctggcggccggcccggcagcaccagttgcttcacggcttcatcatcactccactagccagtcagctactggcctacagctagccgcctcctctcctctcatcccatcccatctcatctccgacaagcgaagcagagcactggcatgagcatggaccgcatggcgcggcgttccgtgtccttgctcctcgctctggctctcctggccgccgcggcgtcggcggactcgtggctgtacgagaagttcacgacggagggcaacgtgcgcgcggactacaacgcgcaggggcagcaggtgacgtctctgatcctgacgcagcagtccggcggcgccttcagctcgcggcagaagtacctgtacggggagttcagcatccagatgaggctgatcccgggcaactccgcgggcaccgtgacctccttctacctgtcgtcgggcgacgggcccgggcacgacgagatcgacatggagttcatgggcaacgccagcgggcagcccgtggtgctgaacaccaacgtgtgggccaacggcgacggcaagaagggagcaccagttctacctgtggttcgacccggccgccgacttccacacctacaccatcatctggaacgacaagaacgtcatcttcaaggtggacgacctcttcgtgcggtgcttcaagcggtacccggacctggcgtacccgggcgggaagcccatgtcggtgcacgccacgctgtgggacggcagctactgggccacgcagcaggggaaggtgaaggtggactggtccgccgcgcccttcgccgtctcctaccgcggctactccgccgacgcctgcgtgcccgacggcgacggccgcccgctctcctgccccgccggcaccgaccgctggatgagccgccagctcgacgccgccgagtggggcaccgtcgcctgggccaggcagaactacatgcactacaactactgcgacgacggctggcgcttcccgcagggcttccccgccgagtgctcccgcaactgattcattggtttgtttgttatccccgatccgttcgcgcggtcgccgtccgtcccacacagtgccctgccctgcccccccgacgatttcttgcttcctgttcctcatctaattaatcatcaatggtgtttgttcgtcaccgctgttcttgatggatggatgcacaggacagggcaggacagatgttgttgccttccattccatgtacattttgccgcacatttatacactactagtgcccttgaatgtttaaaaaaaaaaaaaaaaaaaaaacttctttctctctgttttttctttacggtttgtgagatttgttactgaaaggaagttcataaaaaaaggtgaattctactgtgtccggttaattcgcgatccgcttggcgtcgtttgttctttgttttgttggtcttttttttctacgggtaaggtgagtgcccgtgcgttgcaacgggaacatatataataccatgataacttatatacaaaatatgtgttatactgttatgagaaaaggtttcataatccatttgtgatcctggctcatcatacatctctatatgcatgattcttgtgttcccccagtcccgccgagtccccagtaagcttccggtttttgtacgctcgggggggtccgctgacgacacacgccttgttggtttgttcttgctggacatcatacatctctataggcatgattcttgttctgttattgttaaatcgtgattacaatacttgtaattgtaaaaaagtgtgtgggcacgggagtatatccctgtagttttaatttgcttgtaaaaaaaaaaagggtttttttacttgtgacgcgggagctagcgactgcgtcctgttcgcgtaaaatgtttgcaatggatgatgatgcatgtacgcagcaacagctagcagtgtactacttccacatattattgcgttcaatcaatccagatacacatttaaagttcgatctgcatgtt

SEQ ID NO: 101228 - DNA, 486 bp, Zea mays
  Clone ID: MRT4577_23833C.1
aagattattttctgagtactataatggagaagcatgttaaaaggagtaccataatagcaaaaaaaacccactccagagggatggcttggcgactcggttctaacagcgtcgggctgctgttctgcgcgtggatctgctccggccacgggacagccgacgagccaccgtccgtgccacccgatgaggccggcgagttggacggcgacttgctgaactcctctttcttggccacggccagcgacgggccagcggcggcggcggacatgccgtgggggaaggccgcggcgctcggcaccaagaaggccttctcttcctcggcttcgtctccgtcgccggacccggccgcttgcactgtccctgcaatggatcgatggaaccatatcttatccccgtccccgcccatcctcgtccgtgcgtgctctgctcccctcgatttttttccctcccccttctgagttcccaacctcatcggtcgtcgccccgctg

SEQ ID NO: 101229 - DNA, 2637 bp, Zea mays
  Clone ID: MRT4577_23834C.1
aattcggcacgaggctttttatacacaaagaaagtaactgaccaaattctttcatccgggaaacaagatcatctggttttcgaacgggctctaatctttcttttgtacatcgatccgttcgttcgttcattcgtacacagcagcagctcacctcacacgatacagggaaagaaagatcctctggccgtatccagatagcacggagagaggcagtgaggagaggggaagtgggagtgaggagtgaatcggcagagaggaggaagacgaacaagacgacgaagacgaagccacagaggaggtcaggagggcagagcagaggagagtaggtctcttcttgccacaccgcttccggccgcgtctccgggatgttggctggttgctccttctcgtcgtcgaggcatcagatgagcaccgcgcagcgattcgacatcctcccctacggcttctccaagcgggcgagcaaccgcggcgatggctccggcgccgcgccgcgcgtcgcggcgcccgacgccaggagcggtggcggcggcggcacctgctccttccgcgcccacccggcgccgccagtcacgcaggccgtttcctggggcgccaagccggagcccggcggcaatggcgctgcgtgggagaggagcagggccgttaagcgggcccatgaggaagacgcaggcgaggagtacggcggccccgtcgttcgcgccaagcggacgaggatgggcggggacggggataaggtatggttccatcgatccattgcagggacagtgcaagcggccgggtccggcgacggacacgaagccgaggaagagaaggccttcctggtgccgagcgccgcggcgttcccccacggcatgtccgccgccgccgcgggcccgtcgctggccgtggccaagaaagaggagttcagcaagtcgccgtccaactcgccggcctcgtcgggcggcacggacggcggctcgtcggctgtcccgtggccggagcagctccacgcgcagaacggcgccgcggcgcgggtggaggccatggagctcgtcgtcgcgctcaccgcctgcgccgactccgtcgccgcctgcaaccacgacgccgccaactactatctggtggggcttggcgagatggtttcccccgcgggaatcacgccgagcaccgctgtctgcctactcctcggaagcgctcacgctgctgaggatgctcaaaggtccctgcgcctaagcgttgaagacgcagcgtcataacgcttaagtatcagtattaacatcttacaatgtccctatccttcgtatcataaaggaccttcatccgatcccgcccatcctgcacttcaacctgaacgagcggggtggccgcgcgttcgacggccacgaccgcgtccacgtcattgacttcgacatcaagcaggggctgcagtggccgggcctcctccagagcctcgccacgcgcgtggctcccccggcgcacgtgcggatcaccggcgtcggcgagtcaagacaggagctgcaggaagtaccggcgcgcggctggggcgcgtggtcgccgcgctcgggctcgcattcgagttccacgccgtggtggaccgcctcgaggacgtccgcctgtggatgctccacgtgaagcgcggcgagtgcgtcgccgtgaactgcgtcctcggggcgcaccgcccgctccgcgacgagaccggcgccggggtggccgaacttcgtcggggtcacgcgcagcacgggcgccgccatcctcctcctgggcgagcacgaggacgccctcaactccgggcggtgggaggcgcggttcgcgcgcgcgctgcggtactacgccgcggcgttcgacgccgtggaggcggctgggctggcggacgccagccccgcgagggccaaggcggaggagatgttcgcgcgggagatccgcaacgcggtggcgttcgaggccgcggaccgcttcgagcggcacgagaccttcaccgggtggcggcagcgcatgcaggaaggcgggttccagaacgccggcatcggcgaccgggaggcgttgcaggggcgcatgatcgcgaggatgttcgcgccgggcaactacagcgtgcaggtgcagggcgacggcgaggggctcacgctccggtggatggaccaggccatgtacaccgtgtccgcgtggacgccggtcagcgacgggggcagcacggtgtctgcgtctgtctccaccacagcatcccattctcagcatagctgaatggggggaagacacaaggtgaaagtgaagaagaaaagaacatggtttttcagtggttcttttgctgttactgaaaacttagttcattatacagtctgacaattcttttatacaatcagaagaacaaaaaaaaagaagcaaaggagtaagaaagatttgtttgtagctttgtttttataggtgataggataaaagattcaattgttagtagttgtaattctttattctttatgtacacttgtcattctttcaccatgtctgtttagcttgtaatctctgttccgagttagaaggaaatggaataaacaagtatggttttcattcatctgaacattttgtcaggtgggaaatcggctatgccctctctattagtgatcttgctgtaatagtgaaagcaaaggattttttagaccaatactc

SEQ ID NO: 101230 - DNA, 390 bp, Zea mays
  unsure (1)..(390): unsure at all n locations
  Clone ID: MRT4577_23835C.1
attccgggctacggcgtacgctcgagctctaccgctacgacccatgggagctcccatcaatggccgcgattggggagaaggaggggtagttctacgtgccgagggaccgcaagtaccgcaacggcgacaggcccaaccgggtgacggcgtcgggctactggaaggccacgggcgccgaccgcaccatcaaggcggacaacagccgncccatcgggctcaagaagacgctcgtcttctactccggcaaggcgcccaagggcgtncgcagcagctggatcatgaacgagtaccgcctcccgcccgacgacaccgaccgttaccacaagaccgaaatatccttttgccgcgtgtacaagcgcaccggtatcgacaacggcggccacgggcatc

SEQ ID NO: 101231 - DNA, 831 bp, Zea mays
  Clone ID: MRT4577_23836C.1
ctccccacttccgtccccatccggacggccgaccttggttccgtcctctcgcatccgcccgcctactaccggcgccgtcgccggtggcttctccagcggggcgcctccgagttcccgacgcaggccacctcactgtcgaacatggcctcgccggcgccggttccggcctcgccggggtcctcctctcagaaaaaacgaggtgcaacggaatcaattggcctgtatgctgtccagtgttgtgaatgtcataaatggcgtacagtttcaacgaaagatgaatttgagacaattcgtgagaacttcactgaagacccatggttctgcagtaaaagacctgagtgctcgtgtgaagaccctccagacattgagtacgacagcagccgcatctgggtcatcgacaagcccaacataccaaagcctccgcccaagaccgagagacttgtgatcatgagaggtgatctgtctaaaatggacatctactatgtcctgccaaacgggaagcgtgcaaggggcatcggggacgtgcagaagttccttgacacaaacccagagtacaaggaccgcatatcagctgaaagcttcagttttacggtgcccaagattgttgaggagaccgtttcacagagctctttgtggaagactaaaaaggctaaaaagcaggacaagataaatgcttcaagcagcaagaaggacaaggcaaatgcttcaagcagtgagaactagccatgtcagcaaatgcaaaactgtcgcctgcctgcttggatgatcctacctcatctaccttgaagttaggcatcaagtcggttctctctctctctctctgcgaggtac

SEQ ID NO: 101232 - DNA, 1705 bp, Zea mays
  unsure (1)..(1705): unsure at all n locations
  Clone ID: MRT4577_23837C.1
cggccgtgatggcggcggctgcgccgtcatattcggcaacaacaactgagtttggagccacgagatctttgtcgccggcaacagtcccggagtcgcccaggttcggatccatggaggcacaaatcactgcatcggccacagatccgaagtcgcctcctcgtccttccttcgctagatgttctccttcgccggcggtcttgttgctagaggcgcccccgacctgtgcatccgtttcaacgccaactcctccaccagtcagttcaatttctacagcctatggtcatgctaactcattcggagtaggtttagaaattgattgggattcaattcagctagaccctagatgggaggaggaagactacaagaagttgttaacgtggaagtggtgtatgatacactgggcctgacaaatgaggtgatgggtggaaccaattgtgatggttggcaaaacgattatggtgatgcaggggcagctatagaatgcaaggacattgacgatgacattgtaatgtttgatatgaaaaatccagttatgaggcttggtaacatatatatatagtagcatgaaggagtttaggctcgcaatgatccaatatgcaattaacaaggaatttgagctaggcattgaagctactagtactcgaaggtatagaggttattgtaaaggggatgattgtccatggagtattcatgccagaaaagaagtagaagaatcgcctatcatcattgttactgccatgacagatatccacacttgtacatctagtggtaggtgaaggacaaagacacctactagtggttgggttgctgcccaagcaatacctctcttgaagaagaaacctggcatgggagccaaggagttgcaaaatgcactacatgacacttataatgttcagattgcatatctaactctttggagagggagagagaaggctttgtatgagttgtttggtagttaggaggatagtttccaactttgttctcttggaaggaagctgtgttggagaaaagtttaagaaagcttacgagggaagaatagagcaactaggagataagtctttttggccaaaagtggagatggcaaatgaggtgggggcaccactgggtaggagaggtgtgggcagacaaaggaaaaatagaatcaaaggttgcctagaaggcggtaggggcaagaaagcatgtgcaaacgaaactgtaaagcaatggaaggccaaggaagcagcgacattactcaaaaatggtttcctcgcgacgacagatttacacaagaacctagaacaccgcatttcgacaaagttatacaagaccctggtacaccacatgaacagccatcgtcttcgcagccacttccaagggtattgataaaaaaaatcactccaagaaagaggaagtcggttccactaagcatggacgagatgtagtatctgttagttgtatcatccatgtgttgtcagcatgtgactgcagacatgtgccatgtatcagacttattgtatcagactacgttcagcctacttgttagtagctgagttattgtgtttcctactacgttcagactacatctatcagacttattacatctcgttcagacttatgtgtttcctgtttgtgccatgtatcagtggaagtctcaatgccctgngaaaagaagaagagagccacgagaaaggaaggggcgaaactggaagtctcaatgtcgctccct

SEQ ID NO: 101233 - DNA, 256 bp, Zea mays
  Clone ID: MRT4577_23838C.1
actacatccagggcgacaacccgcggggctccagctacatggtcgggtacggggccagcttcccgcggcaggtgcaccaccgaggcgcctccatcgagtcagtcaggacagacccgtccttcgtaagctgccaggagggggactacgcctgagacccagagcaggccggcaaccccaacgttctggagggcgccatcgtcggcgggcccgacgagtacgacgacttcggcgacgagcggaacaacttcgagcagac

SEQ ID NO: 101234 - DNA, 252 bp, Zea mays
  Clone ID: MRT4577_23839C.1
ctgattactactcttccttactccaactttttttacttaaataaggctcccctttgggcggggattcaaatgatcatggatccattcacattcacccttttcacctacatcctgaccacaccatttttttaaaacgcccttctcctgagcacaatatatccccccctctaaaaaatcctttttttcaagatctccaatggcccctttaagaacccccacccccactctttacttctccgctagctctctaaa

SEQ ID NO: 101235 - DNA, 305 bp, Zea mays
  Clone ID: MRT4577_2383C.1
ggacaattaaaaccatgcatttttattggtgaaacaaaattccatttttttttattcgttcggacaggagcaggagaccccacggggggcccccacgtgacaaaacacacggttgggggggggcatggggctacacgaacaccacacacttacgggacagattaaaggttaccgagcgaagggaattgttttggccaacagcaacaaaggcccagattaaaagaaaaaaccccgggatggggccggcccaaataaaaccctttttgcatgctggcccgtggatgctcgtttaggcgtccacaacc

SEQ ID NO: 101236 - DNA, 543 bp, Zea mays
  unsure (1)..(543): unsure at all n locations
  Clone ID: MRT4577_23840C.1
gaaaccaatacataggaccgaagaaatgaaccctggcaacaaaatcacaatgtaccctcccaaacggcagagacagggagcacaaacaatcaaaatttaacagaacccaatgtacggggacaagtacaaaatcaacgagggcacctgggaaagacacatcaatcaaagtttatagaaaaattggacaccttggtaccagccgggaccttatattccacacaatagataacgccaacagcagccgtgtgcctcatatcacgggcagcaaaacgacccaaaagacgagactgagagaaggcacaaccaccatgggacgatggggaatcatcttcaccataccggggaaaccaacctccaggaacttgggctccatctcaagctccttgccagaccgcatatcgatgcttggttatgagctcagcaaacttgacagcaatgtgggaggtgtggcagtccagcactggggcatagccattgccaatctgcccagngtggttcatgatgatgacttgggaggtgaagctagcagcctccttggcagga

SEQ ID NO: 101237 - DNA, 1006 bp, Zea mays
  unsure (1)..(1006): unsure at all n locations
  Clone ID: MRT4577_23841C.1
gngnaaagtctttttggccaaagtggagatggcaaatgaggtgggggcaccactgggtaggagaggtgtgggcagacaaggaaaatagaatcaaagttgcctagaaggcggtacgtccgagaaagcatgtgcaaacgaaactgtaaagcaatggaaggtaattcggggacaataaggatgtctttggtttgaagtcaaagtaggatgaggcgggggcgacaccgtcccctcaattttttgggatcacgccgtcaccaaaaaattactccggtatttatttcaccccacgtgattctcatccaaacactatagaaactgtagccatccccttccatccctccttatacatccaaccaaacacaccctaaatgtttatattgtggggagctaggccacaagaagaacagccctaaatgtcctttaaatggcacgaagaagaggcgtgtgttttatgtgttgatctttgttcctgtttcctgttctgttttttttttcaaaaacttacagctggtgtgtattcttataggccaaggaagcagcgacataactctactcaaaaatggttttatgtgttgatctttgttcctgtttcctgttctgtttttttcaaaaacttacagctggtctgtattcttataggccaaggaagcagcgacattactcaaaaatggtttcctcgcgacgacagatttacacaagaacctagaacaccgcatttcgacaaagttatacaagaccctggtacaccacatgaacagccatcgtcttcgcagccacttccaagggtattgataaaaaaaatcactccaagaaagaggaagtcggttccactaagcatggacgagatgtagtatctgttagttgtatcatccatgtgttgtcagcatgtgactgcagacatgtgccatgtatcagacttattgtatcagactacgttcagcctacttgttagtagctgagttattgtgtttcctactacgttcagactacatctatcagacttatt

SEQ ID NO: 101238 - DNA, 973 bp, Zea mays
  Clone ID: MRT4577_23842C.1
agactccaagcactcacctcctcagctcattgccagcctttggttccttccagctagcaaccggacggccagcaagccagcagactagtagctcttctcagttctcacacctactgtgtctgtgtgtgctcgcctttagcggcaagcgacccaccccccttcggtagcgagcgacaatgcagtacgcggcggcggagcaggcgtggtacatgccggcgaccacgacgatgatggcggagagcgcggtggcgcgcgtggagcggctggcgtcggagagcgcggtggtggtgttcagcgtgagcagctgctgcatgtgccacgccgtgaagcggctcttctgcggcatgggcgtgcacccgacggtgcacgagctggacctggacccgcgcggacgagagctggagcacgccctcgcccgcctcatcggctacggccccgccggcgcgcccgtcgtccccgtcgtcttcatcggcgggaagctggtcggcgccatggaccgggtcatggccgcgcatatcaacggctccctcgtcccacttctcaaggaggccggcgcgctctggctctgaactgtaggcaggccgcgcgccattgctggtgactcgtgtgccaacaggctacgcagcttcttccgttgtctaagttagttccttgttgctgtagaacctgatgtcacttgctgcaagctaatcaaactacgtactaagctacggtgataggaggatacatccatggacagggccggatggtggtagatcagtgatgcatcggattgggcttaatgtgtgtgagtagtgtgtgcaagagagaagagaggctggtaccgtgtgtgtgcttttttctcactacctactgcctccgtcggtgtttgtgtgtgcgtgcatgtggtgtttgacgcatgcgctggatttgctttgcttggggtgctacactgttaccaccactgttgtttaatttgatatcctttaatttt

SEQ ID NO: 101239 - DNA, 360 bp, Zea mays
  Clone ID: MRT4577_23843C.1
ggaggaggaaacaacctatcatggcgaagtacaggcagcagcaatcacagaagcaggatatggaagctaaaccaagcagcaatgatgaagaagtaagagctatggatggaaatgtaactatgcatcagaaagatgataacggtagcagttccacgggcaatgacaaagccgaaaataagcatgattcttcagaggtatttgatggcaaaaccgacttttatgtgggaaagtctcctgctcaaaatgaaactccaacgagcacgggagcaggcactgataataggacaataaatgtttcaagtctaggagagggttctcccaacagtgagagatcaacagaccagttctgtgatgacaatt

SEQ ID NO: 101240 - DNA, 331 bp, Zea mays
  Clone ID: MRT4577_23844C.1
taaaaaaaaaaaaaaaaaaaaaaaaaaaaaaaaaaaaaaaaaaaaaaaaaaaaaaaaaaaaaaaaaaaaaaaaaaaaaaaaaaggacggggcgggtctaatttttccgggtcttacttttcgcgtcccggggcgtgccaattgttttggcttttgttttcccttccccttattttccttggccttggccttttcttttgggtggccctggaattgaccttgcccgtggccgttcttaatctgctttgccgtgggggccccccccccctttcccccgttttattctatttggccgggccccctccttttttccctttgcttacttttgcctg

SEQ ID NO: 101241 - DNA, 358 bp, Zea mays
  Clone ID: MRT4577_23845C.1
cccacgcgtacgcggacgcgtgtgtggtcgcgtggctctaacactaggtggcacttttatgatttatggggtttataaagaaacgcctatgcatagtttcgttcaattgaacgaactgtcgccagactacaagacgtgctagataccaaggatgggcaaccatgcagcagccagtgacctgtcatacttcgatgtttacgtgaacgcgacgcatgtacgcccaaagaatcaggcgcattgctctgtgctgcactaagacatgcaagctctcaaaaaattctactagcgctcgctacgtaagacattgatagcgaatatcccaagcggttcgtcagcggattcatatgaaacagactac

SEQ ID NO: 101242 - DNA, 565 bp, Zea mays
  unsure (1)..(565): unsure at all n locations
  Clone ID: MRT4577_23846C.1
tttgcctctttctcagccagtaccaccagttgccagaaaccgatcgccagcctcaaaggctcccataccctctatgctctccatcatccttagtcaggtctacangctggagcacctgcaccaaacaaccgaacgtggtcaaccgtggcatccaggatcatgtctgcccgaacaacctctcgcttaactactatctgccctggaacttcaaaatggatagtgaggactcgacagacatggtgaagagctagtactggaagagcgtgcgcgaggctgagagtactaaatctaagcagctcgtagactacaacatgatgcacaagaacatcaaagttgtttttgtcaggtatgtcctgactatcaaatatatgccgtatgcactgcacatgtacagcgacgacgagcgctgctggagctgctgcgacaatgctgatagaggtgtgcaccgagaggatgatcacacgaaatggtgccattatcggtgagatgaagaaatgatgggcaatcccgcacctcgatatgatatggcggaagcactatctccactgcaatgttggctaggtca

SEQ ID NO: 101243 - DNA, 1018 bp, Zea mays
  Clone ID: MRT4577_23847C.1
cttctcgatctttttttctattcccatttccattctcgcaccgcatccaccgcgccgccgcgagagagagagggtgagtactgaggaggagggtttccgatggagaacggcgaggatacgttcgcctcccccaccgccgccgccgcggacttctccaccaacggcggggacggcacgcccaagctccacgacgcggcggacgagatcgagtccctccgcgcggcgaagcgcgacctggaggagaagctcgatgccgtgcgccacgagaaccagttcctgtcctccgagtcccgccgccttgaggttctcgtgtcccaggcccgcgaggaggtcgccgccgccgagcaaggtgctgccaccaacgagagcgaggccgccacgctccgcagcgaggtcgagcgcctccaggatctcctcgccgcggagaaggctagccatgaggaggagatgcgcaggggtgcacggctcggggaccagctgcagaccgcgtaccaggagaaggccgccctcgaggaggagatcgagaccctgaagggttccgccactgccgagggcaagggcgtggaagagggatgtgattctattgctgccagggccgggacgcctaaggatcagggcgtggtgcctcccgcactggtggctgccgcggctgctggagcagctgccacggctggcatcgcagtggtcttgttcaacctcaagaggtaatctggtggtccgttgcgcggaagttttgatctgctgctatggcctatatgagaatgggttaaccgttttgttagtgtcactggagtcgtagtagtagtatctttactatcagctggataatagactagatgaacatgtatggcacgtacctttactttctgaagttttcaatggtaataagagtcgtgaacacaaacatgagggataattgagttcttgtctggtcttttgagttgcacctgattccagactttgaattattatgacttggatggtttgtactgttagaggacacccccccccccccacc

SEQ ID NO: 101244 - DNA, 379 bp, Zea mays
  Clone ID: MRT4577_23848C.1
caactggccacccgaccttgctgcacgaccgaacatccacaggcatgggccgccgccctggcccgtcgcgtcatccccacactctacatgcttatttgagacgtgctgcattatgctcggccgactcatggacacgatcgctcgagatgtatctgagtgactccagcaaggccgtcgtcggacaaaccaccacaaccggcagcctcgccggctccctcgcgcgccacggcctcccagcctgtatcgttgacgctggcctactcaacctcgatctcttgctcggtttaaagaaccgtgtccacctcaccgccggcaccgtactggtgggagactaaccactccgctagggcgctcggctgccacgatgcgctacaagact

SEQ ID NO: 101245 - DNA, 3812 bp, Zea mays
  Clone ID: MRT4577_23849C.1
aattcggcacgaggcttaatccctcgcgtcgaaagcgacagcggaaccaactcacgttgccgcggcttcctccatcggtgcggtgccctgtccttttctctcctccacctccctagtccctcctcccccccgcatacatagctactactagtagcaccacgctcgcagcgggagatgcggtgctgatccgtgcccctgctcggatctcgggagtggtgccgacttgtgtcgcttcggctctgcctaggccagctccttgtcggttctgggcgagctcgcctgccatggagggcgacgcggacggcgtgaagtcggggaggcgcgggggagggcaggtgtgccagatctgcggcgatggcgtgggcactacggcggagggagacgtcttcaccgcctgcgacgtctgcgggttcccggtgtgccgcccctgctacgagtacgagcgcaaggacggcacacaagcgtgcccccagtgcaaaaacaagtacaagcgccacaaggggagtccagcgatccgaggggaggaaggagacgatactgatgccgatgatgctagcgacttcaactaccctgcatctggcaatgacgaccagaagcagaagattgctgacaggatgcgcagctggcgcatgaatgctgggggcagcggggatgttggccgccccaagtatgacagtggtgagatcgggcttaccaagtacgacagtggtgagatccctcggggatacatcccgtcagtcactaacagccagatttcgggagaaatccctggtgcttcccctgaccatcatatgatgtctcctactgggaacattggcaggcgcgccccatttccctatatgaatcattcatcaaatccgtcgagggaattctctggtagcgttgggaatgttgcctggaaagagagggttgatggctggaaaatgaagcaggacaagggaacaattcccatgacgaatggcacaagcattgctccctctgagggccggggtgttggtgatattgatgcatcaactgattacaacatggaagatgccttattaaacgatgaaactcgccagcctctatctaggaaagttccacttccttcctccaggataaatccatacaggatggtcattgtgctacgattgattgttctaagcatcttcttgcactaccggatcacaaatcctgtgcgtaatgcatacccactgtggcttctatctgttatatgtgagatctggtttgctctttcctggatattggatcagtttccaaagtggtttccaatcaaccgcgagacttaccttgatagactcgcattaaggtatgaccgggaaggtgagccatctcagttggctgctgttgacatttttgtcagtactgtcgacccaatgaaggagcctcctcttgtcactgccaataccgtgctatccattctcgctgtggactatcctgtggataaggtctcttgctatgtatctgatgatggagctgctatgctgacatttgatgcactagctgagacttcagagtttgctagaaaatgggtgccatttgttaagaagtacaacattgaacctagagctcctgaatggtacttctcccagaaaattgattacttgaaggacaaagtgcacccttcatttgttaaagaccgccgggccatgaagagagaatatgaagaattcaaaattagggtaaatggccttgttgctaaggcacaaaaagtccctgaggaaggatggatcatgcaagatggcacaccatggccaggaaacaataccagggaccatcctggaatgattcaggttttccttggtcacagtggtggtcttgatactgagggtaatgagctaccccgtttggtctatgtttctcgtgaaaaacgtcctggattccagcatcacaagaaagctggtgccatgaatgctcttgtccgcgtctcagctgtgcttaccaatggacaatacatgttgaatcttgattgtgatcactacatcaacaacagtaaggctctcagggaagctatgtgcttccttatggatcctaacctaggaaggagtgtctgctatgttcagtttccccagaggttcgatggtattgataggaatgatcgatatgccaacaggaacaccgtgtttttcgatattaacttgagaggtcttgatggcatccaaggaccagtttatgtgggcactggctgtgttttcaacagaacagctctatatggttatgagcccccaattaagcaaaagaagggtggtttcttgtcatcactatgtggtggcaggaagaagggaagcaaatcaaagaagggctcagacaagaaaaagtcacagaagcatgtggacagttctgtgccagtattcaatcttgaagatatagaggagggagttgaaggcgctggatttgatgatgagaaatcacttcttatgtctcaaatgagcttggagaagagatttggccaatctgcagcttttgttgcgtccactctgatggaatatggtggtgttcctcagtctgcgactccagaatctcttctgaaagaagctatccatgtcataagttgtggctacgaggacaagattgaatggggaactgagattgggtggatctatggttctgtgacggaagatattctcactgggttcaagatgcacgcacgaggctggcggtcgatctactgcatgcctaagcggccggccttcaagggatcggctcccatcaatctctcagaccgtctgaaccaggtgctccggtgggctctcggttcagtggaaatccttttcagccggcattgccccctatggtacggctacggaggacgcctgaagttcttggagagattcgcctacatcaacaccaccatctacccgctcacgtccctcccgctcctcatttactgtatcctgcctgccatctgcctgctcacggggaagttcatcatcccagagatcagcaacttcgctagtatctggttcatctctctcttcatctcgatcttcgccacgggtatcctggagatgaggtggagcggcgtgggcatcgacgagtggtggaggaacgagcagttctgggtcatcggaggcatctccgcccacctcttcgccgtcttccagggcctcctcaaggtgcttgccggcatcgacaccaacttcaccgtcacctccaaggcctcggatgaagacggcgacttcgcggagctgtacatgttcaagtggacgacacttctgatcccgcccaccaccatcctgatcatcaacctggtcggcgttgttgccggcatctcctacgccatcaacagcgggtaccagtcgtggggtccgctcttcggcaagctcttcttcgccttctgggtgatcgttcacctgtacccgttcctcaagggtctcatgggtcggcagaaccgcaccccgaccatcgtggttgtctgggcgatcctgctggcgtcgatcttctccttgctgtgggttcgcatcgatccgttcaccacccgcgtcactggcccggatactcgaacgtgtggcatcaactgctagggaggtggaaggtttgtagaaacagagagataccacgaatgtgccgctgccacaaattgtctgttagtaagttatataggcaggtggcgttatttacagctacgtacacacaaggggatactccgtttatcactggtgtgcattcttttgttgatataagttactatatatacgtactgcttctactttgtggagagtggctgacaggaccagttttgtaatgttatgaacagcaaagaaataagttagtttccatctaaaaaaaaaaaaaaaaaggcccctagggcc

SEQ ID NO: 101246 - DNA, 731 bp, Zea mays
  Clone ID: MRT4577_2384C.1
ggacactacacagcgcgcgactgacatgtcgatgctcaccagcatactgggccgcaagcatcagcagccgccgccgccgccgcagcagcagcagcagcagcagaagggcggcggcgcgcgcactggcaccggcgccggcgccggcacggaggcggcggcagtggagccggtgagcatcgacatcgcggagcaggggccgctagtggacgccatcacgctggcggcgttcgcggcgccggcgctaggcctgccgccgttcgcgacggccagcatggactggaaggagacgccgacggcgcacgtgttcatggccgacctccccgggctgcgccgcgacgaggtgaaggtggaggtggaggaggaaaggctgctccggatcagcgggcagcggcagcgcgccgccgaggagaagggcgaccgctggcaccgcgtcgagcgcagctccgaccgcttcgtgcgcaccgtgcgcctcccgcccaacgccaacaccgacggcgcgcaggccgcgctccaggacggcgtgctcaccgtcaccgtgcccaaggacaacgaccgcaaggcctacggcaggctcatcaccatcaccaattaattaattatatatatatatatatatatatatatatatattaatcatatatatatatatattgtcattatatatgtaagcagcatgtgtatcgttatcatcaccgaataaaaaaatgattatgccaaggacgatagggatc

SEQ ID NO: 101247 - DNA, 454 bp, Zea mays
  Clone ID: MRT4577_23850C.1
aaccctaaaaaaaaacccatttccccccggtcctaaaaaaaaacaatttctcaaccttaggtttaaaaaaaggccccaggtttcaaaccccaaaaccatatagtggttggacccttggggggggggctggcaaaaaaaagcggaggacccgggggccgcccgggccctagtgggggggggtattatttcctaccaaccagccatttggtttaattcaaacaccattggcggggggggccccccctggcgggggcccccaaccaagggggaattctttacccctttaaaaagggggggactttttagggaacccctaacgccccctggacccatttagttttcacccctttagggatttccccgtcccaatttagaacccggaccccccccaaaaaaacggtcccaaagggtgggcagggggtatatatgtggcggaaaaaaaccagtcccaaag

SEQ ID NO: 101248 - DNA, 174 bp, Zea mays
  Clone ID: MRT4577_23851C.1
ctcacgcgtacgttacaccatcgacataggtcagaacgacgtgtctgcttacatgcgccggggctacgagcaagtgcttgccaagatccctggatttggtgctcagatcaagtgcaccatcgacacactgtactcgcacggggcccgtaagttctggatccacagcaccggcgc

SEQ ID NO: 101249 - DNA, 544 bp, Zea mays
  unsure (1)..(544): unsure at all n locations
  Clone ID: MRT4577_23852C.1
aaaaaggaggcccgggctcccaccaaaaaaataaaaaagggtgggcccccccctcccccggaaaaaatttttttggttttttaacggcccgaaaggaaaccttagtggaaaacaggcccttttacgggggaaaaacccagaaaagtttcccgggggggaaaaaaaaaaaacaaggggccaaaatctttggtttttaaagcttatttcccaattaaacaacaaaaaaactggggcccccttattccccaggttttttttccctggaaaaatttttttgggtaaaaaaaaccccccctaccaaaaaaaaaagggttccccatcctttataggcccctttaggcttaaatgggggggaaaggaaccctttaagggcaccccaaaaattttgggggaaaaaggacaggcgggaatcaacaggggggaaaaagcttacacggaagggggggggggccctgnangggttttaacccaaggggggggaaaacttatccagggggggaggttttggggccatttgggggccccaaagggggggcaaccccca

SEQ ID NO: 101250 - DNA, 652 bp, Zea mays
  Clone ID: MRT4577_23853C.1
ctagcgagctccaccccccagcgccgccgccgccgcctctgcgcaaccctagctcgcccgcagcgccgcggcctcctccctcccatcctccccaccggcagccatggcgacggagctggcctacgcgccgcccatgaagtcgggcaggctcgggttcgagggcacgcaggaggtgcagcaccgcatccgcatcaccctctcctccaagtccgtcaagaacctcgagaaggtgtgctcggatctggtgaagggcgccaaggagaagcagctcaaggtcaagggccccgtcaggatgcccaccaaggtgctcaacatcaccaccaggaagtccccctgcggagaagggaccaacacctgggatcggtttgagatgcgggtgcacaagagggtgatcgaccttgtcagctcccccgacgtcgtcaagcagatcacctctatcaccatcgagcctggcgtcgaggtcgaagtgaccatcagcgaccagtagttatgctaccccatgatatgtgtctttaaatctttctacaagggtggagagacaccagcgtaccaagatatttttgaaactttctgtagtatgagaactgggttttgtatgactaggttctttgcttcgtgattctaagtgcctactgtcctaaattatctgccg

SEQ ID NO: 101251 - DNA, 872 bp, Zea mays
  unsure (1)..(872): unsure at all n locations
  Clone ID: MRT4577_23854C.1
ttgggtacctcgaggccggccggggtatagtcgtatctcctctctggacgaacagaaaggttaccagcagcaccacggcgagatctccccttggcgggccaaaaccgacggcgagcttcaccggcgttggtcggctcccttctctacgccgttttattttcctcccagatccggcggtgaccgtgctcctgttcgttcttctggtcttgattcgattgggaggggaaggggttccttcggtcttgggaaattcgaagacatgcctgcgctctacgcttacggaggttaaggttgcaggcttttagcttgggattctgaaagatggggacctcttctggcgcgaatttccatcagcaacctcctccgacccaggggatgttgcctccaaggcatggtccacgcccctcagggttgcagacctcgctctcgctggcctcttcggagcaggttggctcgcctgacatgcaggagcctggttcaaactcggagccagggcatgattccgccactgagagcgccagttccaaagacacatggccagctgagccgaaccagagcaatggtggagtggctgccagtgatgttgtgagtaaggcggcggagaaggaggtggcaaatggtgtatccaagccgcaggttatccatggaccctcctcccgtatgagtgggatgcttctgcgggaggttgcacngggagagggttgatctggtcgctgagaagatgaagatgatgtcggatgagcacctagaggaggtcaagaatgagctcaggtcgattctggagggcactggaggttctcacacatcgaggagttcttgtacttgcagaagcttgtccaggacaggcatgatttgacacatccatgctttca

SEQ ID NO: 101252 - DNA, 3068 bp, Zea mays
  Clone ID: MRT4577_23855C.1
cccacgcgtccgcaatcaactagatatccccaacataaacataatcagtatataaatgtttggtctgggcactcccttagaccttagtacacatgttgaatttgtttggctgagttctatgggtgctttggataagttctttaggatttcgtatgtgttaacatgacatgttatctgacccttgttttaagcagtcgtaaatactacttatgtttccttttctgtggtagctttctgacttctgagtattgatgggttgatgtactatggacatatcttcacaccctcgaggccggccggggaggcctcttccgctcttctcgcaccgatcgatcgagactcgagagacgccggaggaggggagggtgatcccgttcctgtacccggcgcctcgtacgtggcgtgtcgttcgtgtccatggcgaacgcgggcctcgccctccgcgaccacatgccctactccaagtttacgccccgccgccaggctgccgccctgcgaagcccggcatgctgctctaccgggctgctcgccgccgccgcgaccggttgctcgcggagatcggacagttttggctcgagaaccaaaatcgccattctcttctctccttttcttatcctctctcctgagctcgctcgtatctcctctctggacgaacagaaaggttaccagcagcaccacggcgagatctccccttggcgggccaaaaccgacggcgagcttcaccggcgttggtcggctcccatctcttcgccgttttattttcctcccaggttaaggttgcaggcttttagcttgggattctgaaagatggggacctcttctggcgcgaatttccatcagcaacctcctccgacccaggggatgttgcctccaaggcatggtccacgcccctcagggttgcagacctcgctctcgctggcctcttcggagcaggttggctcgcctgacatgcaggagcctggttcaaactcggagccagggcatgattccgccactgagagcgccagttccaaagacacatggccagctgagccgaaccagagcaatggtggggtggctgccagtgatgttgtgagtaaggcggcggagaaggaggtggcaaatggtgtatccaagccgcaggttatccatggaccctcctcccgtgtgagtgggatgcttctgcgggaggttgcacgggagagggttgatctggtcgctgagaagatgaagatgatgtcggatgagcacctagaggaggtcaagaatgagctcaggtcgattctggagggcactggaggttctcaccacatcgaggagttcttgtacttgcagaagcttgtccaggacaggcatgatttgacaccatccatgctttcagtggcacaccatgtgcagcttgagatccttgttgcaatcaagactgggatacaggacgtttctgcaccccagacacattcggtaactctatgtgattggttgacttcttcgagcagaggtgtaacgaaatcgtggcttgccagagtgctctccctgctgaggagtgcagatgcaacgtgtgcgctagcaggaatggtttttgcaacctgtgcatgtgtgtcatctgcaacaagtttgattttgaggtcaatacatgccgttggattggctgtgatttttgctctcactggacacatacagattgtgcaattcacaatggccagatcggaatgggacaatcagtgaaaagcagcattggtcatgctgaaatgctttttaggtgccgagcttgccagaggacctcagagctgctgggttgggttaaggatgtcttccaacaatgcgctcctggttgggatagggatgctttgttacgcgagcttgagttcgtttgtaagatattccgtttaagtgaggatgcaaaagggagagtgttgttcaggaaatgtctagatctgattgaaaggctgaggaacactccagctgattccatcaatcctaggatgatactacaagcactccaagagcttgagatggactcccccaagatctctgaaaatgaagatgttgggcatctgatcacaccccaggaagcctgcaaccgcatagcagaggtagtccaagaggccgtgagaaagatggagctcgtggcagaagaaaagatgcgactttacaagaaggctcgcctcgccgtggaggcctgcgaccgagagctggaggagaaggttagggaagcccaggagctgaaggcagagcgtcagcgcaagaagcagcaggtggaggagctggagagcatcgtgcggttgaagcaggcggaagcggagatgttccagctgaaggcgaacgaggcccggcaggaggcggagcgtctgcagagcattgcgctcaccaagtccaagacagccgagcaggactatgccagcatgtacctaaagcggcgcctggaggaggcggaggcagagaagcagttcctcttcgagaagatcaagctgcaggagaaccagaggccaacggtcggcgtgggcagcagcagcggtgcgggaggggactccacgccgacgatgatgctatccaagattcaggatctgctcaagaacgtccgcagcatgccagcaaagtcggagggtcactagtcggagtaagagctttcgctgctgacactttcggtaattatgtgtgatctgctgacttgttcgagcagaggtgtaacgaaatcgtgtggtgctgtgagaaattcgaatcccttcgcgttactgtcggtactcgctaggcgtgctgatgtattaactctgttgtcgcaggtgatcatagtgtgcttgaaacaatgttaaaagttacatcggtagacacgaaacaaccaacagttgtggccctcccttaatccctttacatcttaaatctacatatacacccgcatgcatttttaaaaaaaaaacgggcgaagcattcccaggcgtccccgcttgcatagaagcagaattgtgtacatacaatataaagatctcgaaagcaagaaccatgtatctaaactatctcaagtttttgacagtacgatgatggcactacacaaaggatgcaagcccaacagaattatacaaaacttgctctga

SEQ ID NO: 101253 - DNA, 158 bp, Zea mays
  unsure (1)..(158): unsure at all n locations
  Clone ID: MRT4577_23856C.1
ctttaaattctagattcgacttaacatcttccttactgntggtgctggatcctcgtcgcggcatcttgagacaaaacgtgcgcgctggctttgcccttggtaatggtactccaccggtgcatgtgcatggcttggttggcgagagggggggccccata

SEQ ID NO: 101254 - DNA, 374 bp, Zea mays
  Clone ID: MRT4577_23857C.1
ggtggtttctgcaaaagtggtggtaaataaaagggcgacaagccgacaactatcttgtttttgttagtaacttgtaactttacgatgcgataatggaacatggcctgcgttatctgttaaaaaaaaaaaaaaaaaaaaaaaaaaaaaaaaaaaaaaaaaaaaaaaaaaaaaaaaaaaaaaaaaaaaaaaaaaaaaaaaaaaaaaaaaaaaaaaaaaaaaaaaaaaaaaaaaaaaaaaaatgggggggcctttaaaaaggaacaaaatttaataccgggggcatggaaattaaaagtttttttatggggaaaccaaattttaatccgcgggcgggggttttaaaacgactgaaatggaaaaaccttggggttccc

SEQ ID NO: 101255 - DNA, 827 bp, Zea mays
  unsure (1)..(827): unsure at all n locations
  Clone ID: MRT4577_23858C.1
tgcttcaccatttggggaggaagatggggtttccttgtttgggcggtggccagtgaagatgatgcggtcgcgcgtggcatcaacggcgcgaggagctgtccacgacgggcgcacgaggtcccaacgaccaccaaagtaggcggagatggggaacgacaagcaactgtcgttgtagtgggtcgaggaggcggtggtaccactagatcgacgtccatgggtgcggatgtagatgaccccgcgtcacccaccggcaccggtggtgacggggacacagtggggaggccgcactccaccaccgacagtggaaccaccactgtccatccatggagaacatagaagtgcacgttttgcacttgcacacggcgttcagggatggcatgcactggtggaagtgttgtgtcttgcccagcagcaaacgcctccaacctcgcatcatcaacaatgtgcagaactttgtgcatacgacgtatgcgcatggaaatggtttgcttcataccttgctgttgatttgcatatcactattgttgtttttgtcaagaatagcaagtgttcttccttcttcctctgatctttcttgggacagtgttgataacgtattaagagttgagtgctcaatagtagaatcagtggagagggagagacaaatgataggactgttatcttgtttattgcagagatcctctttatatacatatgtacaaaagggtctccaaggggtgtgacccttggataataactataacaaatggatggttggatgggccttaaaaacgtcactaataacannnaatgccactggtccgcgatgggcnnncttaaaaaannaa

SEQ ID NO: 101256 - DNA, 441 bp, Zea mays
  unsure (1)..(441): unsure at all n locations
  Clone ID: MRT4577_23859C.1
gctcaaccatctaccagcgactcagcgagcgagagcagtcacactgcacgcagctagctaggagcagcagcagcggcggcgatggcggcctccatgatctcctcgcagctctggcggtggcgcctcagggcctgccgcccctcggccgccgcgcctccttctttgccgtcgtctgcttcangangaagatcaagaccgacaagccctacggtattgggggtggcttgtcttttactttgataccatttcttgagagtgcgtttatgctactaatgatttcatttatttctatctatttaaatttgactcctattcagttgactaactatttttctttattctcatataccattttatttctttcctatgggcaccattttttttttgtatttaatttgactttttcttttttatatttctattcttcataaaaactttttt

SEQ ID NO: 101257 - DNA, 212 bp, Zea mays
  Clone ID: MRT4577_2385C.1
cccacgcgttcgatgataacatgcatcatgcatgcatatttattttttcgctcatgcactccgatacggagccagagttaaaaaatgtaaatcaatgtgcaaattcaaatgacattttaaccagttgtggtcacccaagatcactacaatcttatatgtagtcaaagctcgtataaacagcatacaaaagacatcaaagaatgaaaaaccag

SEQ ID NO: 101258 - DNA, 1258 bp, Zea mays
  Clone ID: MRT4577_23860C.1
accgcggagccggccggcgtcggcctcgccgacgtgctccgggaccacggggacgccaaggtcgccgggggcaaggtggtgctagggtcccagctcagagtccaggtcccgtccggcagggccgtcgagctgctctcctccccgatcgagttcggcgcgaagaacagggacgcgcagctggcggcgctgtcgcccgccaggaggctcctgccggaggtcgtgagctcgccgtccgcccgggtgttcgccgccggcggcgtggccgtcgtgccccccggggagatggccatgtcggaggactacacctgcgtcatctcgcgcggccccaacccgaggaccacgcacatcttcgacgactgcatcgttgagagctgcggggatttgctagccgacaagcccgcggccggcggcgcagcagctgctgcctgtggcttcttcagctcttgccatgcatgcaacaagcaacttgggcatggcaatgacatcttgatctatcgaggccataaagcgttctgcagcagcgagtgccggtaccaggagacgcttttggacgaagccgtggacggacaatttgcgctaggcgatggaggaaaaggaggagggcgttgttagtggaggagaagagaagccatgaggacgatcctgaacaaccaaccaccggcaccgagacgagatttctttctttctttctttcttcttcttcttcttttctttccttttcgttctgtctcctttgcgggatctgcgtgctgttttcggtcgtcgactcgatgaggagagtggtggtgatcttattagtcttttgcggattaaagaccttttttttttggcgcccgctttcgtaagaggctgaagattggtgacctgggcctgatcttgttcatgcaacttattttcccagctggttccgatgttatgatgcgcttcgatgcttgtccatgtgactcgctcatccagtgtggaccctagcctgaagtaaattcaaagagggaaaaatacttgtctccttaaaaaaaaaaaaaaaagccgcccatcacattatttccagtgattcatcagggtgctaaagaaggggtagggtctagtagtacagtatttccactatgatgattaggggctgttgagatgttagtatacctgtgtgtgtgtactggtggcctggtggggtggcttggagtttattaggagtgattggctgatttcctgtaactggatgtctggttgcagccctgggagtgtgcagctggaccgatgctat

SEQ ID NO: 101259 - DNA, 715 bp, Zea mays
  Clone ID: MRT4577_23861C.1
gacgaactggacaatgagaggtctgcttttttcttactcatgaccaagaatgagtacctggaaaaagggaaggcgcaggtactgcagaatcaggaagagatgattcattacctggaaaatgagaagcggctggtagagagggaggcgccgcagtcccagaaaatgatgcaggagcagcagaaggctatgatcgagtcacttaagtcgatgatcaagatgtctggaatgcaacccaaggacagcagagataagaagtagctaactcttggttattggtagttcaatagaacagcaagccaagaaagccaaacagggattgcccatgttttgaaaactcggatgctcctttaccatgcatagctcttcacgagaaatatctaaaatctacctatagatataccatctcttgaaacctatctaggtacttatctaatatgagcaacacatgtacttgatcgctctacctttacaaatgctcattgctagtattatttgtgggctattgttcttgtgacatttgaagattttttttacagtttttgacattacaagctggatttcaccattaggattgtcagttatccgtcatactagtgttcgagcaaagcataatgaaccatataggaatgcgatcaatttgttccaatgtagttttaagattattcttgcctttttcaatataaacttttccctttaccgctttaaaaaaaaagaa

SEQ ID NO: 101260 - DNA, 380 bp, Zea mays
  unsure (1)..(380): unsure at all n locations
  Clone ID: MRT4577_23862C.1
cccacgcgtccgcccacgcgtccgccaagtccgcccatctccacccgaagcccttgtgcaagcctatctgatccacatcgcggacanntncttaccaacttccgcaaaatcatggaattgaagggtcttcgcaaggcggaacaaacgcagctcctggacctcttttctgcattcaaagcctcgcccaaccacgccgggctcgtcgacaactcgcccttcctcaccccgatttctcttcaagcgccaccttcatcaacgggcggcttgggaggtaatgtaagcagcgtgatgggcaacatgggtacgcctgggctagcagccggacgcttcgacgcagctggcttgggcaatatgttggtcaatgcttcgagggattgggt

SEQ ID NO: 101261 - DNA, 193 bp, Zea mays
  unsure (1)..(193): unsure at all n locations
  Clone ID: MRT4577_23863C.1
aagntcctcaggtcgtnaanccctntncctcgtgccgnctctgtcgacgtcgccgtcgccgtcgcgggctcgcctccccntcgaacgcgctggcngnctgngttcgttccncgnnggtcggagnaaaaanaaaggagnagnggaaaaggncnntcatgagctgaaatnangatatcatctcgccgnatccaag

SEQ ID NO: 101262 - DNA, 653 bp, Zea mays
  Clone ID: MRT4577_23864C.1
aaaaaaaacaaaatggaggggctcatcccgttcatctacaaggccatcaaggagcggcgggcccggagctactactactcgcggtgcaactccaccggctcgtcgcgcggccggctcggggcccgcgtggaggacagcgcgtgggacctgcagcagaagcagtgggagtccgccgccggcggtggcaaggcgggcgggggcggcggcggagcgggagatggcgcaggcgcaccgccgccaccgctccctcgacgagctggcgggggaggtgggcgcctcgcccgggtggcgccgccgccacccgggcgcgccgctcagggcccgcagcgtcaggatcttctcctgcatcggcggcgtgtgatgtgcggatgcaccggccgcgtggcctgcatcgttccgcagggactggatggcggagggtttgtttggacgcgtcgtgctcgtgctcgtcgagcatgcgcgcagggggtggtttgctcgtgttttttttttttttgcttcgatccgaggtgggcagcgaaggagtagtaattctgcagtggatgtaaatcctgctaatgtaatccaacaaaaagtgtacatattcatgtggatttgtgaacatgcaaattatatttgcaaaaaaaagaaaaaattaaaaaaaaaaaaaaaaa

SEQ ID NO: 101263 - DNA, 443 bp, Zea mays
  Clone ID: MRT4577_23865C.1
cggacgcgtgggcgagagccagctctcccagcacacgagcacatggcgtccaccaccccgggtggtgtcttgctggtcggggctgcgtccggagcgccggcgcggtcttgcttaacttgcgacctggaagcgctgttgagcgtgaagcaagcgcttgggaacccgtcaacggtggcgacgtggaccccaacgttggccgactggtggttgtgggaccaccttcggtgttaccacccccgacgcctgaacaacgtgttcattgaccgggccgaccacgtgcgccggccaatcccgggggcggtgggcgggctgaccgagctcatgttcctgaccctgttccggctggcggggcttacgggccccataccgggctggctgggcgcgctgtgcaaactgcagttactgaccgtatcccacaccaacgtgttcggcgccataccgga

SEQ ID NO: 101264 - DNA, 351 bp, Zea mays
  unsure (1)..(351): unsure at all n locations
  Clone ID: MRT4577_23866C.1
gccaggctcaacaatancggggggcgcccttttttttttttttgggtcttcaatcaaggatactaccacactgggtatgacacgaatgctacatgctgactataccccaaacggcgagttagacagcctagacactggcagcgatacaatacaactagaatgatcaccaagcaccttggcgttgccctctttacgcactactgtggaagctacactaattgtctgactgcactgggatgaagacctcggtgaaatggcctgtggggagccaccgtaggctttccgggtccagcgagcatgcctgcacattgccgatccgtcgttagctgtgagccattgctatcattggct

SEQ ID NO: 101265 - DNA, 532 bp, Zea mays
  Clone ID: MRT4577_23867C.1
gcaccgctacgtgtggtcgacatatgtatgggcacaccgagcgtgagaaagaaagcgtcatagaggacggcgttgacaggaaatccccgaggtgatgatgctgaaacctcacagctggctgttgggaactgtggttggatgcttgcccctagttgatgtacacccttcatctgctagcgcgtagtacctggcagatgatcgacactttctcacagcatgcataccgtttgcacgtggatgctgtggctttattaggaaacctagcacttaagtgctccatgtattccggatttttgctatattctatgcaacaatctccatacaacatcactcgcccattttgtggaagtggatgaagcaacgctaaggtcaatcttgatgacgtgcgggcgctctatgcatgccgatgtcactgacggaaagatacgatcgagtgcatacttttactgttacattgatgaagatgatattcatgtcgtggacaccaaacctactaagcaaaatggcgattactctatgagacaaattttga

SEQ ID NO: 101266 - DNA, 134 bp, Zea mays
  unsure (1)..(134): unsure at all n locations
  Clone ID: MRT4577_23868C.1
tacactttaaaccgaganaaaacaggcgtcgaacaaagtattcgaccaacaaacccncancnngnagaaccaaccgacaaaatcaagtatcatccttcaaaacgaaccaactccataccgactaaaaaaaaaca

SEQ ID NO: 101267 - DNA, 367 bp, Zea mays
  Clone ID: MRT4577_23869C.1
gcaactgaacatcaaaagcctttttttattcatgcctcagtaaaactggcaggcaacctgaacagttgattgtaaataatgaagaaacctttcaaaacaataactggtgccccacccccacccccaccccaaaaaaaagactcaaaaatgaaacaatctgagctctaattctattattaccaatagtttgacgaccacttggccatttctgtatccaccaactcaagctggttaaagaatcctaatcagcagttcaacaaggtattgcctgatagatgaagatcaacgctgcttaaggatggtaaactgttttccgcagtctctccatcacagactggaccttgtctgacatcttctggtaaagcca

SEQ ID NO: 101268 - DNA, 773 bp, Zea mays
  Clone ID: MRT4577_23870C.1
attgcaaccctgcaactgcaagctaaggagagtgtgatcaccaacagctagtgctagtcccccttccttccatccatccatggcatgcgtcagcaccttccagagctgccccattgccagaagagcaaagatcaacacgaggtccaggggctgcagcagtagcgtggcgaaggggtcatcaccaccagccttccagttccagtgcagggcgtcgactttcgcggcggacaccagcctccggctcgagctggacgagaaccccgaggcgatcatctcgggggcgtggcccgggaactgctccctcctcagctacgacgacctccgcgcctacctcgagtcgcaggagacggcggcccaggcagacggtcagcagcgcggcgtggcgctcctgagcgagaccatgtccacacccgtgctggtggccacagcagaccagaccctggaggacgtcgagtgccacttcgaggccgtgtcggggcttccggtcgtcgacagcggcctcagatgcgtcggggtgatcgtcaagaacgaccgggcaagagcctctcatggggcaaataagaacgacgtacgtccgttcagtttaccggtctgtttctacttgtgacagtccaagacgaagatatcggaagtgatgacatctccagctatcacactatcgtctgacaaaaccgtgatggatgctgctgttctcatgctcaagaagaagatccacagattaccagttggtaaccaggacgaaaaagtaataggtatagttacccgcgctgatg

SEQ ID NO: 101269 - DNA, 1589 bp, Zea mays
  Clone ID: MRT4577_23871C.1
ggtaccctcccggccgggtagggaagaaccctgcaactgcaagctaaggagagtgtgatcaccaacagctagtgctagtcccccttccttccatccatccatggcatgcgtcagcaccttccagagctgccccattgccagaagagcaaagatcaacaccaggtccaggggcagcagcagtagcgtggcgaaggggtcaccaccaccagccttccagttccagtgcagggcgtcgactttcgcggcggacaccagcctccggctcgagctggacgagaaccccgaggcgatcatctcgggggcgtggcccgggaactgctccctcctcagctacgacgacctccgcgcctacctcgagtcgcaggagacggcggcccaggcagacggtcagcagcgcggcgtggcgctcctgagcgagaccatgtccacacccgtgctggtggccacagcagaccagaccctggaggacgtcgagtgccacttcgaggccgtgtcggggcttccggtcgtcgacagcggcctcagatgcgtcggggtgatcgtcaagaacgaccgggcaagagcctctcatggggtcagcacctcgctcctctccctccacctctttctttctcatggggccagggccatgcatgcgcatcaagctgctagtttctcatagacaggcaaataagaacgacgtacgtccgttcagtttaccggtctgtttctacttgtgacagtccaagacgaagatatcggaagtgatgacatctccagctatcacactatcgtctgacaaaaccgtgatgggtaatcttttttgcatcgcttttcttttcttttcttttcttttctgttcatgtgtgatttttaacaagttgaatctaacagtgcatgcctaacgtctacagatgctgctgttctcatgctcaagaagaagatccacagattaccagttgtaaaccaggacgaaaaagtaataggtatagttacccgcgctgatgttcttcgcgtgttggaaggcatgttgaagatttaggagcgcagatacccatgctcggaagccacagcctcttgtaaatatgtagatgtgcccgggcatggtgtttctgagtagcagcaaagagatctaccatgtataggagtttctccttgtaaataatagtagcacgccaggagactccatcccaggttccgtactgcttgcgcgaccagatgctgtaaactagccagatacttgaagaccaatataaatggatatgtctaaagtagtgtttcggaaaaaaaaaaaaaaaaaaaaaaacaaaaaaaaaaaaaaaaaaaaaaaaaaaaaaaaaaaaaaaaaaaaaaaaaaaaaaaaaaaaaaaaaaaaaaaaaaaaaaaaaaaaaaaaaaaaaaaaaaaaaaaaaaaaaaaagccaggggactccatcccaggttccgtactgcttgcgcgaccagatgctgtaaactagccagattttttttttggggccccaaaaaataaattcccggggcccttttttaaaaaacggggagaggggaaaaaaccctggggtaacccaaaataaaaccctttggaaaaaaacccttttttccaaggggggg

SEQ ID NO: 101270 - DNA, 708 bp, Zea mays
  Clone ID: MRT4577_23872C.1
agtttttatttctttttttttttttttttttttttttttttttttttttttttttttttttttttttttttttttttttaaaccccaaatttaataacccagtagcaaagggggggaaaaaagttttacaacgtaggttggaacccacccaacgacagataaataaaaaccgacaaaaacataacacgatgggaccccctcggggcaaatcaaaggatagggggggcacaaaaccccgacaaccccgccccagaaaagggtttaatacttgtcacccttggggccgccctcccccttgaaaaactaaaaaccgacctttttgtattctttttggagcgcagccaaatcctcaagagcctgggaaaactcgccttttttcatacccttaccgaattaccagggcaaaaaggcccccttggggaaaatgagggcaaacttggggccaagggggaaaaaaacctccacaacactgggggggtgggaaataatgcacacgggacgctgcactttggccaggtcaccgccggggacaaccctgggagggtggtatttgattccgcatttgaagccaggggggccccagtccacaaactggatggggcccttggttttgattggggccaaaaaaaggttcacgttcttgggaacccatccccacggtacatgagggaaaatgccatgtccttgccatggggggggtcccacttg

SEQ ID NO: 101271 - DNA, 522 bp, Zea mays
  Clone ID: MRT4577_23873C.1
tcaagcgggcgcccgggcaggtgctttttttttttttctttgttctttttttactttttattgtttatttcattattatcattttatcatcattggtgaccaatatagtttccatgcttatgctccccaatcttagtaaatgtagttgttaaccccccttggggcacctaaatgctcacaaactcctgtaaatgtaccttcttaccccatggctggcctcaatcatagctcaaaaaagtgaaaaccgagctccacaacatataagcttaaaaagggcccccccaatgagcataccttggataggacgctgtggggtaacaaaaaccaagcctaacaaagggcgcacaaattggtacaaaccaaaggggcgcggggttagcccaacactggctaacaaaggccaaacctgttgctgtgtcaaaaaggaagcaccacttgctgcagctagcttgttaaatggcagaagtatttgctgctgcaaaaaagcaggggggttcagtggggccaattggttaaatggaa

SEQ ID NO: 101272 - DNA, 583 bp, Zea mays
  unsure (1)..(583): unsure at all n locations
  Clone ID: MRT4577_23874C.1
ttttttttnnnnnnnnnnnnngggaaggatttttattcatcaagaacagtacatcgagatgatacaattccttgaaagtcacttccggcctctgccctaggagcacacagcccaacagaatctaaaaacacacactagtggctatcaatccgaagactcgaccgccaactatgctcccgggaaaaaaactgatttctgcatgagtcctgcctctgtagcatagcccatgcgcgaagcctctgggctacagtaaaaatgacttgacagtcctgctactgatcttggtcatggcctcatgggtagtccaatacgtcttgacaaccaggaggatcttctccctgttcctgtacagggtgaacaccgagtccgcatggatgagatcgtaggtcctcgggtaggtagacatgccctcgcaccggcgctgagtgtggcggcggaggaagatggagcggacacagcacggtgcgggatcaccaggaggagcagacacagcgcggtgcggtgaggactggctccgggatcaccaggaggagcggacacagcttttgctccgataggcgacagcgagtcaagaggcgagagc

SEQ ID NO: 101273 - DNA, 525 bp, Zea mays
  Clone ID: MRT4577_23875C.1
atggacttgggcctcagcgtcgcgggtaggaccggcagcggaggaggaagagggggctggagagggagcgggggcggcgcgtccgcggcggcgtggacccggctcgtcagctctggcgtggaggacgagctggtggccgcgtcgggaggaggaggaggaggaggtggtggacgcgctggggcgagagccggaggcctgccgctgggccactttttggaggcctgcttcctctgccggaagcccctccccagcaaccgcgacatatttatgtacaggttgcttttgcgcgtgaatcaattaaattcctgggaccctaaattggtgcgcttatttatggccatgccaggtgacatcccgttctgcaccgaggattgcaggagggagcagatcgaaatggacgaggagatggagcggaaggagagcaaacccaagaacgtggcgccgagaggagctccatcccccaaggacgtggactccccgccgaggcctcccaaggcccgggccgggtcaatccttgccggctaa

SEQ ID NO: 101274 - DNA, 697 bp, Zea mays
  Clone ID: MRT4577_23876C.1
ttttttttttttttttttttttgactcgcaacaatgacttctatttaccatttgacacaattcggaattgaagaaaactttgcaggggccaggggtcttactacctacccttccttccccccacatgttaaatttcctatccgagcaagtactgtccagaaagaacagcaagcacaaaccgtcaagagatcactagttcaaggagctagaaacggtggtacaactccaaacatgaaaaattcttatcaacattgagaattttacttgacagtcctgctactgatcttggtcatggcctcatgggtagtccaatacgtcttgacaaccaggaggatcttctccctgttcctgtacagggtgaacaccgagtccgcatggatgagatcgtaggtcctcgggtaggtagacatgccctcgcaccggcgctgagtgtggcggcggaggaagatggagcggacacagcacggtgcgggatcaccaggaggagcagacacagcgcggtgcggcgaggactggctccgggatcaccaggaggagcggacacagcttttgctccgagaggcgagagcgagtcaagaggcgagagccgcggcggcggctgcgatgggcgagaagaaccctagcacttttaccaggcgagcacgggccaggctcacccgcgaaggaaagatcgttcccggccggcttcgaggtaccc

SEQ ID NO: 101275 - DNA, 282 bp, Zea mays
  unsure (1)..(282): unsure at all n locations
  Clone ID: MRT4577_23877C.1
cggacgcgtggggttttataagaaatatatttgtatattattattagcgggatggttgaaatatttatgtgctggattnttacataaaggagtgagcccaanaacgtcttataagttgcagattagaaacattgtctgctgatatataaaattatttctcattctccgtcccatgaatttgagataggcttctatctgaaatttggaaagtggtggaatgtcaaattccaaaccaaataagttactttatttagtaaattccaattcctccaaaatgaaatg

SEQ ID NO: 101276 - DNA, 1456 bp, Zea mays
  Clone ID: MRT4577_23878C.1
attgagggtcgatttttgttatgtttgtttgtggaggggaggttttttttttctcccaaaacggcgcccctataagaatcccttccctaaaaatggcttcgggcttgtgtgtttaggcgcccccccccccatattatttgaaaccccccattggggcctatcaaagagaagttgtcagctcgccgcattctttttgtctatgaaaagggaggcattttttttcaaaaaggacagtccctcaagattaaacaattctataaaaggccctttgggcctttgcttataggagctcccccccccgcattttctaatcacacccggtaggggccagcaacccaaatttttttttttttttttttttttttttttttgaaagggaaggatttttattcatcaagaacagtacatcgagatgatacaattccttgaaagtcacttccggcctctgcccataggagcacacagcccaacagaatctaaaaaccccccctagtggctatcaatccgaatttttttttttttttttttttttttttttttttgaaagggaaggatttttattcatcaagaacagtacatcgagatgatacaattccttgaaagtcacttccggcctctgcccataggagcacacagcccaacagaatctaaaaacacacactagtggctatcaatccgaagactagaccgccaactatgctcccgggaaaaaaactgagtcctgcatgagtcctgcctctgtagcatagcccatgcgcgaagcctctgggctacagtaaaaatgaccaattcattcctggcaccattcagccatctcgactgttggaccctttctctccataatttgggaccagaagcagtgttctttcatatcattaatagatctggaacaacacatgctaataagatttaaaaaaggaaattacacagaacaaaattgtaatgctagaatgaatccagttgtgattgtgcttatccggggtcgaggtgactcgcaacaatgacttctatttaccatttggacataattcggaattgaagaaaactttgcaggggccaggggtcttactacctacccttccttcccccacatgttaaatttcctatccgagcaagtactgtccagaaagaacagcaagcacaaaccgtcaagagatcactagctcaaggagctagaaacggtggtacaaatccaaacatgaaaaatgcttatcaacattgagaattttacttgacagtcctgctactgatcttggtcatggcctcatgggtagtccaatacgtcttgacaaccaggaggatcttctccctgttcctgtacagggtgaataccgagtccgcatggatgagatcgtaggtcctcgggtaggtagacatgccctcgcaccggcgatcagcatggtggcggaggaagatggagcggacacagcacggtgcgggatcaccaggaggagcg

SEQ ID NO: 101277 - DNA, 318 bp, Zea mays
  Clone ID: MRT4577_23879C.1
tgcttcttatcctaatttaggtgcagtccttacctggcatacacgaaccagaatcattagcacaatgaaccttttgatgatgaatatttaagttgtgctgtcatgaccttccgagtttattttgttagggacttccttttgtagaaataagattttgctgtacatggcgtcgtagtgggcctatgaatcagtttttttcttatgcagtcacatggaaacattgattagctatgtctgttgcatctaacaagcttcaattcatgcccctcgtttattgttcacaaccaacatatctcatctatacagtcagttcttttt

SEQ ID NO: 101278 - DNA, 1003 bp, Zea mays
  Clone ID: MRT4577_2387C.1
ccggccgggccccggcctcccctgccttcctgctccccccacactcccccacttcgccttcgcccaccccctccgctgcgagcgcgaggcgcggagggaggggctagcgctagcgctagcggctgcggcgccatggccctggccgacgccaccgcgttcccctacggcctgcgcgtcctcgtcgtcgacgacgaccccacctggctcaagatcctcgagaagatgctccgcaagtgctcctacgaagtcaccacatgcggtttggctagcgttgctctccaaattctccgagagaggagaaacaagtttgacattgtaatcagtgatgtcaacatgcctgacatggacggtttcaagcttctcgaactcattgggcttgagatggatctacccgttataatgatgtccatagacggagagacaagtagagtgatgaaaggtgtacatcatggtgcgtgtgactatctcctcaagcctgttcggatgaaggaactccgaaacatttggcaacatgtgtataggaagaaaatgcacgaggtgaaagagattgaaggtaatgacagctgcgatgatctcccaatatttagaaatggtttagatggattggatgagaggggcctatttatgagagctgacactgataccatgaggaagagaaaagacgtggataaggaccatgcagaccaggactcaagtgatggagctactgctaagaaggctagagttgtctggtctgttgaccttcaccaaaagtttgtaaatgctgtcaaccaaattggatttgacagtgagtgctctctaaagtttgataaatttgcaactcccttcatatgttttttttttaaaaaaaaattgcacgacctcaatttaaaatttgcaactatggctctcttgcagaagtggggccgaagaaaatacttgatcttatgaatgttcctggcctgacaagagagaacgtggccagccatcttcaggtatggcaaaaaaaaaacccccccccccc

SEQ ID NO: 101279 - DNA, 345 bp, Zea mays
  Clone ID: MRT4577_23880C.1
cccacgcgtccggctacctcggcttccaaaccatggccgcctatcctacatgtggtgcctgcggagccgcttaggccagccggtcgggccagaggcatatccttgcctgggatgatctatctggtcgcgcgaggggtcgaaagggacgcttgactattgtcagcgcgggacgcaatgctttcagctgtgaaattattattcaggcttgaactaaaggtactgtacgaaggtcctacagtaatattattgaatcagagagaactgagtttagagggcaagaggaacaagaactgagtttagggtgaaagaggatgattacaaacaaatgaacgtgagagtgagcag

SEQ ID NO: 101280 - DNA, 538 bp, Zea mays
  Clone ID: MRT4577_23881C.1
gggtacctcgaggccggccgggcctatcatccgtaacccgcccggtgctagagctacatgcaagcgtactacccctctttgctgaccttcacctacgcctggaacgaaatccactaggcgaaatgagtgaccacattactgtgcaaggaccccatgctcctgtatgattggtaaccgtgaagtgacgttgcttcgcctacttgctactactagatgctagcgtcacaatcatcttacttgtgatattttactctccacaatcattctgaagtttatggcatgcttcattcaccgtggactcgataatcgctcttgctcgtaatatacacgcactcctttgtcttgtgatgttgtgctatcgtgactactatatagtctctctcgtggaaacatttgcttgcgctaacaacacactcatgcaatcccactagctactcctctagattccatgagagaaaaataaaagaaaagcggccctcaacctcgcactatttgtcccctgagtgaaattgaaatgcgctcttgattcaaccatgca

SEQ ID NO: 101281 - DNA, 139 bp, Zea mays
  Clone ID: MRT4577_23882C.1
attcggctcgagccgtagcaccaaacaagtgccatgcgaccaatagcagtggctgcaatggagagcaccttctatcatgagtcatgcctgaccgcctctagaggggtctcattggcccgagcatcagacgttttgagaa

SEQ ID NO: 101282 - DNA, 328 bp, Zea mays
  Clone ID: MRT4577_23883C.1
cccacgcgtgcggcagcagtacgtacgcgcagccaagcccagctgattgggccatggaagatcatcatcatcatacagcaacgattgcgcacacgtggttggcggcgatggcgatcgccgtgctccctatcctgtccgtcctgattctggctgacaccaagcagatgggaagaaccgtgttcgtccctaccaagcgccgagagccggcagtggcggagggcgctcctctcctcggcgtactgcctgccatcctcaccaggagcttgcaaggcgtgatctgcgaccagtacttgaagctcggcagcgtgttcacgctgagctccttggg

SEQ ID NO: 101283 - DNA, 343 bp, Zea mays
  Clone ID: MRT4577_23884C.1
cttttataaaaaaaactgaagatcataccaaattgattggttaaaagacttgctttgcgacctactttccactaagagccggttcaaagacgttagcgtataaccaaccgttcaaccacccaccgagatgatctcctgcctaactgtgatggaacccactctcggagatgggttcgatttccttgtacgccaccacaccaccggcggggggtgctgatgaaaccgaccgctactgcattgggtctatactacctggcatgactggcagacaaactgggggtggttttactgccagtgagacttttctcgccaaaactatggtctgactacgatagtaggcctg

SEQ ID NO: 101284 - DNA, 134 bp, Zea mays
  unsure (1)..(134): unsure at all n locations
  Clone ID: MRT4577_23885C.1
gaaacgcggccgcggcacgtggctnacgatgggtcgtgcgtgcgctcccgtcctataaagcggatcatcggaatccactacacttactaccgcatctgcttcgttcgcgctccaggtcagcaccgccgctggtt

SEQ ID NO: 101285 - DNA, 471 bp, Zea mays
  Clone ID: MRT4577_23886C.1
gggggggaaacaaaaaaaaattacccaaaccccggtaaacatttttttaggggaaaagctttggaaagaaaaaaacccccaggggggccccccccccgaccccaaaaaacccaaaaaaaaaacaaaacctaccggggctggtaaaaaccccggaacaaaccggaaaaaaaaggaattttaaaaaaaccccccagtttgaaaaaccaaaaacggcccccttgggagaaaacccaagaggcccgggaaaaaccattacccaaaaaaacctttttttttgggggaaccaaaaaaaaggggaagagggcctttacccttactagacttggcccgaggaaaaaaacacccttgggaccgggaagcaggcaaaaaatccgttggccccgcccgggggaaaaaaggcgcccgggccaagagatttgaacccgagagaccaaaacgggggaaacaaccggggggatccaaagctttggg

SEQ ID NO: 101286 - DNA, 675 bp, Zea mays
  unsure (1)..(675): unsure at all n locations
  Clone ID: MRT4577_23887C.1
aagcaccacccccttcgccaccgccaccatcaccgctaccgctacggcttcccacctcaaaaccctaaccctaaaccccctccngcgcgggagcccnntcgcccatggagaaaccccannggccccaggccccagcactcacccctcccgtggccccgctccccgtccccatccacccgccaatcgccccaatccccgtccctccgccccgcgngcccgcccccgccccngccgccgccgcttccntggcctccncncccnctccctccnctggggncgggggcgnggccgngtncgnngtctccgncgnccnccgcgccgcgcgggngcgccncgngcgcgcggtgcnggngctcctccngcggcgccgcgccttcgccntggccgtncccnccnncgnctccgctgtgcgggcccgcctccgccgcctcggcgngcccttcncgcttttcggcgngcgcgngttggngcgccgcgnccgcctccgngccctcntggtccggctcgnggccgntggccnggtcgnccgtctcctccgcgcgcnggngggcgncccggccgcgcgcctcggcgnggngggggngggggggctgttcgcgttccccttcttccccgngggctccgcggggcttctcngggcgcgccttgcccttgcccgggnctcgctgccccgtg

SEQ ID NO: 101287 - DNA, 143 bp, Zea mays
  unsure (1)..(143): unsure at all n locations
  Clone ID: MRT4577_23888C.1
ttctccttcctccgagtgatgggccaggagaagactcacgtcaccatcgtggtcattggtcatgtggattctggnnggttgtagcgccactggccatctgatctaccgccttggaggtgttgaccagcgtgtgacggccaggc

SEQ ID NO: 101288 - DNA, 389 bp, Zea mays
  Clone ID: MRT4577_23889C.1
gccgggccccccgtttccccattacgcggaaagcgctgtcgatctggctgtctaacctgctgcgcaacacaggacaagggcgccacatgcacaccctctcctagcgcctcaagaaaaacgggctcacgcacgatgaggtgtaagagccctacttcgacctgctaatcaaggaagcgctcaggaggcctgcctaaggaggtgatcgaatcccgcatccagcccctcagagcagccatggacctcgccatgaggaataagtacctcccctagcacctccaggcacacatacggaccattcagaggatatttgagtgacatgctgccctctggggaaacaggaaaacgctgagccgcgcaccactgcccagcccttccactctaccagagaa

SEQ ID NO: 101289 - DNA, 2227 bp, Zea mays
  Clone ID: MRT4577_2388C.1
cagagggctgaacagtaaaatgctggagaaaagactgcacggatgcctgctcctgctcgtcttccttctggcagacgtatcagttcaccgccacttatttgccagtaaagatgtacgtggagcctgcatgagggcagccgtgctgaaactgccgtcgatctgggtccagactcggaggacggcagcaagaggaggtcgctggccaccgccatgttctgtgtggcgaaacagggcgcggacgcggcggcgctgcaggcagggctcaactgggcgtgcgggcagggccccacgcgtccgcggacgcgtgggcaccagactcctttccttttcctctcgctccctcgctctttctcccgcaactcggcgtcggcgaccgctgccgctgccctacgccaggtgcactgctgctggtctagtagcctcgtcggtcccttcgacaggttttcttcgggtcttcgccggcgacgagcacccgccagaggtggccaatgataatgttggcggtcagagggctgaacagtaaaatgctggagaaaagactgcacggatgcctgctcctgctcgtcttccttctggcagacgtatcagcttcacaccgtgctcggttcctacaacgtgcaggcagccgtgctgaaactgccgtcgatctgggtccagactcggaggacggcagcaagaggaggtcgctggccaccaccatgttctgtgtggcgaaacagggcgcggacgcgacggcgctgcaggcagggctcaactgggcgtgcgggcagggccgagcgaactgtgcgcccatccagcccggcgggccgtgctacaagcagaacgacctggaggcgctagcgtcctacgcctacaacgactactaccagaagaactttgctaccggcggctcctgcggcttcaacggcacagctacgaccaccaccagtgatcccaatcacaccgatatctccccggacaatatcctgaagccggatgttgaaagtctgacggccgatgaacaacagcaatacgaggactacatgcgtcaaccgtcaagcgagggagaaattcttatcacaatacacggtggatcgtcaccagaaagttgtcaaacatggagagaacgacttcccatctgttttatcttcgcttcaagtccccaacatcaacaacagaatcaaatgaaacaacagattggagggttagaagaattaattagaaaattaatgcgtacgttggagaagtctgttgatgaaactagtaacaggatatccatgtttaatacatcggcaacaaatggggattcacagccccagccattatatggtattgccgatgaactcatgtccagggcaaataccaccaccgccgtcgtccctctgaggaacatcgctacccctggcccttgtcagaccgtcggcgcagttatgaggacaaccagtgctttcagctgatggccttgctttttctcaggaagcttcatggcaggaggcggcacgccggctgcgagcgcccccagcggcctctccccgccgtcgtcgttcacgccgggcattgggagcccctccaacaccctgatccctctggacggcgccgagagcctggtgtccagcgtctggtcggcgatttgcgccccgctgctggcgttgccgctcttattcctctgaccaccagcggcggcagatgagtggccggtgcttgctagtagagcgcttattatgtttttttgttcttgttcctgggtagatcgctctcgtgtggcggtgttgatgtacatgtcagggtcgtgttggatgcgctgggatgggagattacataagatgctacagagatcgattcatacgtagaaagaggaccggactccaccgtgtttccgtgccggtttgacattgtcacatatccacaaggggcaagtataccggagttttctaaattttccggtgaaaatgggagaagcacacacgaacatataggccaattcctagcatacctaggcgaattggccgatgaggaagcatttcgtgttcgtttattttctttatcccttattggtaccgcttttgcatggtacgccaccctgcctcctaattccattaattcctggaatgatctagagagtaaatttcatgagcatttctttttcggggaatatgaattagggctagctgatttagcttcagtccgacagggacgcgaagaatcggttaacgattatatccggaggttccgggacactagaaactga

SEQ ID NO: 101290 - DNA, 828 bp, Zea mays
  unsure (1)..(828): unsure at all n locations
  Clone ID: MRT4577_23890C.1
ttgctgtcccttgccaagttgccatgacatacacgaatgcataaattttcaggaaagtgttggactctgttcatatttcttcccaaaagcatttcccaactttaatattagtagttaggactgacctgatgcagtggtgagagctgtcccactgagtcaataggtcgcgagttcgaagcagtctctctgcatttttggggggagtcttgtgttggttaatccattccaaggccccatttatgtggaagcctgttgttgtttggatcgtttggggtttgccatgggaagtcggagctgctggctgctttatagttatgcttggcaacgatgactcatggcagtgtgtgctcttccgcttcgcgttggtgggtttgcccttcgtgtgtccaatgttggctccacgttgggctttggtaccttcttgtacatatttctatttcatcttaattgagtgacagagctcctgccttttacttcaaaaaaaagaccccactcatgtggaagcctttggtactgaatctgtccttttttagttagataaaattctatcctatcatctgttttgtgtcagtgaattcacgtttttttgcatcatgccatttcacaaaaaattctgattgccaacaatttcttctgcaatgatcagttatttccttctgtaaccaggtcattgattgcaaatctgtcagcggcaaactgttacaaatctgagcatctaaagagaccagagaactgggcactagttgaaaggcaaaatacatctacattgctgggatttttctttacagtgtcgnctgattctatccagctagtcgctgagcatgctgc

SEQ ID NO: 101291 - DNA, 154 bp, Zea mays
  Clone ID: MRT4577_23891C.1
cacaacaaatcgttgcttcattgagcatttttaattaaacaaataaacatgtgaaatacaccatgggaagacatgaggatgatgcattgacgtccggttctcagaaatcaaatcacaccatgggaagacaaatagcggtacatttgctgaagtc

SEQ ID NO: 101292 - DNA, 349 bp, Zea mays
  unsure (1)..(349): unsure at all n locations
  Clone ID: MRT4577_23892C.1
tncctgctaaatcatatcggagcacacaagaaagaaatttatttcccaaattctatggcatactcttccnnaggaaccanttatctacatcaattgtctaccctttgttttgcggtatttttaaaagcccttctcaaatctttaatacactttaattaacccttatagagtgttacaaatgtagtttctccttaatgaagatattctttaagaagcttcaatttatggtaataatatacttgtcacttattagcttccaatttgtcatattttttttcagttgcattcatttttttttatacattttaaacttctcttttcttatttttatgattttcaacttcatttc

SEQ ID NO: 101293 - DNA, 292 bp, Zea mays
  Clone ID: MRT4577_23893C.1
ctctgcgccgccgctgaagaaagataaagaactggttggggcgtgagttgcgatatattgctgttctaggagattgtagagtgcgtatttgtggtattgatgattagtctgtgcggtttgacgtgaatgggaattgtataggcattgtttttttctaagttttttttttctgtcccttttgagggagtaaggaagagccggcgggctggagtactctgttgctttgcagctttttggttcaaaaaaaaaaaaaaaaaaaaaaaaaaaaaaaaaaaaaaaaaaaaagggggcg

SEQ ID NO: 101294 - DNA, 2552 bp, Zea mays
  Clone ID: MRT4577_23894C.1
atgtctcaggaaaagaaagttgtcaccgaagtgaagctgagcctttctgaggagaaaaatctgggcttcattgaatcaatagcaaaaacaaatacagagaaaattactagggaaattttggaaggcttatctgaagatactggtgaaagtgatagctatgacgcagacagcggaggtgaggattccgaagatcgacccatggcgaccaagccattcagtcttcggaaaatcaactattggacaaagtcaccttgaaaacatgaggggaagatattttcgagatatatccatcgtgagggcagatgtcggagaaaagactgtgccgactcccgaagataatgaagtcgtgatcttccgaagcttttttaaagctgggctacgattccctttaagcagcttcggtgctcgctctggatcaagttgtcccgtgccaacctttcggaagagatggcccggggaatggatgaaagaatggttctatgtaaaaaatgatttgaaggttcgagaagatattaaagatatcatcatgtgtcctatctggcagcgcttcggactccagaaaccgaaggtagaaatggatgaagtagccgaagagtgccaaagggccttcggcgtagtctgctcttttataggaacaagggatttaatacaagaacacattgtctttagagtatggccacttgcagataactgggaaatgccgaaagaaactgttagagaaactgacgaaggtggactagtcaggctgaagtacacattcaagtacggagacaagttcgttgagccagatgatgattggttaaagagcattgagactgtaagtgatgaattgcttggggtatattcaaaggccgaagatactgcattatcagcggccttcggaggccgaaagaagaaaagactcaaccgtgtatttgacgcaatcgggtttgtctaccccgactaccgctatccagcgcggggtcaaaaaagaaaaaacataacttctacaaaagaaactgcttcagccgctcctagcgagccagcaccgaagagaaaaaggataaaggttctcacacaccggccacgctatattgaaccagccacggtgcctgagttcgccggcgaaacctcttcggccaccgaagctaaagattcaactctgctaccagaaatcaaagagttggccgaagtaccagcaatagaaaagatggaagaaccaaggagtgaagaagcaaaaacatcagaagtttcagatgttctggagacaattaaatcttcaagcataactccaaagaaaactcttgaaacttctggagtgtctactgaagcctttgttgctgaagcttcaaagcaacagcctgaagctgaagctgaggctgggccttcagagcccaccaaggaacaacctttggaaaccgaagagaaagctacaaaggcagctttggaagccgaaaaaatgtcagagccaactctggttgaagaaattgacactgctgcccccgaagcatcttcctccatacgcgattacattgtgcgacatgcttcggggaagaaattatctgaagaagagatttatgaagctaatcactatgccagagaattaaaatatccgaagggggcacttagtgttcaatgggccagacgaagatgccttcctatactgcctccctgacaataaagaattatctgtctgccgggagatggctaggagtatggggtttccgaaacttgaagctggactctgcgctatgacgaaggatgatcttgcagatagtcttgcatataatagtctgaagggtttaatattgagcaacgcgctgagggcgcaaaagaatgctgaagacgagagctatgaaattgctttcaataatctacgatcagaagttattaagctgagaaacgaagccctagaaaaagataaaattctgcttacattggtggacaagataaaggaagacgaatctacatctaaggctcaagctgaagcccaaaaatgcgaaattaaagatcttcagaaacagctagccagagctaaagaagaacgtatacttgaagagacaaaacgagagcttagtgatcaatgggccaatcatttagaaataaatgttaaagagcttcgtgcatcccagagaagatgctatgataaatctatagtgtgtgttcagaagataaaatccagcttcgccaacgttggcgcattctctagcgaagagaatttctcaaggggcaatctcgaagctactttgtcctccgaagacattaaagacccctcagccgaagcaagcatgatcggcggaaaatttttcaccgatatctgggacaacggcggccgagaaatggcccaagaaattattcaaaagagcgaaaaaggcatccatgatgctagaaaagtagcagaggctgctgagaaaagtacagagcccgaagggcaaatagaacctgctgaagtatctccgggcccccactcgaagggggacgatgaaattagagaaatggccgaagccatcatggacaaggttgtcgaccagctactaaacgaagctgcagaaatagttcttatggaggattaa

SEQ ID NO: 101295 - DNA, 717 bp, Zea mays
  Clone ID: MRT4577_23895C.1
gccggcctggttgggaggataccgacatagacgatgatgctgcatccactcatattctaacctcctctccttgacaagtcactattcacctattcgcttgacgctcaacaatgcgccctcctgcaattacctgggtgcataggtcatctgttcccgtacgatgtgcatggccttccaaagctagcagatcatctactgctacatccggacgtcaccgttatacttctactctacgaccttccccaaccgtatcaagtacaactacgacatgttggacgacgactgccgctcattattcacaccctcatcatctaccccatgaatctaaaacatcttatcctcgctctacagcaaaaacaacgcaaaacgcccgacttcttcgctatactctctcatctcgcggtacgccaagatgaggatgatctcctactctgacgcggagaactccatgccgcccaatgacaccattgaagcaccaacctcgcacatgaagaggaccgagtgtgtcaagcaaaaccttgagtcgagcatcgtatacaagattgtgtatcttcaccctcaccatcactcgacttcctcatgaccatgaacaaaaccgacatttaagacctcaatatctgtaatggctgccccgagcgagatcaaggaaaaggctacaaagctgacttaaacagaagtggtcaaggatatcactggctattctcttcatggttttct

SEQ ID NO: 101296 - DNA, 413 bp, Zea mays
  unsure (1)..(413): unsure at all n locations
  Clone ID: MRT4577_23896C.1
ccccgacgaagggagcggacgacacagcaggcaagcnngcggaggcggagcacgcagccagggccanggccggcgcgcagcgccnccggcncggacnccncgcgcgggaggccgcggccggcgggcggcagagcgcgcacgccacgggcaacggcggcggggacgcgnccggcacaaagggcggcgcccgcgggcacggcaaccgggacagcacgggggacggcacgagcacggcggcgcagagcacggcgcgggacaacgacggcggggcgagcgggnccggcnacgagcggcggggcgacaacgacgggcggcggggcccgccgggaacgaacaccggcacgggcaccaagnncagcgcgcccaagaacggccnccccagcgacgacgggcggaggggcaaacggccgcgc

SEQ ID NO: 101297 - DNA, 266 bp, Zea mays
  Clone ID: MRT4577_23897C.1
ggcgtgggatttgagcggccgcccgttcacgtaccaattaaactttggtgtttatctattggatatatcacacccggacggattattttcatatgtatgttcatgcctttcatatcttaccattattgtaatcatagactgctgaagcacacataccaataacatctgctgcatatttcctgtaaatacaaaaccctttcaatattacatgtgaccacatttatgattgcactatattatggcttcttcaaactttcaaaggagac

SEQ ID NO: 101298 - DNA, 540 bp, Zea mays
  Clone ID: MRT4577_23898C.1
aaaaaaaaaaaataatgggggtaacgcccagttccccaaaaaacaaaaaaagggtttttaagccaaatttttgttggaaaaaaggaccccccctttgccccaaaaaaaaaaaaccaaacccccggccgggccctttaaagggggggcccgaaaaaaaacggaacccccccaaaaggggacccggtcggggaaaaaatgtaaaaaaaccttgggacccaaattaacggggaggggccgggcccgttaaaattgttgggggggaagctccctttaaaatgctttgcccccaaatggcaagcccctggggaggggggattttttttgggcccttggggttaccttgggggccccaaaaattgggggggggaggaaaaacttttttttggccttcccaaggggaaaaaggccccttgtacccgagggttctataaccaaaaattggggggcatcctcctggtgttcgaaggaaaacccatatactttttttgaccatcccaaaaaaaaaattccttttggggttgaaaaaccgggaccccccct

SEQ ID NO: 101299 - DNA, 472 bp, Zea mays
  Clone ID: MRT4577_23899C.1
aaaaaaaaaaattttttttttttcccggagggaaaattcccccaaacccccggggggaacctttgccttttccctacagggcccgaaaccaacacctttgggggggggggggccgttttttttggagaaaaacaaaaacccccccattcccctgggttttcctaagggggcccaatataaaaacccccgggatttttttggccccgctgggaaaaggccttaatgtgaattttctttggccccaaaaaaccaaaaaaaacccttcccaggagccccggtttcaaaaaaagggacttaaacatgtttttgttggtggggaaaacagggtccttataagtttccttgcccaggaagccaacagttggggcaacctttaaccccggggggggaaaaattatggagttttttttaagggcagggcctggtaaaacaagaacctcccaaaaatttttggaaagttttttaatcggcc

SEQ ID NO: 101300 - DNA, 1355 bp, Zea mays
  Clone ID: MRT4577_2389C.1
cctcgaggccccggccgggaaaaaaaaaaaaaaaaaaaaaaaaaaaaaacttgatcttatgaatgggcctgagagagaacgtggatcttcagaaatatcgcctctacttgagtaggttgcaaaagcagaacgaagaaaggataatgggtgcggcaggcaagatttcaatcaaaaggggccatcagataatcttaacctccgaagttccttccaagagcagccaggaaaccttaccaatggatttcagcatagttctcagaaggtccaatctcagaccaacattctcgatcctcatctggacgacacgaagacttcagtgcccttgaaagtgccagataaaaatggaacttcagcaagtgatgctgctgaccatcagaacatcaccggtgtttcacctttaggtggggttgttctcttttgaaagaatgccagtgaaccaggacagatagatggaggatcatcacatggacaggaggatatccaaggaggccggcgaggaaacgaagctgaccaggagcttccgctacgaggactacagcaccaggcgagtcttcctgcgcagctacccgctgcagtgggactggtcgccctcgcgggacgacgacgacgacgacaagcaggacggccaggatgccgccgacggcgacgagtgctgcggcagcaggcggtggaagagcaagatggtggcggccgtcacggagtggggggaggacaagctgctgctgctccgcagggccaagaagcgcctcgcgctctacctcatcggctgccaccaccacggccgccgcgcgctgcccttcccgtcagcttcacccgccgggtcatgcaccgtcgccatgatgctcgcctccagatgatcgatagatatccaccaccgtacgtgcacgcacggcgtgcgtgcatccatcggtcgcgcacccactcgtcttcctctctcttttgatctacatacgtgctcttgtgaaaatgcactgtactctagcaattaactatgcactctaatgatgatcatgtagagtttaccagtgaaaccgtggagttcccattgttagacggaggcctgtttgcataaatgcctcatctggccctatttttcaaccatgcccttatgtcagcagggatgatgttcattggtatgttcccctatagcgcctcctgtagggctatatttaacctaacttgatcctgtggtggaaggatttaatttgtagtctcgccccttttgataattgtttgtattatagactgtgccatggcccaatgactgcaatatatactcttcccggtgttccaaaaaaaaaaaaaaaaaaaaaaaaaaaaaaaaaaaaaaaaaaaaaaaaaaaaaaaaaaaaaaa

SEQ ID NO: 101301 - DNA, 254 bp, Zea mays
  Clone ID: MRT4577_238C.1
gcacccttgaatggatataaaatttgggtagttattgtgggcttgcttttaatatcagagatcatttggcaaaagaattgcccaacttcagtttttcattgttctttgggtgtgaatatgcgccatatttcatggtagaggagaaagagttgtgccaaactatagccaaatactcagagcatatccttctgtacgaagcaccaataaatctgaaagaaatccatggtagttatccatgagtagaaaataagaaa

SEQ ID NO: 101302 - DNA, 240 bp, Zea mays
  Clone ID: MRT4577_23900C.1
aggaaagggaacacaggtcattttttattgattcggatgggtcccgaaagcccagagaaatcaagaaaaattagacttgggggctcccccgggcttaaatgaacaaaagctttcatggggatcaaacctttattcggggatgcaaaaatatttttgggtccaacccttccacaattcataccctgtgagcctttttagatctttgagggaggaaacaggtccccctggacgtaatctttt

SEQ ID NO: 101303 - DNA, 1548 bp, Zea mays
  Clone ID: MRT4577_23901C.1
gggattttgttaaacttgcgctattaactgctagtttcctacctattgagcattgtgtcatctttatgtttgaagcgtgaaaggtcgccgttgactaaatttgtttgtgtgtttcttcaagtcctttgctgaaacttagtggatcctaaaaactacacttttaccactgcaaagtgggaggcatcgtgagtgtactgaagggcaatgcactgcttcttagactattgaagaatttacaggatgatgtgcaggagcaggcagctactatgcaattttctatttattgtacacttgccacgaactgctcgtaattctctttcagtttgttgcagagcgtgggcagtaaatgcaaagaaaaaacacagttgcagaaattgctagcaatagactatacaagatagagccaaattgagcaaaaaaaggccattcccatttggatcaccattccctaaccacaacagaatgaaggtggaaaattgagtagttgagtgtcgtgtatgcacatgagcaggtagtcatgttcccttatttcatatcctttggaactactcatattatatgaaagcaaacctgaaactgaagtcagaaatctattgtatttttcttttagcatttattatgactatctatatttatcacgcatgggctaatactttataagaaatgtgctggttcttgatactcctccaagcggttgtaaaagaattctggtttggctgaagtagttttacatctgaaagatggactttttacagatatattctctgtcaacaatatatatatccagacagagatgaacttggagggaagcagatttacagtttggtgatattatatattatcaatcgcagtttattaatgttgcgcttcttctctattatcaaactattcacacaagacttcatgtgtgcgtgtgtgaaagattttattagtgtaaggtctttaggtacagttcacattgaagttctggtgcctacataaattgtaaaccatacatgttgacatgggtacacatctcatggctatatacaactttgacatgaggtttatcttaagatccgtggtgtaaataagcctattttctagcaatttctgcaagtcggcccatcgtgttgaactaaaattctctaatttcctacagcttcaactcaaacaacaggatggccccacacacttaatgaaaacatctttaatttctagcaaattcgacttcgaggacaataaaggcaccacagtggtcttcttaagaagaataggacccgtgtacataagcttttttgctctaacaaaataagagtggttgttgcaacaatggcattcagaatgagtcttgataagagtgacgttgaatgggtggtccattgtatctccccagaaagcgtagaagaatacatacagtgtatatcccatgcagtttccccccccctcccatttctttttttttttcaagacaccttacaaggctctttttaggaacctggtcgtgttgattcaccaccattcaatagtcaaatgttttttgcccaaatgatatcttatcttcttgtc

SEQ ID NO: 101304 - DNA, 763 bp, Zea mays
  Clone ID: MRT4577_23902C.1
gccgtttgcgacgccgtcgtggcccgcctgccctacctgcagcgcgtcgtgaaggagacgctccgcgtgcacccgccgggtccgctgctctcgtgggcgcgcctggccgtgcgcgacgcggtggtcggcggccacgtggtccccgcgggcaccacggccatggtcaacatgtgggccatcgcgcacgaccccgcggtgtggccggagccctccgcgttccggcccgagcggttcgaggaggaggacgtgagcgtgctgggcggcgacctccgcctcgcgcccttcggcgccggccggcgcgtgtgccccggcaagacgctggcgctcgccaccgtccacctctggctcgcgcagctgctgcaccgcttccggtgggcgccggccgacggccgcggcttcgacctggcggagcgcctcggcatgtccctggagatggagaagcccctcgtgtgcaagcccacgccgaggtggtgaatggcgattgctagagcgaaagcgcaactacgctacgcatggcgcgccatcgagttccatgcaaaactatattattatactactattactagcgtttcatattttgcacttgtggttttgtctacgttaattaccgttcgcgatcgatggaactgagtgaagtgtgcacagcatactccattgctagaaagaggacgagatatgtgaaaacgcctgatggctgatggcaaattatatggagagcatgtttcagtattaaaaaaaaaaaaaagggcggccggacgcgggg

SEQ ID NO: 101305 - DNA, 2340 bp, Zea mays
  Clone ID: MRT4577_23903C.1
cccacgcgtccggaagtgtcggccacatcccacatgtgaactgcccactaccgcagtgcggcagccgcgcgccccacgcctcgacctatgcagtacgtagtaggcatcaagcgtcctgtgtggctgcatccaagtccaagcgccgtccagccaccagcacaggtaccgagccaccaaggtaggagccggccacggggcagatcccaggctgccagccaccggcgtccagcactccggctgccagctaccggccacccgcagcgcaggccacactgacgggcagcagccgcacgacgctatggctgccgacgaacaccagcagccagacggccagaccccagagtccaacccaaggatggtttcaggctactgaagggcaatgcactgcttcttagactattgaagaatttacaggaggatgtgcaggcagctactgtgtaattttctatttattgtactcttaccacgaactgctcggaattctcttttagtttgttgcagagcgtgggcagtaaatgcaaagaaaaaacacagttgcagaaattgctagcaatagactatacaagatagaagtcaaattgagcaaaaaaaaaagaccattcccatttggatcaccattccctaaccacggcaaaatgaaggtggaaaattgagtagttgagtgtcgtgtatgcacatgagcaggtagtcatgttcccttacttcatatcctttggatctactcatatattatatgaaagcaaacctgaaactgaagtcagaaatctattgtatttttcttttagcatttattatgactatctgtatttatcacgcatggggctaatactgtataagaaatgtgctggttcttgatactcctccaaccggttgtagaagaattctggtttggctgaagtagttttacatccgaaagatggactttgtacagatatattctctgtcaacaatatgtatatccaggcggagatgaacttggagggaaggagatgtacagtttggtgatattatatattatcaatcgcagtttattaatgttgcgcttcttctctattatcaaactattcacacaagacttcatgtgtgcgtgtgtgaaagatttattagtgtaaggtctttaggtacagttcacattgaagttctggtgcctacataaattgtaaaccatacatgttgacatgggtacacatctcatggctatatacaactttgacatgaggtttatcttaagatccgtggtgtaaataaggtatgaacatttccactcattagattgtgtgttccaataaaagctgttactatttcttgcatgtgcatgtctttaggatatacatttttctttatagatttatttatatacatcgcttactgcttactagcctattttctagcaatttctgcaagtcggcccatcatgttgaactaaaattctctaatttcctacagcttcaactccaacaacaggtacgtttaattaccacatccacccttccccctgttttatttgtagcccattgattcttatctatattgacttatttccttgctacatttctatgcatatactccatggtaacattatacattcattttctattcatgttacattgacaaatacatagatagtacatgcagtttttgatgattatatctacgtacatacatgtactttcatcgtaatatgtaaggtatattcaagttactgagatgatgaatactcacattgactttatataatgacaaatcaaaatccacatttggttcccataaatgtacatgtcttcaagatatacatttttatttccatatttgtttacagagattactaacaccttcatagcctattttctaactgattctgtaggatggccccacacacttaatgaaaacatctctaatttctagcaaattcgacttcgaggacaataaaggtaccacagtggacttcttaagaagaataggaaccgtgtacacaagcttttttgctctaacaaaataagagtggttgttgcaacaatggcattcagaatgggtcttgataagagtgacgttgaatgggtatgaccatttgagtagcatacaaagttcaaatgtgacagcctatagctttaagcaatgttacactgcttatcacctggactgattcaagcatttgctcttttaaaggtggttcattgtatcttgccagaaagcgtagaagaatacatacatgtatattccatgcagattcccccccaccctcccattttcttctcttttctagacatcttactatgctctttctaggaaactggccgtgttgattcaacaacactcaataaaagtcgaagtcctttgcac

SEQ ID NO: 101306 - DNA, 263 bp, Zea mays
  unsure (1)..(263): unsure at all n locations
  Clone ID: MRT4577_23904C.1
aattgatatcctgccaagtattcttcgagaggtccattagaattgcaacgtagagcacggatctcccttgcangtttttccnatgtgtgcangatntgtggattcgatactgatgcttggtacgtagaggacctctgtttccccccgcttcgcggatccacagctcatgcacaccttgggaaaatagagagcagagatccgtgctctccggtggcatgcgagttgatatccggcacagtatgcttcgcgaggtccattcagga

SEQ ID NO: 101307 - DNA, 246 bp, Zea mays
  Clone ID: MRT4577_23905C.1
tcagagtcggggggcgagcacagccaccctcgacagctttggcagggtagcgaagacccaagaacatacactggacagtaactcttaccactagctcgaagactagtatagggatcctctaggcaggccggcggagacaccggatccagaccggtcgcctcgtggcgcgcaggggagcctctgctcctggaggacttcgtttgagggctcaacgaggacagccgatgttgggtcgaggacctacta

SEQ ID NO: 101308 - DNA, 1155 bp, Zea mays
  Clone ID: MRT4577_23906C.1
ctttggaagatggggattttagagaagatatcagatattgaagcagaaatttcaagaactcaaaagaacaaagcaacagaacatcatttagggttactcaaagcgaagttagcaaagttcagagcacaacttctcgagccaagcaaaactcccggccaaaaaggagatggctttgaagtttcaaagagtggagacggtagaatagcactcattggttttccatcagtaggaaagagtacaattctcacagagttaacagacactgagagcgctcaagcagcatacgagtttaccacattaacttgtattccgggtgtcattcaatacaatggcgcgaaaattcaacttttagatatgccaggtatcattgaaggagcagcacaaggaaaaggacgaggaaagcaagttgttgctgcagctcgaactgcagatttgatattaatgatgttagatgcaacaaaaggtgaaactcaaaaacgacttttagaaaatgaacttcactctgttggtcttcgtttaaataaacaacctcccaatatttcgctcaaagtgaaaagtggaggaggtttatcgttcaatagcacaatacctctcactcatatggacgagaagttagttcgaggtattttacatgaatataaaattcataatgctcaagttcttttccgtgaagatgccactgttgatgatttcattgatgttattgaagcacgtaatcgatcgtatcttccttgtttatacgtttataataaaattgatcaaatcacaatcgaagaagttgattctcttgcccgtttaccccatagcgtcgttataagttgtaatttacatcttaatctcgactacttgttagagaaaatatgggaatatctcagccttgttcgagtttatactaaacgacgaggagagcaaccaatgttcgaaggagcgttaattatgagaaaaggagcgctagtacttgatatatgtagagcgattcatcgcgattgggaacatcaatttaaatatgctcttgtttggggtcgatcagcaaaacattcacctcaacgtgttggcctaaatcacgagttattggatgaagatgttattcaacttgttaaaaaataactttcgcctttcaattttgaatatttatataaacattgtatgatcatc

SEQ ID NO: 101309 - DNA, 413 bp, Zea mays
  Clone ID: MRT4577_23907C.1
cacacacacactcagcatagctttatttctactccagctccaatcacaatcggggcgagaccacgagagctgggtagggcgaccatgaaaatgccgatcaataatgatcgccctgagcagccaccatgaggtgtaccacccgctcgcccttaaggcttctttcgttgaattcatctccaccctcatcttcttcttcgccggccagggctccgacatggccttcagcaagctgaccggcggcggcccgactaccccgtcagacctgatcgcggctgcggtggctcacgcgttcgcgctgttcgtggcgttgtcggtgttcactaacatctctttcggtcacgtgaacccgtccgtgaccttctgcgcctttctgggcggtaacatcaccctgttccgggtgctcctgtactggg

SEQ ID NO: 101310 - DNA, 557 bp, Zea mays
  Clone ID: MRT4577_23908C.1
aaaaaaaaaaaaaaaaaaaaaaaaaaaaaaaaaaaaaaaaaaaaaaaaaaaaaaaaaaaaaaaagcttgaacaagctttttttttttttttttttttggtttgcccggggtgtcctttttttgttccttttttgccccgcggggggcccccccgggtcctttcttttcccccccctcaagccttccgttggggcgcttcttgggccgcgcctcgggtcccctccggcctttttttggggggccccctgcccggggggcccttttatgggcccttggccggccctggggggggcttttttgggggctcccccctcggtcccaggttggtcctaggtggggcccgggcgggtccctttctgggttttttttgccccctcgttgccccccgggttccttgccggtcccccccggggtccccccggggggccccccggggggttattggggaggctttgggggcccctttggcggcccgctctcctttggggccccctgcctttccggcccgtttaacgagggggccccggcgcgtggaggggcggttgggattcgggccc

SEQ ID NO: 101311 - DNA, 122 bp, Zea mays
  Clone ID: MRT4577_23909C.1
cgctgacggtaatgcgcggtattcttgaacgtggattggatgccactggaagggcggatctctgaggaatatgacgcagccgctggtgctgcctggggtgatgacgagttggatattgctga

SEQ ID NO: 101312 - DNA, 1185 bp, Zea mays
  Clone ID: MRT4577_2390C.1
cctcgaagccggccggagaatgagcagattctccgcgccgcgtggcacgaggcggctgcgcccgctatcccctcgcggataagccggccccgctccggcgagatcccttaaactgccgtgcaccgcgcaccacagatcccccacgccacagcttgcgcccgcaatggcactcgtctccgcctcctcgtcctccaccaccgccgtcacggcgctccccaggaatgggcagcgggcgtcgtcctccttcctcggcggcaagacgctgctgagacaggccgaggcggcccggccgtcgttcgccgtgcgcgccgcggcggaccccaacaggccgatctggttccccggcagcacccctccgccgtggctcgacggcagccttcccggcgacttcggctttgatccctggggcctcggatctgacccggagagcctgcggtggaacgtgcaggcggagctggtgcactgccggtgggcgatgctcggcgcggcgggcatcttcatcccggagtttctgaccaagatcggcgtcctcaacacacccttctggtacaccgccggcgagcagcagtacttcaccgacaccaccaccctcttcatcatcgagctcatcctcatcggctgggccgagggccgccgctgggctgacatcatcaagcccggaagcgtcaacaccgaccccatcttccccagcaacaagctcaccggcaccgacgtcgggtaccctggtggcctctggtttgacccgctcggctggggcagcggctcgccggagaagatcaaggagctgcgcaccaaggagatcaagaacggacgcctcgccatgctcgccgtcatgggcgcctggttccaggccgagtacaccggcaccggccccatcgacaacctcttcgcccacctcgccgaccctggccacgccaccatcttccaggccttcacccccaaatgaggagttgaacttattattagcattttgaggagtgctaccacacatgcatcgtcaggttgatggccgatatatatgaaacttcacattttttttggtggggaaggactgctgagtagactgtcaatgatggaatgctcgtggtgcgagtgcgatgcatggtgtacttgtactatgttgtaaccagtgtaaaaaggggatactcgttagatgtcaaaaaaaaaaaaaaaaaagcggccgcc

SEQ ID NO: 101313 - DNA, 432 bp, Zea mays
  unsure (1)..(432): unsure at all n locations
  Clone ID: MRT4577_23910C.1
cgctgcaatcagcccccgcggcgagcttgccctgcccctgnttgctagttctcgccgttacgtaaggcttcttggccttgcgtcctccgtctttcgttgctgatacatcgaggtattaaagaagctgcctggttccgggcagcaaaggtcgccgccgcctgcagaaatgggcgactttttctggcttacgggggtggggtttctatttcttacctttaactcaggcatggggatttattggtccaacggggacgccggcttcgtcgcttttgtcgtgggattttattttgacctggtgggcctgtttgcctggttgcgctactacgagcaggtggattagtagaacttctaaaagagcgcgagggtgaagggtggggtttggagnnttataaanatntttactatcatgtttagttataaggagggtgagat

SEQ ID NO: 101314 - DNA, 366 bp, Zea mays
  Clone ID: MRT4577_23911C.1
actacattttagaagaactgtgacccgggccgccacccctacgcaacctctatattcttctctaggcctcctctccactctttcccccccgccggcgccacactaacctagattgtaggccatcattcaaactcggttgctcctacctgtcctgcacagcacatgagcagagcccaagaccgacggcaaaaagggagcggccatgaaatacctgctgatgaccggaggtcttgtcagcggcctcagcaacggcataacagccatcagcatctgcgttacactcaaggcctgcagcctccgcgtcaccaccatcaagatcgatccatacctgaacactgacgctcaaaccatgtatccattcgagca

SEQ ID NO: 101315 - DNA, 359 bp, Zea mays
  Clone ID: MRT4577_23912C.1
gggacggcctggcaaaattcacttaattgggtttttttccaacggaaaagtttgttctttttttcccagtaaaattttcaaacgggtgatggggtctttaaaccaaatcacttttgctagcaattcgggaaaaatttgttttgtttcgctttgtttccaagggggcataattaaacctttccaaattcaggaaaaggccacatttttggggttccaccttttttttggtgagaaaaaaggcccacccccgatgttttttgattgctgacattccactaaatttcgttttactggcctttgaaaaaaaaattttgtcggatctatatttttatttttgggggcttgatttaaccttttcg

SEQ ID NO: 101316 - DNA, 271 bp, Zea mays
  Clone ID: MRT4577_23913C.1
ctgtggtatccacgcaccacgggttgcatgtcttcaggaccaatactgaaccaatgaagagggttgggtttccaacaacaaatgtgaatgaacactcactttacaccagactgttatgaaatcccaacactacacgagccagacagacatataccactgctcaggcgatggatagccctgcagcacaaatgatggagaacagctatacacggctagacaacaccagggctgtgatatcatgcagggacatggctgctgcctcaagcctaat

SEQ ID NO: 101317 - DNA, 328 bp, Zea mays
  Clone ID: MRT4577_23914C.1
tgggtccctcgagggcggccggggaatcactgcatcctatcgcagaaactaagctatcacttctcaggcgatgaaacacgagaccgacctgcgatagaagagagggtcctcacaacctccatccactgctgcaacgaccccgtcggctatgtagtccatctccggggagaaggatccggcatacttccgtcgtgtgccggattcgagtgcgccaggatcttctgctccgaacctcgcatctgagcatcctctcgtgcgcattctattgcctaattctcgagctcctccaattccttgctcattgcagtccgcccagcattgccactca

SEQ ID NO: 101318 - DNA, 375 bp, Zea mays
  Clone ID: MRT4577_23915C.1
ctgctcgtcatggacatcttctcgtatcacctcgatgatcgttacgcccaaaaccgtgaatgcctactacatctgtatgcactatccactgcagtacgtatcacatctggacgtgctaattatagacctctaaaacttgaactgcatgaccattatacgtactcagccgatgatatcatgagtgaagcacacatagatcttcagcctatgatcacatgctccatctcctttggagatacttcacgtcttgattacatgcatattggaaggtgtttcatgaccaaatacaactccctgattaaagatagcactgtaaatgttgcgacaaataaggtaaaacatgatgtgcacttaaagctacataacgtttaatca

SEQ ID NO: 101319 - DNA, 230 bp, Zea mays
  Clone ID: MRT4577_23916C.1
gacacgcttacgcccacgcatttttgatcctatgtttcccataaaaaaatgccagacactcacgtatatcatgatgtcaacgtctcctaatagaattacactacacgagttgcagcatgcccccaattcaaaaatgctcgttccaaatctagggattcgggcgcaaaaccggcgcaagagccaatatcttctctagttgtaggcaaatgtccacaggcttcagacataca

SEQ ID NO: 101320 - DNA, 816 bp, Zea mays
  unsure (1)..(816): unsure at all n locations
  Clone ID: MRT4577_23917C.1
ctcgnccgggttaattgagtacctgaggaatgataccgtttcggaggaagctgctggtgctctggctctgctgatgaagcagcctagcatcgtgcaccttgttggtagctctgaaacagtgatcactagccttgttgggttaatgaggcgtgggactccaaagggcaaggagaacgcagtgtcagctttgtatgagatatgccggagaggtggatcgacattggcacagcgcgtggcaaggatacccgggttgaacacggtaatgcagaacatcacgctcactggaacgaagcgtgccaagaagaaggcaagcctgatcgtcaagatgtgccagagaagccaaatgccatcggcgctggcgctaggaagtaccttggcagtggtggatcattcgttggtagggaacagcagattgaggcgcgctccaagctttggcagcggggagttgtcaaaccctgtgtcaatttcagtgcctgtgccttagatggagaaagaacaaaaaaaaaatccatttttgagagcccacataattgtcaccacattcagtgagttttgtccctgaaattctttcattgcgtcctcaaatgaaggtatacagatttaatccaaagaatgaaatatatcagatgtgctcgtttgtatgtggctgtgaataactgtgcagatatataggtttacaggtagaattctggcttgacgtttccttggcaagcctggaaatcatttatttatttttgttcagtttcggaaacaccgaatatgtatgcgacttgctgtaaactgttctcataatttagtactcgccccatttcactt

SEQ ID NO: 101321 - DNA, 347 bp, Zea mays
  Clone ID: MRT4577_23918C.1
agggcgcgtggggcgggatataatttgaaacagaactgaaattgctattacggtaatgtaagggcgctgaatatgtgacaagtcattttgtgcactactgggtaatattggtcgttggaatggtatctatgctttgatctgaacatgaccaggttttctcatgatgttagtgggcgtaggatatttatagctaatgaatggacaagaatattgggatgacaggaaatggatgcttctgtacgtgaagagcgcttcgtatggatagagggctattagtaagcgtgctatgagagggatgcaaagattgtgaatgcatgagtaagagatgtcgaacgctaggattatac

SEQ ID NO: 101322 - DNA, 1167 bp, Zea mays
  Clone ID: MRT4577_23919C.1
cattgggtacctcgaggccggccgggggataagcccccgcgccggtgcctacacagtacacactgaccacgtcagtttcgccatggctacctcctccaccaccgcgctccactcgcagttccggccaccgctgcgcgctccccgccatctccgtccgcttccacactcgtattcctcctcctcccgcactcgcggctgcgctcctgtccgggcctcagcggcgtccgcatccgcgccggcccagcgggagatcgccgcgggcgtcccgtggggctgcgagatcgagtccctggagagcgcggcatcgttggagcggtggctcatagactcgggcctaccggagcaacgcttggccatccaacgcgtggacatcggcgagcgcggcctcgtcgccctcaagaacatacgcaagggggagaagctgctcttcgtgcccccttccctcgtcatcaccgccgattcagagtggggtcgccctgaggtgggagatgtgatgaaaaggaactccgtgccggactggccgcttatcgctacttacctcataagtgaagccagtttagagggctcgtcgaggtggatcagctacatagcagcgttgccgaggcagccttactcgcttttatactggactcgtgcagagctagatgcatacttagtggcctcaccaatcaggaaacgtgcaattcagaggataactgatgtgattgggacatacaacgaccttcgagaccgtatattttccaggcatccagatttgttccctgaagaggtgtataacatagagacatttctatggtcctttgggattctgttctcacgcctggttcgcttgccatcaatggatggaagggttgcactagttccttgggcagatatgcttaatcatagccccgaggtggaaacattcttggatttcgataagtcatcgcgaggaatagttttcaccactgaccgctcatatcaaccaggtatttatatcttatgggaagaaatccagtggtgagctattgctttcatatggttttgttccaaaagagggaacaaatccaaatgattcagttgaactgttggtgtctcttgataagtctgataattgctataaagagaaattacaagcactgaagcgaaatggtttgtcagaatctgaaagtttccctttgcgggtca

SEQ ID NO: 101323 - DNA, 323 bp, Zea mays
  Clone ID: MRT4577_2391C.1
aaaaattgcagcttatagtagagtagaagttaatcctccgtctccttttccaactcgtttatttggaacaatcactaaactgtttggatgcaattgtgttatacattctgatagtcgtaactacatatgttcaaacgagcagcttatttcatacgaggttggcgaaagagtggaatttagtgtaattagacaagataacgcttttagagcggatagaattatatcatgtcaacgttcaaataatgacttgaataaactagacaaatgtaatgttttaaaatataatccatgttcgtatgacagagtgattcaacgtggattca

SEQ ID NO: 101324 - DNA, 398 bp, Zea mays
  Clone ID: MRT4577_23920C.1
cagaggtccaaaaggccacaggagtgccctggaggtccggagggccttaggaccttgtcctctggcgtggaggctataagaggccggaagagcccaggaggtccggagggccttaggaccttgtcccctggcctggagggccttgggaacatgcggttggcatcaaccgggcactcgttgagttttgttttgctgatgggatcttcggaaggcgtcttgtgagtatcatcttcggaaggcgtattgtcagtacctagacgtatgacttttcccagatgccgataatattgtatcatgaaaggattctggctggacataatatatgttcccagtttacgtttttcttccacaatttctgatgtaacatactgtacagagtgatattatagagcaatagc

SEQ ID NO: 101325 - DNA, 518 bp, Zea mays
  Clone ID: MRT4577_23921C.1
tggcttggaacctttgggctgatttatgtgcttgtcatgctgagtttgaggattgtaagggtgctcctcggcataataagaagcctcagttgttgttgtctgtagagtcgaggatgtcattgcaggaacgggagtagaaattaggaggaggagatggcatctgttttaaagctcttgctaattcactcaactgccagctgctagctccccagatgggaagagagactacccgggtatagagatgaaggtccatcgtagcgttactgtcagagtcgttactaagcataagcaggtaaacctgctaatccagcgcgctttacgccgccccctccagctgcttgtcgtcgcaggtcccttggtggtggctgcccgcgcggccggtacttgcggttacgttcgcgtgcgtgcggttgtgtccgctgcgcgtgctcgctgctgtgccggtgctgctctcctgcgtcttttgcgcgccgccgcaaaataggaagacgcccctcggcgctcccggtggaacaata

SEQ ID NO: 101326 - DNA, 446 bp, Zea mays
  Clone ID: MRT4577_23922C.1
cctcgaggccggccgcgatccgttcacaacctacgtcctaaaggcatctgcttcagccttcaggtacccccaagtgtaccccagcgatccgatcactgatatactaatggactaccgccaacagttgtaccctcgagaaggtggaggcagtgtatccgctcagcctgatccgcgccgacgagatggagtgccacacgctcgccgcccaacgccgcctccctggtcgacgcccccaacgcactccaagctgggcgacaaggagcattggctgcggctcggaactcaacttcacctccaacatgacattcactttcatgaataacacgctctagctcctggacacgtgcaagagctacagccaaaagacgctcatcaaccgcaggaggatcagccccgccatcaaaacggcgaccagaacttcaaagtgtagcccacaaccgcaaccc

SEQ ID NO: 101327 - DNA, 257 bp, Zea mays
  Clone ID: MRT4577_23923C.1
gggggaaaaagcaaagggggcaaaaccctttaggggcgcaaacaaaaggctttcttgggaaaaaaaaaaaaacccccccttgcccccaaaatttttacccgaaaaatttccaagaaaaggggctcccaaaatacttacaaccctttgggcaacctaaaggggccatattttttgaccccccaaaacttaggccttaaaaaatcccccccccccttactcaaaagccccctgagtttccccgggaattctctttttct

SEQ ID NO: 101328 - DNA, 477 bp, Zea mays
  Clone ID: MRT4577_23924C.1
accaaagaccgactatgcaaacatgagcctgatcaaaaaacacgccatggacgctggatcgagcctatgtgctcaagggtcaacccgacagtatcaagcatgcacaacaaggaggggcctttattgatcatagaaggaacgcgcaagttggcttctaggcctgcttgcacccaacatccagatatatatgcttcacctgaaatcttacctataataagttaggcctacttgccatgctagaaagctattgacccctcagatgctgataaaccatcaatatgaatgggcttcactttaacaacgacggcctggactacgtaaattgagacgttagtgctttgatcaccctggacactgagaccattccaagttctggaccctgaaccactgagccataagaacagaactgtttgtcgcaatctgtgacgatcaatatgtagctggactcctaatagaatccctgaacggctgtgatga

SEQ ID NO: 101329 - DNA, 301 bp, Zea mays
  Clone ID: MRT4577_23925C.1
taaacttttctagtgaagcgcacaagcatcaaccgatcagctttgtttaccaagatattagccctccttacgctacttgctctattagtgagcgcaacaaatgcgttcataattccacagagcttacttgctcctagtgccattattccacagctcctcccaccagttacttcaatgggctttgaacattcagccgtgcaagcctacaggttacaacttagcgcttgcggtcagcgttttacaacaaccaattgcccaattgcaacaacaatccttggcacatctaaacctacaaaccatt

SEQ ID NO: 101330 - DNA, 241 bp, Zea mays
  unsure (1)..(241): unsure at all n locations
  Clone ID: MRT4577_23926C.1
tgagaactttgtgtgtttcagtttttaatcattttaaaatcttgtaagatggcaccactcaatgggtggtgctggttgctnttttgggtggtnggtattcgttcaaagcttgtttggctttaatggtnngcaattgttggggggtttgtatggggcaatcatttgtttgccacatttctgtggtgtttgtntgggttgctattgttgcttgtttgcttgtaggcttttaatgttttcccac

SEQ ID NO: 101331 - DNA, 755 bp, Zea mays
  unsure (1)..(755): unsure at all n locations
  Clone ID: MRT4577_23927C.1
gtggtacgcctgcaggatccggtccggaattcccgggtcgacccacgcgtccgcattactatgcgctgctactttaaggtttcctgcttaaagggctttcctgatgagttgagggtacaggctaatgggaagatgaaagattcctttggttggggatccaggagctgtagtctcagatctgacttaagaggctcgagagtgtctgtaaaattctgatccattcgagtgaagtggcgttgcattttgaaccgcgcgactgtctcccaatttcagcctgagctccctgggacccatagtcatcacattaagtcaaaggaaaggcgcagcaaagacttcttgaataaacgaccgagtaaggtccagtggaaattgtccaaatgcctctgaaacccgctgtacgctggatttgagccaaaagtagaagtggtcagctgcagacagttcagcagtcaaaaatctggtagtgcaacttcagccccctggaaggcaggatttgccagcgttcctaaggtgtcctgtttgcaagagtctccttggtttgcaaccttaatcttgcatcccttagtccacaccacagccaagtggccacccacagagggctcaacctggacatggccgagaaacggcacggagcctggttcggctntggtttctgtggcttcgggcaagcgctgggttctgggaacagccaccattcattgtacagtcctgaaccactgcatgccagtgatgatatctgccaagtgagcgcaggc

SEQ ID NO: 101332 - DNA, 656 bp, Zea mays
  Clone ID: MRT4577_23928C.1
cattgggtacctcgaggccggccgggaatcggaggaagggacacctgactgctcctgcgaaccctacgaccgacgcatccgcaggcatgactatccacctctctgccgtggcgaggaacaagaacaccacagcgcacagcgcccaacccctaccatgtttatctcaagctccttgctcagctctaccgctgcttgcccacgagaaccacgaccaacttacatgctggcattctcaataggctcttcatgaccaaaaccaatcgcccaccagatctccatgctgccgccttgatcaagttcatggaaggagacgagaacaacattgctgtgattgttggcacactcacagatgacaagaggatccaagaggttccagcaatgaacgctactgccctgacgttcaccgagacggcaaggaacagtatcgacaatgctgatgcggagagcctcacatatgaccagcttgatctccgtgctccacttgcttagaacacagccctcgtgaggggacccaataatgtccgagaagcgcaggagaacttcatcaaagctcctgagaagccccacagacacaacgagccatatgcgctctccgagagaagtaactcctagaatgctcgagtcaagaggaacatccgaggaaacccggtgaaaga

SEQ ID NO: 101333 - DNA, 956 bp, Zea mays
  Clone ID: MRT4577_23929C.1
attcaactgggggtgcacacacccttatttctcgtctcgtgtgtgtacatggtacctcgaggccggccgggccggggagcaactcaagcttctcggccagtttcagcgacgtattcagtctagtctgtagacgttaagagcaagatgagcagcagcagggttcttcttgtcagtgctgttctggtggcgctcgtcaccctgagctcatgcaggagcctgggagagttgtctgagcagaagacctactcctctgctcccagctatggtggctccccaactcctacgtacggatcaggagaaggccacgagccaacgccaacaccatctcatcatggcacaacaccgacaccatcttacggcacaacaccaagtacacctgctcatggggtccctgaaattcccaagcatggatttgttggatcctgcgactactggaagagccacccagacatgatcattgcagttgttgggtcccttggcaacattggcaagacctttggtgctgcctgcagtctgctcgtcggcaagaagcttgagaatctgcatgaagcactctcgaacaccagaactgatggcgttggtgccctgctacgtgagggctcagctgctttcctgaattccattgtcaacaagaagttcccctttaccacgcagcaggtgaaggactgcattgctgtgtccgtgacctctgacgatgctgcttctgcccaggcagggatcttcaagaaggcaaatgaataccactactaggacatggatatctccgtactatactgtttctcacaattcataccacctttcatttcttccccttttggttttctcgtgtaacatcacctctaagctatgttgatcttgtattttgttggattgtcatgtattatcatgtctaatatatatattgatgaatttaaaaaaaaaaaaaaaaaaaaactaaaaaaaaactcgagaagggg

SEQ ID NO: 101334 - DNA, 216 bp, Zea mays
  Clone ID: MRT4577_2392C.1
gagcgctccatgtcggcggccgcccttctttttttttttttgttattttttaacttaatttcgctttgggaccaaagataaaggggttcaaattttgccgaaccatgaaaggaggggcagtaggaaataaaaaggaatgagccgagatctgaaccatctggtcaaacctatcaaaaagtgaaccgaatgcacaaaacaccagtagggctggaggca

SEQ ID NO: 101335 - DNA, 261 bp, Zea mays
  Clone ID: MRT4577_23930C.1
agcacgaatacccctacgcgggacacatttaagaaaatcaggggctggacctctgccatgaattggatgaggggaaaacgaaactcctcctttcaggcattgggcaaacgtgggctgaaatggggctcgacatggatcagcgccgccactagtggccgaccgaatgccataggtggagcgccaggcacaacaacataagggggggcgtagattggggtccacccaacgccatactgcttcccaagacccacggcccataga

SEQ ID NO: 101336 - DNA, 1073 bp, Zea mays
  Clone ID: MRT4577_23931C.1
ggtaccgggccctcccctcggatttttttttttttttttttttttttttttttttttttttttgatccaaaagattataatttgaatgtataaaacatttataagttttaaaatacattttagcttaagtgacaatcctcaataaggaagctaaagataagttatacttatataagaaggccgagcccaccggcgcttagcaccatccacaacagaacaaacttataacctgggataaacactatgttagtgttgttaattgacgaccacttgatgaggatcttccattctggtgcttgaccagatcatccaagcttcaggttcattcatcatcttcacattgggatcaactcaactcttgtcctccgcatcacgtgatcaattaacgaaccacaacatagtttgactcgataatcgcacgaacgatgacgttctttgaatgaaatcttcgactaaacacctggctagcgatgcacacgggcctcgcttcacaccatcaaaccccaggattcctctccaacgatagacgaagcagcaagaatggcgtggaagcggtgagctgggcgctggagagcacacacgctagcgcagggagccgagtccagcgagcacagggagccgcggacgagggagctagagaccgagctgggggtgggcgcgacgtagagggagctcggcgcggtggcttggatagagctggagcttgggcgtggaggtagcagaggggcacgacaggcagcgccaacggcgagcgcgcaggggaacgacaccctagccgagcagtggtggatgctgggcgagctgagacggtggccggcgtcgcagctgaaaggaggccgatcacaggagaacgaagggagcagaggatggctggacgaccaagtataaagaaaaggcacggactgctcccaggcgtgcggcatagaagacaccagagcaccggagaaaaggagtaccaggcgcagtgggataaggccgatggccaacggccgtggcgggatgaggctgaagaagataggaacggtgaaaaatatccacaaggagaaaggaacggagcccggccggcctcgagg

SEQ ID NO: 101337 - DNA, 411 bp, Zea mays
  Clone ID: MRT4577_23932C.1
ggacagccggagccaagcgccctacaagtccagcagcttctcgccggcgacaacccgcgacgagggcggcggcaggacccgggaggtcgaccgcaacttctccctcggcgcgctccgcgacaagagggacctcccgtacggcggctccagagagcagtccatcagggaggaggacgagcaagagggaggtggtgaccatggggccgcgcgaggaggcggcgagggtccgggctcggtgggagggggatgcggcgagccggacctcgccgcgttgtcggcggaggtggacgcgttcctcgcgggccaggacgagggcacgccggtgagcgtcacggaagcgacgctggacaagttcgcgtccgccgtcgagctgctggtcgccaggtccgagggcgccgaagagaagtgggc

SEQ ID NO: 101338 - DNA, 856 bp, Zea mays
  unsure (1)..(856): unsure at all n locations
  Clone ID: MRT4577_23933C.1
ataaatcattcactcatcaaacgcgacgcacagagacagagggagagggtccgctgtacttgcatccttccctgcccccttcccctcctcccctccaagtccagaaatccgttcccctctccccctctcgtctgcacccgagacgctcctctagatcagttccccctcggtgcggttacctctcgccggaagccaagccaccatggtgtcgccggacgctatccgcaccgtcatcggcgtcataggcaatggaaccgccttggtgctcttcctatccccagtgccgacgttcatcagtatctggaaaaagaagacggtggagcagtactcggcggtgccgtacctggcgacgctgctgaactgcatgatgtgggtgctctacgggctcccgctggtgcacccgcacagcatgctcgtcatcaccatcaacggcaccggcatgctcatcgagctcacctacatcgcgctcttcctcaccttctccgtcggcgccgcccgccgccgagtcctcctcctgctggtcgccgaggtcgccttcgtcgcgggggtcgccgcgctcgtcctctccctcgcccacacccacgaccgcaggtccatggtcgtcggcatcctctgcgtcctcttcggcaccggcatgtacgccgcgccgctctccgtcatgaaaatggtgatccagaccaagagcgtggagtacatgcccctgttcttgtccgtggcctcgctcgtcaatggcatctgctggactgcctacgccctcatcaggtcgacctctacatcaccatccccaacgggctgggcgtgatgttcgctgtggggcagatcatcctgtacggcatctactacnagtcgacgcagc

SEQ ID NO: 101339 - DNA, 478 bp, Zea mays
  Clone ID: MRT4577_23934C.1
gcagcagcaggtagcagccaccagtccaccaccaccccactccgccagtgcgccgcgcagtgagctgctgcctgctgtctgactgtcaccgctgccgccgccacgcccacgcctcatcaagcgaggcaatggcgtcgcggctcctgccgttggtcgcggcgctgctcctcctcctcctcctgacggcggcgtcgtccgaggcgacgctgcacccggtggactacctggcgctgcaggcggtgcggcgggcgctgtcggacctgccgggctcccgcttcttcgcgtcgtgggacttcacgggcgacccctgctcgttcgcgggcgtgtcgtgcacggccgacggcgcccgcgtggagacgctggcgctgggggacccgcgcgcgggcgcgccgggccttcgggggcgcgttcccgtccgcgggcgtcgccaggctgccgcgctgacgtcgctgtccctcgtgccggggcgcgtcacggg

SEQ ID NO: 101340 - DNA, 264 bp, Zea mays
  Clone ID: MRT4577_23935C.1
catagcacagctgcacaggagcggacgagcccaggcgccaagaaagcaccgccggtcccgggggcggtccgtcaatatggtggcggcgatcgcggaggcgtctgtggcgctcggtatgctggcggatgtggccatggtcaacaggtcgttgcgcgtcgactgcaccgtgcagtgaatgcccgggggcccgtcgctgagttcatgtcctatgtctttttctagactagtcaccactcaatttacactcttaaaccttgcctgaaa

SEQ ID NO: 101341 - DNA, 295 bp, Zea mays
  unsure (1)..(295): unsure at all n locations
  Clone ID: MRT4577_23936C.1
ggcaggtccatgccttcccaccggacaccncgggaaccggagcccattttaggggttctgcaacacccaanaccgccncaccatattacgctgactcaataacgtactcaacggacccaacggaagcgacacctacattacccgctccgcccaactgcccaacaagtgcggcgtctccctcgcactacaagatcaaaaccaacctttactgcaacaccattaaataaataaggcgttcttcacgcataccgtacaagaaatgcatgcatggcgctggcggggagcaataaaataa

SEQ ID NO: 101342 - DNA, 235 bp, Zea mays
  Clone ID: MRT4577_23937C.1
gaaagaggcggaacccaaaaaaaaaaaggggggagaaacatataacttctgcaccaacgcatttttcctctactgctaaaaaaaagggggctgaacaccccaaaaaactaatgctcaccatgaacgagatgtttatgatcattaaaacccccctttaggatgaaaaaaaaaaccaatctgcaaatattgtacttatctataagacctaaataataagaagaagccttcggtgtag

SEQ ID NO: 101343 - DNA, 3492 bp, Zea mays
  Clone ID: MRT4577_23938C.1
atggtcatcaactgcagcgtggcaggctgggacctgcacaaagtcctagttgacaacggcagccagacagatatcattttcctccacgccttcgaccacatgggcatcagccacaactttcttaaaccttcgaacaacccactatatggcttcggcggcaagggcacctttcccgtgggcaaaatagagttacccctctccttcggtgtagcacccaatacacaaagtgagcaagtcactttcgacatcgtcgacatggtgtacctgtacaacgccataatgggtcggggctccatcaacaagtttgaggcagccattcacggactttacctgtgcatgaaaatcctaggtccgcaaggcgcgatcacagtctatggcaaccagcaggccatgcgcaacatagaaagagacttcgttccagggcaaaggaacgtacactgcctcacgacgcagcgcgaggtcctcgaggctaccaccccaaccgccaaagagcatgaaaaggcacaactgcagagcaatgatgggatcaagacagttccccttgaccaggcaacacccaagcaaacggacgtcttcgcctggtccgccctcgacctagtcggagtcagtcacaccatcatcgagcatagcttgggcatcgacccttcggtgaggccgaagaagcagaggctacgcaagatgtctgacgagaagacagaagccgccaaggccgaggtacaccgcctgcttgaggccaacttcatcgagctagtcgcctaccctacatggctcgctaacgtagtcatggtgcaaaagaagagcaacaagtggcggatgtgcatcgatttcaccagcctcaacaaggcctgccccaaggataacttcccactgcctcggatcgacaagatcgttgatagtgcggccgggtgcgaagtcatgtcactccttgattgcttctccggctatcaccaaatatacatgaaggaggaagacaaggccaacactagtttcataacacccttcggcacgtattgcttcatcagaatgccggagggactcaagaacgctgggtccacattctctcgcctcaccaaaacagtgctcgagagccaagtcggtgggaacgtatttatatatgtggacgacatcgtcgtcaccagcaaaagcaaagaggaccatctagctgacctcgtagaaacattcgcgaacatgcgggacgcacgacttcgcctaaaccccgaaaagtgtgtcttcggtgttcgccaggggaagatactgggctacctggtgtcgcaccgcgggatcgaagccaacccgaccaagatccaggctatcatcaacatgacacccccgcagtcagccagagacgtacaacgactgacaggcagattggccgccctcaaccgattcatttccaagtccacagagctaagcctacctttcctcaaaacgctacgcgacgcaaaggactttgcatggggaccagagcaagcggtggccttcgcatctctaaagcagcacctgtcagagctggcaactcttacaagccccaatccctcgctacccctgttgctctacatcgcagcttcgccacacgcggtcagcgcagcgctggtccaagagcaggacagggagggcacaacaaggcagtgtccagtttattacatctccgaaatactcacgacatccaaatgcaacatgacggaactggaaaaaattgcctacgcagtagttatggcttcgcgcaagttgtgccactacttcgaagcgttcaaggtgcgggtcacctctgacaggggactcggcggactattcagaaatctggaggcgactgtccggatcgccaaatgggcagccgagctcttcggctaccacatcaccttcgaacccaggacagctatcaagtcacaagtcctggcagatttcatcgtcgactggacaggaccaacaacgcagccggacacgtctgcagagaagctaagggcacttggtgtcactacttgcataatcagaacagactccaaagtggttgccggccaagtcgagaaagattacgcagcaaagggccccgcactcatgcagtatctcgcggctgtccgcggtctcgagagacaattcaagggctttaccttgcagcacgtggaccgtgccaagaatgaggaggccgacgcattggccaaggcagccgccagaggcgaggccctgctctccgacgtattctaccatgtcatcggcacgccagccgtccgcagcccagaaggcctccaaataaccaacgacatcgagggccaccgcatagtcaacctcattatgaccgaacactggcgggcaccaataaccctgttcctgcagggatactaccatccaaacgatatcaatgaggccaagcgcctcaaacaccgaagccgggacttcacactcattgagggacagctctacaagaagggggtcagtcaacccatgcttaaatgcgtcaccgcgaccgaaggcgtccagatcctgcgcaaagtccacagcggaacttgcggctctcacgcagggcctagggccctcgccgccaaggtgatccgtcaaggcttctactggcctgctttgatatgcgccgcgaatcgggtgacgaggtcctgcgaagcctgccagaaattttcttcacgctcgagaaacccttcgcaattcacaaagctaatcgcccacacgtggcctcttcagcgctggggcctggacattgtcgggccgctaaccacggcccaagggaacctcaagttcaccttcgtcgccatcgagtatttcaccaagtggatcgaggcaagagcagtatccacgataacgtcaaagactgcccagaaattcttctggcaaaacattgtttgccggttcggagtcccgtccgagctcacagttgacaatggcaaacaatttgacagccaagacttcagggacttctgcttctccattggcaccaagcttgccttcgcctcagtataccacccacaatccaacggtgtcgtggaaggtgccaatggcaagattttcacggcgatcaagaaaatgctcctcgacgacaagaagggtaaatgggccgacctgcaacctgaagcagtctgggcactgaacacgaccgagtgccgggcgaccggattcactccttttcgcctgctatacggatcggaggccatgaccccgcaggaaatcaaacatgggtccccacggacaagtgcttcagccgtccccgacgtagatgaaccaacttccaaggatctcatcgacggagaccgtgtcttcgccctacaggccctcaacaaataccaagctcaaacaaaagcatggcgtgaccacacagtcgtcccgagagaattcaacgaaggggacctcgtactcgtccggacaactcggatagagtcacagggcaagctggagccaaagtgggagggtcccttcatcgtcaagacaaaggtgtcccccagcgcgtacaggctaacaacgtcatccggcgaagacttagagcattcctag

SEQ ID NO: 101344 - DNA, 520 bp, Zea mays
  Clone ID: MRT4577_23939C.1
ctatgcacgtcctgcacgcgtactaacttggatccttaacggcgcctttttttttttttttggataatccctatattttgtgcaccagccattattacagccacctggaccctcagctgcgtcattcaaaaaaaatctgtcccaacaactctcacccgcaggcagggagcaccacccaaaccttactcctgccctgtggctactcacaaccttgaacactccatgctacaaccgcccttacagagtatccaaaacctgcgtacccaacatctgctaccgcacgatccaccgtgccgtgagggatcccaatggccgcctaaccactgctccaattatgcaaatacccttacagggaccaaagggcgggttgaaactgatcatgacctggacttctgcagcaagccctaccccctggaaggggacaagacctgctgtcaattctgcactattctccttaaagagaacatttctgtgcacaaaaccagccatggtaggcctgccctacgagctccaccatctt

SEQ ID NO: 101345 - DNA, 1335 bp, Zea mays
  Clone ID: MRT4577_2393C.1
cattgggtacctcgaggccggccgggaagctccacgctcccgacgccacagcttgtgcgcacgcaatggcactcgtgtccgcctcctcgtcctccaccaccgccgtcgcggcgctccccaggaatgggcagcagcgggcgtcgtcgtcgttgttctcctcctcctcctcttcctccttcctcgtcggcaagacgctgctgaggcaggccgaggcagcccggccgtcgttcgccgtgcgcgccgcggcggattccgacaggccgatctggttccccggcagcacccctccaccgtggctcgacggcagccttcccggcgacttcggctttgatccctggggcctcggatctgacccggagagcctgcggtggaacgtgcaggcggagctggtgcactgccggtgggcgatgctcggcgcggcgggcatcttcatcccggagttcctgaccaagatcggcgtcctcaacacgccctcctggtacaccgccggcgagcagcagtacttcaccgacaccaccaccctcttcatcatcgagctctgatgaacttagcagttcgaggagtgctaccacacatgcatgcattgttaggtttgatggccgatatggaacttcattttttttgttgcgggcggactactgggtagactgtcaatgatgatgatgatgaaatgttcgtggtgcgatgcatggtgtacttgtactatgttgtaactaatgtaaaaatgcgatggtcgttagatgctatgtcctcttaagtagggcgggcctacatgcaagtaagggtatttaattgaatacttattatctttgacaaaaaaaattatgtatacatgtatatgttactagtcaaaaaataataaattaaaggcctctatatatatcatataaataatgtcgggtaccttgaatcaggggtaccccgtaaggagatcaagaagggacgcctccccatgctccccgtcatgggcgcctggttccaggccgagtacacgggcacgggccccatcgacaaccttttggcccccctcgccgaccctggccacgcccccattttccaggccttcccccccaaatgaggagttgaccttattattagcattttgaggagtgctcccacacatgcatcgtcaggttgatggccgatatatatgaaacttcccttttttttggtgggcacccccccctgagtagcctgtcaatgatggaatgctcgtggtgcgagtgcgatgcatggtgtacttgtactatgttgtacccagtgtaaaaaggggacactcgttagatgttatcccaaaaaaaaaaaaaaaaaaaaaaaaaaaaaaaaaaaaaccac

SEQ ID NO: 101346 - DNA, 585 bp, Zea mays
  Clone ID: MRT4577_23940C.1
gcgttctgtggcggcaggctaagaaactggtgacgacggcgcttctcagcgccagaaagtgcagtgctaccgcgccgcccgcgaggaggaggtgggcgcagtgatcgccaagatccacggtgctgccggggcacatgcggctgtggacatgagcgagctcctgagctccttcaccaacgacatggtgtggggtgcagtggctgggcggtcgttccgggcggacgacggccggaacaaggtgttccgggatgccggcacggccgttgtagggggcttcaacccggagaacttgtaccctcggctggcaaaagtagccggcggcgtgctcacatggccggcacgccggagggcggagaggctgaggtcccagtgggacaaggtcttcgacgccctgatcgacgagcacgcgagagagatggccggcggcgctggtggtggagatctagaggagactgacttcatacacgtgctcctgtccgtacaggaagagtatgggctcaccagaaacagcatcaagggtatcctggctgacatgtttacagcgggcactgatacttcatatgcggccctagagttcgccatggc

SEQ ID NO: 101347 - DNA, 275 bp, Zea mays
  unsure (1)..(275): unsure at all n locations
  Clone ID: MRT4577_23941C.1
cgttgccatcgagaacccgcaggacatcatcgtccagtccgcccgcccctatggccagcgtgctgtcctcaagtttcgctcagttacactgggcgctcatgcccattcgctggggaggcacacccctggttacctttcactaaaccaggctcccagnacctcctttcagncgagcntcgggctggctncatccctttaccggaccccaaaggnactngacccattcaggcccaatttaaagggaagtnctggcttcttggggggaaacaattccc

SEQ ID NO: 101348 - DNA, 440 bp, Zea mays
  Clone ID: MRT4577_23942C.1
aaaaaaaaaaaataccagactatttcggttccacatttcaacgatacactcctgaggtttaccaacctgcacaaataatcccaaactcagcaccatctttacccacctcattaaaaggtataccacactaacttaccctcttgtaatataggcaagaaacgctccatcagcacgagtcaagtggctagaacatgccatgagtgccacgcaatcacactgacttgaagcacacttagtctagcaaggccttaccctgaaagggcttccggatctcaactcttgtattgacacgctccttgaaggcctcttcatacatgatcacttttttccactcgaatagacttcatgtgatacacctcttacattacaaacttgggaacatgctggccacggaaaaaccaaacgcccttcaccttgaagggtggctcatatcctatcac

SEQ ID NO: 101349 - DNA, 674 bp, Zea mays
  Clone ID: MRT4577_23943C.1
ccaactgagacattagacatatggtacttttccctctggcgtaactccgctgctatataacctgtcaccgttaattccaataccgtcctccggcacgctgttctaacagcgagaagagatgataaggaagggtaatgggacgcaaatcggcatcgatctcatcaagacgtactattgcttctgcgagtggcactaccatcgtcatgagattatcgctaacgagccaggagacaccgcacacacacacctttgacgggaggcttcacacgactctcaagcgcttcattgagagatgactggcaactaaccaagcacgtcactgaaccgctattaacagctgactttgatgccaagtcgtatcattggcagtgaggaactagtgatgtactgtgagcagattgatattagagctgtggaccttcaaggaaattgcagggcccgacgagaagccaatgatagatgttcagcacaagggggaggagaaacagtctgcacctcgaagagatctactctatgggtctaatcaagatgcgtgagatagctgaagcttaccttgacagcacgatcaagagtgatggtgtcacggcccctgtctatttcaactactcgcagaggcaggccacaaaggatgcatgggtgattgctggcctcaatgtgctgcgtatcatcaatga

SEQ ID NO: 101350 - DNA, 378 bp, Zea mays
  Clone ID: MRT4577_23944C.1
ttcccggtcgacccctcgtcctaaaaaaaaaaaaaaaaataaaaaaaaaaatttaataaaaaaaaaaaaaaaaaaaaaaaaaagaaggaataaaaaaaaaaaaaaaaaaaaaaaaaaaaaaaaaacccctacctacttaacaattccttccttccatacccatccatccaacttcaatcccctttattattcccccctatatccaatccccttccctcccttaaacaaccttcctatctcaaaaccccttcctttccccaacttaacctccttttcatcccaaccccttttttccacctaccatttaaccataaacccccccacctacctcccttccaacctctttctcatcccgaatcctcaatttaaccccccttt

SEQ ID NO: 101351 - DNA, 469 bp, Zea mays
  Clone ID: MRT4577_23945C.1
ggccagtgagatggaaatctccaaaattcgcccttaagcagtggtaacaacgcagagtacgcggggggcggccaacgatgatgaactgactgttggacaccgattgggcagcggacacaacgctaggacgagcgctaagcgggggttggatgctatagacgtgcgattgatgtctttctcattctgtgttttagtcgataaaggtcgtgacctaagatgatgggctagatcttgtgggttagtcgatggtatgatgtggtggacccggtgtttatctaatttagtctcatataccttatattttttattttatagtatatacaaaaggtaggtataaagagttccaaaaattgaggtggggccatggcccactttgcccacattgtggatccgcccctgacttctggtattgtgcccaaaaaaaaaaaaaaaaaaaaaaaaaaaagccctctccgttgttaccactgct

SEQ ID NO: 101352 - DNA, 169 bp, Zea mays
  unsure (1)..(169): unsure at all n locations
  Clone ID: MRT4577_23946C.1
ntttcttttttttttttttttttttttttttttnggaaaggaagctagttcttgtattgctttgaatagacaggaaaaaaacttataaatttggaccaattaaattttggtttccgaaaaggcaatggggttaaccaacattggtgttgacccacggacctgggcacaa

SEQ ID NO: 101353 - DNA, 309 bp, Zea mays
  Clone ID: MRT4577_23947C.1
cgacgctaaataggggtattgccttaaaaaaaatatctgggcctttcggaagtcccaagccgggggattgaagggggtcaaaatcaaaaatgaaccccccaaggaatcctttacccccaaccttttgagtaggagttgccccggggtccaaatgtttccctacaggaacgcctttataaaaccccgccggaaccgagggggagatcctcctttttgaaatgcctccaaccaataagtccatcaaaattacaacgggctcaaaaaggaaccctggaaaccattcccccatggggcttcacaactccaaaa

SEQ ID NO: 101354 - DNA, 174 bp, Zea mays
  Clone ID: MRT4577_23948C.1
gcgtccgtgaagcccggcgcctgtgtcgtgtgagggtgcgtctgagctcgccacaaaatacctgtcagtccgtcacccgcaagccacaaatgcagcctggttgctacagggaatgctggagaatgtctgaccttgccgggaagcgcaacctgggcagtggtcggatctgccacc

SEQ ID NO: 101355 - DNA, 312 bp, Zea mays
  unsure (1)..(312): unsure at all n locations
  Clone ID: MRT4577_23949C.1
actgtcgaacggtaacgcaggtgtcctaaggcgagctcacggaggacagaaacctcccgtggagcagaagggcaaaagctcgcttgatcttgattttcagtacgaatacagaccgtgaaagcggggcctcacgatcttctgacttttggntttaagcacgaggtgtcagaaaantaccacagggataactggttgtggcggcaaagcgttanagcgacgtcgctttttgatccttcgatgtcggtcttccnatcttgtgaagcagaattcaccaagcgtngnttgttcaccnactaatagggacgtgactgg

SEQ ID NO: 101356 - DNA, 598 bp, Zea mays
  Clone ID: MRT4577_2394C.1
ggccctgaaaaaacccactggtgaccctaatctaccccccatttaattaatcctataaaaaatcatgctacgggtactgacacaatcaaagtagggcgctttgtacagggaccaaaacaaggaacctaggagggggggggattcattaacaggggggggggccctaatcccctgccggtctgcacgggcaaaaatttaatcaaaccccggggtcagtaaagggggaggacgcgtaacggtccgtcattaaccccaaatcccacaacaggccaagataatcaatcgaatcttcaagcatttaaccaaccaaaccttgggatcgaggggggggggggggccccccaatccaccgatcgatcgtcgtccaaccgtccaggggaaggtttaagtacttccaaaggtccgggaggttaaagaccgggtcgtcaaactcgggcaggaactggggcaacaacaacggggtcaccgccgacaaaatctccgggttgggggtcggccctcaacccggtctcgggggacgggttgacctccaacgccgccgtttgccccaacaccacctggtgttccgccttgaagtacctccggatcgccgggggaa

SEQ ID NO: 101357 - DNA, 1043 bp, Zea mays
  Clone ID: MRT4577_23950C.1
ccgggctcgagtttttttttttttttttttttgatcggaattttaaggttaaataaataacaagaaatcttagttccactcgaccaacagcatgcaagcgccaaattaaatgaactggcgatgatccggcttcactaccggcacgggattcagactccggcagttctatataaacacgccagggagattacaaatatatatgggtagatcgcagggtggcatgcagcgatgcttgtatctggaaacagccatcttatctttatatacctgcatccctgctgctgacttaattgttcaggcctccattattcctgcggaggccttcttgagatcctcgtacatctcctctatcatcggcttccacagccgaacgcgggcgttgatgaaccagttggagacctggctcctgctcagtccgctcctggctgctaacatctccttctccttgtctctcgggtacgggcggaggaagttctcgaacatccaggctttgagcacggccacggacttctccggcaggccgcgctgcgggcgccacgattgctggtcgccgcgcctgagctgccgcagcgcccagtgcttctggatgaaggccgactcccagctgcgctccctgtcggccagcgacagcgacgacgacgacgacggctgattacctccccgcgtggccgccgcgatctcgccggtgatccgcgccctgagcctccggtgcgtcgctgacaccgcgcgctgcgcaaacagcgtcgagagggcgccgccgccgccgcccgggcgcacaaggctgccgtacttcgacgccgcattctggatctcgtccaggcattgcttgcaccgttggtccattatctgtagcagtttctggaagtcgttcttgagctcattgtggtgctcttccgagctaacaaacaccgacgggttcgggttggatgacgtcgtcttggagcaataacttgacgatggcagcgggcagctcgcctcaccgccgccggcgaacccggccacgtcttgcagcaggcggatgacgaactcgtccaacacctgct

SEQ ID NO: 101358 - DNA, 186 bp, Zea mays
  Clone ID: MRT4577_23951C.1
tgttctagcccacgcaacacactcgaggaggccttctaatgcaaaggcgaggctctccataaacagctgggccaccatatacttactgccaatgatcaaaccaccctactattcctggcaacccacggactttcttccttactcctcatccaagatgatatacctcgaagttcgagagctgctcac

SEQ ID NO: 101359 - DNA, 425 bp, Zea mays
  unsure (1)..(425): unsure at all n locations
  Clone ID: MRT4577_23952C.1
cggggacaaaccctattgtttccccccgatccattttagccgccgccgcgcgtgtcgatggggagcagcaaggatgccggctggccacgggctgcgctcgcggacgcgcgacctgttcgcgcgccccttccgcaagaagggctacatcccgttcaccacctacctgcgtacctacaagatcggcgactacgtcgacgtcaaggtgaacggggccgtggacaaggggatgccgaacaagttgtaccacggtcgtaccggtcgtgtttggaacgtaaccaatcgcgccattgttgtttagataaacaagcaggtgaatggttatataatgaggaagcgtatccatgtccgnttggagcatgcacaggcatccggccgcccacaagacccatgactgaggaaggtgaataatgaccaggagaaggcag

SEQ ID NO: 101360 - DNA, 338 bp, Zea mays
  Clone ID: MRT4577_23953C.1
gttatatgtgcggccacgatggcaattgaccaggcggacttcagcagcgagacagctggccagctttctaaggatgcgagatgaggcagaccagggcgttccccagggcactaggcgaggagcggaacaggacgtcacggggggggatgacagtgtgcataaaggtggatagtccattgtggacagggcggccattgatgtcctgggaatgctcctgtgatatatcacgaaaagagagttgtcctcatcacgagttgggcgcattgtagaacaccttgcccccagtataacatgttgcattatggactgagcacatgcacactgccactctagagcac

SEQ ID NO: 101361 - DNA, 831 bp, Zea mays
  Clone ID: MRT4577_23954C.1
ggtaccctcgggtttggccgggaagtctagtggttctcttagagattctgaagtaatgcttgaccagctcagtttgcttgggaagaagatcacaatttctcttgtgcatgaacttgtaggatcagtgtctgatgacgagttgattgagttgcttgatctagcattgtcatctgacacaaccaatactgtaagacgagcccgagaacttatggggtcagcaattgatcctctgcagcttgtttctcagctggccaaccttattatggacattctctcaggacgatgtcaatctgctgtcagtgaagtcagcaaaagtttcttgggtagatatgcattatcagaggttggaataaagaaattaagacatgcactgaagatactatcagaaactgaaaaacaattgaggacatcaaggaatcaggctacttgggttacagttgcgcttttgcagtttggcaccaatgaacctaaccttattgctgaaccgaatgatatgcattcacattcagtaactggatatacagatgactgggtttccaaggtgcactcaaacaccaatttttgtcaggcatgtaacagcagcaagtccaactgttctgagagacactgtagacggcttaagcttgagaacatatggaggagagccattggaaagtgtcgatcaagatcagccaaaagtttcctcaggaaagaaggcttcttatcatcggttcatgttaccgaagagctggctatagcagaagttggcttcggacacccagatcacctatcaagagcagagaaaatgcaaagcctaatagagtgctctttacagcacgttcttgggtgcat

SEQ ID NO: 101362 - DNA, 604 bp, Zea mays
  Clone ID: MRT4577_23955C.1
ccctcgaacgacaacgacgcaggagacctgcatgtcatttcatttaagaagaaaaagatacacacccaaggggtggaaagaagcccccctcaacacatcaccaaaaggatacaaacgcgccacgcactaaacctaaaagaaacgaccacacagggctgctcaggcttccagccttggcttcctgccgagcagctcatggacggccgtgtttccggccatacaccatagctcactcttcctctgctacttcctgacaaaccaatgaaacactaggactaagaccctaaacaacgcacgcgttcctatgtttccaaattgtccaagcaacaagaatgacgagagaattaaatccttttcgcttctactttggcactttgttgactgcacttccccaccatcaagcaaaatttctctcagtttgcggggcagtggccatgcagcccaacataacataggattttggtccaagtctcccaggagaagacacaagacactagaatgtgttgagctgactcatcttcctggtcacaaaggaggcagacactaggatgtgccagcccatgtttcagcaagcgatccaccatccaaactatatgtgttctta

SEQ ID NO: 101363 - DNA, 269 bp, Zea mays
  Clone ID: MRT4577_23956C.1
gggcatacaagtcatagttttttatttaaaataatttatgtgtcatgtatgggccatgaatttttgacacaattcctaatccaacaaaaaaactgactcaaaacccaaaaaaattcccccctaacaaaaaaaccgactgggcaaagtcagacatgagccgtgtttaaagactaaccacccgaccttgatctgaaccaaagcaatccaatccaacgtttgaacaagcctagatccaaccctgggaattgggcttggttttactaccccct

SEQ ID NO: 101364 - DNA, 396 bp, Zea mays
  Clone ID: MRT4577_23957C.1
cccacagcgtgcgtggactcgtgggcggacttgtgttctgaccggctgccacgactacatcagttccggtctcgcgcggcggtcgccggagcgagcagagctggcgcaaggcccgttggatccgccggcgccaagattaatgacgccgatgtagccaaacagatccagcagatggtgcggctcatccgccatgaggccgacaagaaggccaacgagaactccgtcttcggctacgaggaatacaacattgagaagctgcagcttgttgaagctgagaaaacgacgattagaccagactatgaacgcagagagaagcacgttgaaatacggaagaaaaatgagcactctatgcagatgaatgcttctcgcataaaaagtcttcaagctcacgatgat

SEQ ID NO: 101365 - DNA, 610 bp, Zea mays
  Clone ID: MRT4577_23958C.1
aaacacataaaagggcagaaaatcccaacaattttttcagaaaaaacaaaaaaaggtgcacacagaccctccaggcgcaggtaccattggcttactagcaggaggtgtactactgctgccgaagacgtgaggtgagcggtctcgggcgggttcgtgcgatacggtgactatttctcatcatcacgtcatccgaggagaataatcgagtgaggtccgagacggtgcgtacgcgggcggacgtcaaatcagcaatcaacttagcatgtgccactcacgtgcgcggctcttctcttctctgagatagagctgagcaccaggcggagcgtacggtagtttatagtcaatacaccctagacacctggcgcgagagtaccacggagttgcaggatagagcttcttctccagttctaactgagctgactgattgggcgcgcatccacgttctttcgtgactgactgcgtgtcttatgtatgtctgtgattgtgtagggtcataatacttggatagcgtacgtacgaagcacgcactcagctcctggacaaattacgagaataagctcgagacctgggtgatgcttcttcttaatactgtcaaaccccctgactaggg

SEQ ID NO: 101366 - DNA, 225 bp, Zea mays
  Clone ID: MRT4577_23959C.1
gggtgatggtcccgagtgcgggcgttgcggtggtatcgaggggctcccgcctcgccgcttggctgagatcaggcgcttcttcgaggactgcgagaagaatgagagcgaggcggctgctgtgaatgactttctgccggcgagcgccgcttgtgaagccgtgcggcgctctgtgggcctgtgtgctgcgtgcgtcgttgagggcctgaggaggtaggattctgatgg

SEQ ID NO: 101367 - DNA, 1986 bp, Zea mays
  Clone ID: MRT4577_2395C.1
gataatccggggcactccggcgcgcgcgcgggacgagatcccttaaactgccgggcatcacccaccagcccaccgccaccacacagctcccacgctcaccgacgccacagcttgtgcgcgcgcaatggcactcgtgtccgcctcctcgtcctccaccaccgccgtcgcggcgctccccaggaatgggcagcagcgggcgtcgtcgtcgttgttctcctcctcctcctcttcctccttcctcgtcggcaagacgctgctgaggcaggccgaggcagcccggccgtcgttcgccgtgcgcgccgcggcggattccgacaggccgatctggttccccggcagcacccctccgccgtggctcgacggcagccttcccggcgacttcggctttgatccctggggcctcggatctgacccggagagcctgcggtggaacgtgcaggcggagctggtgcactgccggtgggcgatgctcggcgcggcgggtatcttcatcccggagttcctgaccaagatcggcgtcctcaacacgcccttctggtacaccgccggcgagcagcagtacttcaccgacaccaccaccctcttcatcatcgagctcatcctcatcggctgggccgagggccgccgttgggctgacatcatcaagcccggaagcgtcaacaccgatcccatcttccccagcaacaagctcaccggcaccgacgtcgggtaccctggtggcctgtggtttgacccgctcggctggggctccggctcgccggagaagatcaaggagctgcgcaccaaggagatcaagaacggacgcctcgccatgctcgccgtcatgggcgcttggttccaggccgagtacaccggcaccggccccatcgacaacctcttcgcccacctcgccgaccctggccacgccaccatcttccaggtcacctgaatcaattcgtcacagcttttgtgcgatcgacgctctcggttactgatttgagattcttgttattgtgttcttgatccaggccttcacccccaaatgaggagctctgatgaacttggcagttcgaggagtgctaccacacatgcatgcattgttaggtttgatggccgatatggaactttttctttttgttgggggcggactactgggtagactgtcaacgatgatgatgatgatgatgaaatgttcgtggtgcgatgcatggtgtacttgtactatgttgtaactaatgtaaaaatgcgatggtcgttagatgctatgtcctcttaattaaggcggacctacatgcaagtaaggatgcaaataagggtattcagtatttaattgaatactcattattttttgcaaaaaaatatgtatacatgtatatgttactagccagttgttcatactttgctaccattgttatatatcatataaataggtattgaaatatttgtttaaataaaaaaaaaaaaaaaaaaaaaaaaaaaaaaaaaaaaaaaaaaaaaaaaaaaaaaaaaaaaaaaaaaaaaaaaaggttcgcatttaaaactagtcccttcacccccaaatgaccggccgggcttattattagcattttgaggagtgctaccacacatgcatcgtcaggttgatggccgatatatatgaaacttacattttttttggtggggaaggactgctgagtagactgtcaatgatggaatgctcgtggtgcgagtgcgatgcatggtgtacttgtactatgttgtaaccagtgtaaaaaggggatactcgttagatgttatgccatgttctctgaatcaacggcttgatgatttgtgcaacgcttacaatcgttttgggtgataaagggcagtcctaggctcccagcctgaaaatcatttagcgcaaaatcatttagggtttgttcgtttatgccaatccagataccttgttcagttatctcaggatttcgaaagggattaaggggattaaatcctcttctatttaaaaaaaaaaaaaaaaaaggggcggcc

SEQ ID NO: 101368 - DNA, 709 bp, Zea mays
  Clone ID: MRT4577_23960C.1
accataaaatgaaccgaggaatcctgatcttaaaaggttttacttagacaggcagaatgtcatccacacaagcatacttagaatatagcgatgagagccgagctaagcaacaagtccggcgaacagtagccaccgagagctcactgttttccctcccgttcacggttccactgctcaatcttggcccttcgctcctcgctgctttccctgactgggctccttgcacgccttgaggggctaccatgcctgcgccttcctccatcatcatacctgtcatgtctgccgcctctgcctgctccatcatcatacctggcatgcctgccacctctgccggctccgtcatcgtacctgtcatacctgctacctcttccccttccaccaccgccgccaccacggtagtcatcacggtcacggtggtggtagtcatcacggtcacggtggcccctcctttgtggtggcgggcttcggcttcggcttctcagggtcaataggttggccttgagcatcaactccaggggttatatcagggcgctgatacatgttagcaagcacaagagttggtgatatagttggcctgttgtgcagacgagagcagcgatccccatgacgacaggccccaatcttgaagtaaaaagggcagttgaccctgtccttctcagtgccgaagatcgaagccaagtgctccgccatgattcaactcgcagaccgg

SEQ ID NO: 101369 - DNA, 310 bp, Zea mays
  Clone ID: MRT4577_23961C.1
gggacccgggtttttcccaaggtcccaagggcgggccacaaaaaaatagggggggcgccccctttttttttttttaaacccaaagttgggggggggggggttccccctttttttaaacttatggggggctcccgttggcctttaaaaggggtccgtaggagggggccaacgcccccggtttctcagtttaaagtttgtcttttggaaaggggggttccaccccttttttgggcgggggtttttttttttccaccttcggtttttcttgggccttgttttctttttccacgggcgggtgggggtttatgcc

SEQ ID NO: 101370 - DNA, 414 bp, Zea mays
  Clone ID: MRT4577_23962C.1
atgtgtgcttgcacgtggcattttttctacaattcagagtctcttgaagtccttgtagcccttcaaggtgctctgacagtggttggtaacataacaatgtgcatagctgcataccgcatattcaaagcatcccaggaaggctcaaaaacttcgtaggctgcaagattggatcttacagccggtttggcaagggatgctcagccgcatttgaagattgacgttgctgagaacctgagacgatgataggagaagatacagatagccggtcggttggctttaccttgtgaaacagtatgattgtgatggagttgaagaagaacaaagttgcgtctctcctgtaaatacctgtgaaagtaaaccctgaatccggttacagtcttagactatctccagcagccttttattttactcttt

SEQ ID NO: 101371 - DNA, 2000 bp, Zea mays
  Clone ID: MRT4577_23963C.1
aacaagaaatccgccatggaacagcataacacacgactgaaagccagatggcaaatctagtgacaaaccacaactgacatcatcataagctaatagcacaccacaaaagatttgacaccaattgtcaaaataacataatagcaaaggatccgacacaacacagatggaaacaaatgatgtctggtttaaccataaaatgaaccgaggaatcctgatcttaaaaggttttacttagccatgcagaatgcaatccacacaagcatacttagaatatagcgatgagagccggagctaagcaacaagtccggcgaacagtagccacggagagctcactgttttccctcccgttcacggttccactgctcaatcttggcccttcgctcctcgctgctttccctgactgggctccttgcacgccttggggggctaccatgcctgcgccttcctccatcatcatacctgtcatgtctgccgcctctgcctgctccatcatcatacctgtcatgcctgccacctctgcctgctccatcatcgtacctgtcatacctgctacctcttccccttccaccaccgccgccaccacggtagtcatcacggtcacggtggtggtagtcatcacggtcacggtggcccctcctttgtggtggcgggcttcggcttcggcttctcccatggtacctcctggaagcagaacgcccatacagcttcctcctgagatccctgccaatttgcttcacatgcatgaaattacagtagccaccacggttgcagctgttctcctcaaactgcctacaggttgcttcacggaagtcggtcacaggagaatactcaacaattatagggcggccagagtaaaagcgcccctgaagagcattgtatgctgcggctgcttgctcttcctccctgaactggacatagacattcccaatcatgtggtcagcaaggttatcacaaacattcagattctcaatctcaccaaacttccccaactcctcatagatgtcctcatagaagtcctcaaaatgctcctgcatcttctcagggtcaataggttggccttgagcatcaactccaggggttatcatatcagggcgctgatacatgttagcaagcacaagagttggtgatatagttggcctgttgtgcagacgagagcagcgatccccatgacgacaggccccaatcttgaagtaaaaagggcagttgaccctgtccttctcagtgccgaagatcgaagccaagtgctccgccatgattcaacccgcagaccggcaacagctgttcgcctgtcgcacaaagggtgttccttctggtgtaggccttgtattatccgcccgacaaatttttttgattttaacctaagctgcacaccattttagattattaatatctgatagaaacgaaacaaacaaccgaaatcgcagttaaagctaccaccaagaaaaggcaacatccattagtagactaatatagctgacaatatacccagtaatctggcaaaatatgtcaccaacctaaagaagtaaatctcaacgaatacaagttaatgtagtgattctagaagttgattcaatcggctaaaagatagctaaaattcctacatatgcccaggcggacccagtagggaagatgagcggccccatgtttttattttgcaagaaaatcaagttagaaagcataatactacacgtatacacctgaaattagatccgatccaaacgcaaatagccaaaacagtgtcagctagggtttgggtcctcagcttcgcacagcgggaagggaagagaaggggtgcgcatacctgttggctgctcttcggcgaagggcccgacgaagacctgggcacctggcgtagagcggcgggggcggggaggtcacccagtcgtcgccacgagagagagagagaggacgccggctgaacgacgcaagataaagaacgggtccaaacagccagttcaccctagtgctggacgctggtttcgaatttccgctggacggag

SEQ ID NO: 101372 - DNA, 1996 bp, Zea mays
  Clone ID: MRT4577_23964C.1
cgatggaacctgctccgtgctactgcacatagtacaatgacggcagcccaagcactgtctaggaggcattgagcaaaaatgagaagagggaaaacaagaaatccgccatggaacagcataacacacgactgaaagccagatggcaaatctagtgacaaaccacaactgacatcatcataagctaatagcacaccacaaaagatttgacaccaattgtcaaaataacataatagcaaaggatccgacacaacacagatggaaacaaatgatgtctggtttaaccataaaatgaaccgaggaatcctgaattcctgatcttaaaaggttttacttagccaggcagaatgccatccacacaagcatacttagaatatagcgatgagagccggagctaagcaacaagtccggcgaacagtagccacggagagctcactgttttccctcccgttcacggttccactgctcaatcttggcccttcgctcctcgctgctttccctgactgggctccttgcacgccttgaggggctaccatgcctgcgccttcctccatcatcatacctgtcatgtctgccgcctctgcctgctccatcatcatacctgccatgcctgccacctctgcctgctccgtcatcgtacctgtcatacctgctacctcttccccttccaccaccgccaccaccacggtagtcatcacggtcacggtggtggtagtcatcacggtcacggtggcccctcctttgtggtggcgggcttcggcttcggcttctcccatggtacctcctggaagcagaacgcccatacagcttcctcctgagatccctgccaatttgcttcacatgcatgaaattacagtagccaccacggttgcagctgttctcctcaaactgcctacaggttgcttcacggaagtcggtcacaggagaatactcaacaattatagggcggccagagtaaaagcgcccctgaagagcgttgtatgctgcggctgcttgctcttcctccctgaactggacatagacattcccaatcatgtggtcagcaaggttatcacacacattcagattctcaatctcaccaaacttccccaactcctcatagatgtcctcatagaagtcctcaaaatgctcctgcatcttctcagggtcaataggttggccttgagcatcaactccaggggttatcatatcagggcgctgatacatgttagcaagcacaagagttggtgatatagttggcctgttgtgcagacgagagcagcgatccccatgacgacaggccccaatcttgaagtaaaaagggcagttgaccctgtccttctcagtgccgaagatcgaagccaagtgctccgccatgattcaactcgcagaccggcaacctgttggctgctcttcggcgaagggcccgacgaagacctgggcacctggcgactggcgtagagcggcggggacggggaggtcgcccaatcgtcgccacgagagagagagagagagagagagagagagagagagagagagaggacgccggctgaacgacgcaagataaagaacgggtccaaacagccagttcaccctagtgctggacgctggtttcgaatttccgctggacgctggacggatggacgccggctggttcctagtgctggttcctgggacctgggtgtggccgcgtgggattagggagtagggacgccggctggttcctagtgctggacgctggtttcgaatttccgctggacgctggacggagtggacgccggctggttcctagtgctggttcctgggacctgggtgtggccgcgtgggattagggagtagggacaggggcagggcggcgctggtggtgctgtcgtgctggagcggtggagcctggagctggacagcctgggcgtgggattgccggagccggatcggggtccggggagaaaggcgtcacggcgacaaggatggggaatgggggggcggccgccgcgacgagaacagaccctcgtgccgaatt

SEQ ID NO: 101373 - DNA, 2029 bp, Zea mays
  Clone ID: MRT4577_23965C.1
ggccgcttttttttttttttttttaacttaatagctcatcacaaaagatttgataccaattgtcagcataacataatggcaaatgattcaacacaatccacaaggaaataaatagagtttacatgtccgatttaaccacaaaattgaactgagtcctgcactcaagcatatcagccacacaagcatacttagaatatagcagtgaaagacgagctaagcaacaagtccaccgaataacacgtctcagaacagttgccacagagagctcactgttttgactcccgctcacggttccactgctcaatcttggcccttcgctcctcgctgctttccctgaccgggctccttccacgcctcggggggctaccatgcctacgccttcctccatcatcatacctctcatacctgccgcctctacccgctccatcatcgtacctgtcatgcctgccgcctctacctgctccatcatcatacctgtcatgcctgctacctcttccccgtccaccgccgccgccgccgccgccacggtactcgtcacgatcacggtggtgatagtcctcacgatagcccctcctttgcggtggagggcttcggcttctcgcatggtacctcctggaagcagaacgcccatacagcttcctcctgagatccctgccaatttgcttcacatgcatgaaattacagtagccaccacggttgcagctgttctcctcaaactgcctacaggttgcttcacggaagtcggtcacaggagaatactcaacaattatagggcgcccagagtaaaagcgcccctgaagagcattgtatgctgcagctgcctgttcttcctctctgaactgaacatagacattcccaatcatgtggtcagcaaggttatcacaaacattcagattctcaatctcaccaaacttgcccaactcctcatagatgtcctcatagaagtcctcaaaatgctcctgcatcttctcaggatcaataggttggccttgagcatcaactccaggagttatcatatcagggcgctgatacatgttagcaagcacaagagttggcgatatagttggcctgttgtgcagacgagaacagcgatccccatgacgacaagccccaatcttgaagtaaaaagggcagttgaccctgtccttctcggtaccaaagatcgaagccaagtgctccgccatgattcaacttgcagactgacaacctcgataaaggtcctcagtgtgcaagactaagtagacaaaacgaacacaagcagctaaaacaaatcagggttcacagcacattatcttataggatcaccaagtaatattcctgtcaatttaccccctgtacagcccactgtgtaaatggataattctacagctcaggctctggcaataaaatattaatcgcaatccctttttaagacctaatctgcacacttactcaaagggttaaatattaggagaagtgaacagaaaaaccaaaataactgtgtcatcagggcaagttcttgctcctagtaactgatactacactttttacctatataataattaataaatctgcaagttaattcccaagaatcacctaaatttaaacagcgtgaaagtctctctccactattattgttaggagtgtttgctgcagctagctgcagctgccactgcaacttctaagctgcaaatactgtataagaagcctgctgcatctgctgcggctgtgattctagctgcagtgaacaggccttagttttctcccctgcaactgcatataataaaccaaataacgctgcagagagagatagagacagctgttcgcctgtcgcacaaagggtattccttctggtgtaggccttgtattatccgcccggcaattttttttattttaacctaagctgttggctgctcttcggcgaagggcccgacgaagatctgggcacctggcgtagagcggcgggggcggggaggtcgcccagtcgtcgccacgagagagagagaggacgccggacgcaagataaaccccggcccggccggcctcgagg

SEQ ID NO: 101374 - DNA, 1931 bp, Zea mays
  Clone ID: MRT4577_23966C.1
gggggggggggggggttttttttgacaccaattgtcaaaataacataatagcaaaggatccgacacaacacagatggaaacaaatgatgtctggtttaaccataaaatgaaccgaggaatcctgatcttaaaaggttttacttagccaggcagaatgtcatccacacaagcatacttagaatatagggatgagagagtccggcgaacagtagccacggagagctcactgttttccctctcgttcacggttccactgctcaatcttggcccttcgctcctcgctgctttccctgactgggctccttgcacgccttggggggctaccatgcctgcgccttcctccatcatcatacctgtcatgtctgccgcctctgcctgctccatcatcatacctgtcatgtctgccacctctgccggctccatcatcgtacctgtcatacctgctacctcttccccttccaccaccgccgccaccacggtagtcatcacggtcacggtggcccctcctttgtggtggcgggcttcgggcttcggcttctcccatggtacctcctggaagcagaacgcccatacagcttcctcctgagatccctgccaatttgcttcacatgcatgaaattacagtagccaccacagttgcagctgttctcctcaaactgcttataggttgcttcacggaagtcggtcacaggagaatactcaacaattatagggcggctagagtaaaagcgcccctgaagagcgttgtatgctgcggctgcttgctcttcctccctgaactggacatagacattcccaatcatgtggtcagcaaggttatcacaaacattcagattctcaatctcaccaaacttccctaactcctcatagatgtcctcatagaagtcctcaaaatgctcctgcatcttctcaaggtcaataggttggccttgagcatcaactctaggggttatcatatcagggcgctgatacatgttagcaaacacaagagttggtgatatagttggccttgtgcagacgagagcaatgatccccatgacgataggccacaatcttgaagtaaaaagggcagttgaccctgtccttctcagtgtcgaagatcgaagccaagtgctccgccatgattcaactcgcagaccggcaaccttcaagcacaaagaagaatagtatcaaaaaccatgttcaatataaggtgagatagaggggataatgatataaactcttggtttgttatctagaaccatggggatcaaggaatacctcaataaaggtcctcagtgtgcaaggctaagtagacaaaaacgaacaaaagcagctaaacaaaatcagggttcacagcatgtgcatcttataggatcaccaaagtaatattcattcctgcaagtttaccccctgtacagtcacgtgtgtaaatggaaaattctacagctcaggctctggcaataaaatcttaatcgcaatccctttttaagacctaatctgcacacttactcaaaaggttaaatattaggagaaaaaccaaaataactgtgtcatcagggcaagttcttgctcctagtaactgatactacactttttacctatataataattaataaatctgcaagttaattcccaaaaatcacctaaatttaaacagcgtgaaagtctctctccactattattgttaggagtgtttgctgcagctagctgcagctgccactccaacttctaagctgcaaatactgtataagaagcctgctgcatctgctgcggctgtgcttctagctgcagtgaacatgccttagttttctcccctgcaactgcatataataaaccaaataacactgcagagagagatagagacagctgttcgcctgtcgcacaaagggtattccttctgttgtaggccttgtattatccgcccgacaattttttcctcgtgccgaatt

SEQ ID NO: 101375 - DNA, 2016 bp, Zea mays
  Clone ID: MRT4577_23967C.1
gacaccaattgtcaaaataacataatagcaaaggatccgacacaacacagatggaagcaaatgatgtctggtttaaccataaaatgaaccgaggaatcctgatcttaaaaggttttacttagacaggcagaatgtcatccacacaagcatacttagaatatagcgatgagagccgagctaagcaacaagtccggcgaacagtagccaccgagagctcactgttttccctcccgttcacggttccactgctcaatcttggcccttcgctcctcgctgctttccctgactgggctccttgcacgccttgaggggctaccatgcctgcgccttcctccatcatcatacctgtcatgtctgccgcctctgcctgctccatcatcatacctggcatgcctgccacctctgccggctccgtcatcgtacctgtcatacctgctacctcttccccttccaccaccgccgccaccacggtagtcatcacggtcacggtggtggtagtcatcacggtcacggtggcccctcctttgtggtggcgggcttcggcttcggcttctcccatggtacctcctggaagcagaacgcccatacagcttcctcctgagatccctgccaatttgcttcacatgcatgaaattacagtagccaccacggttgcagctgttctcctcaaactgcctacaggttgcttcacggaagtcggtcacaggagaatactcaacaattatagggcggccagagtaaaagcgcccctgaagagcgttgtatgctgcggctgcttgctcttcctccctgaactggacatagacattcccaatcatgtggtcagcaaggttatcacaaacattcagattctcaatctcaccaaacttccccaactcctcatagatgtcctcatagaagtcctcaaaatgctcctgcatcttctcagggtcaataggttggccttgagcatcaactccaggggttatcatatcagggcgctgatacatgttagcaagcacaagagttggtgatatagttggcctgttgtgcagacgagagcagcgatccccatgacgacaggccccaatcttgaagtaaaaagggcagttgaccctgtccttctcagtgccgaagatcgaagccaagtgctccgccatgattcaactcgcagaccggcaacctcaataaaggtcctcagtgtgcaaggctaagtagacaaaaacgaacaaaagcagctaaaacaaatcagggttcacagcatgtgcatcttataggatcaccaagtaatattcattcctgcaagtttaccccctgtacagccacgtgtgtaaatggaaaattctacagctcaggctctggcaataaaatcttaatcgcaatccctttttaagacctaatctgcacacttactcaaaaggttaaatattaggagaagtgaacagaaaaaccaaaataactgtgtcatcagggcatgttcttgctcctagtaactgatactacactttttacctatataataattaataaatctgcaagttaattcccaaaaatcacctaaatttaaacagcgtgaaagtctctctccactattattgttaagagtgtttgctgcagctagctgcagctgccactccaacttctaagctgcaaatactataagaagcctgctgcatctgctgcggctgtgcttctagctgcagtgaacatgccttagttttctcccctgcaactgcatataatgaaccaaataatactgcagagagagatagagacagctgttcgcctgtcgcacaaagggtgttccttctggtgtaggccttgtattatccgcccgacaaatttttttgattttaacctaagctgcacaccattttagattattaatatctgatagaaacgaaacaaacaaccgaaatcgcagttaaagctaccaccaagagaaggcagaatccattagtagactaacatagctgacaatatacccagtaatctggcaaaatatgtcaccaacctaaaaagtaaatcgcaacgaat

SEQ ID NO: 101376 - DNA, 254 bp, Zea mays
  Clone ID: MRT4577_23968C.1
caaccgacaacacacggagaaggggaagggcggcgagggaagggctccgcgtcacgtgcgtactgtagctgctactctatggaacactccatccatcagcgctgacctccgcattgctctagataccatgcagtacatcgagtctgccgccaagatcaaaggccggagaaggaggacgaaagggtagggagtcagctatgggatgctcttcatgctggcgagtggcagatgacgacaaccttggcaggaggaag

SEQ ID NO: 101377 - DNA, 1055 bp, Zea mays
  Clone ID: MRT4577_23969C.1
cctcggaattcggctcgagaacccacgcgtccgcggaagcaaagcacaccagctcatttgcttcgcccgttcgccgtgcgtgcgtcgtcaaccaaagactcgtttccttctttgtgctcctgttcgttccttccttccctggaacccttcccccgtaagctcgccgctgcgctgcgttcggatggcagttggaggcggcgtgtgtgtggcgtcgccctcgccgtcgtcggtcgaggcgtggtcgtggaggacgagcggggcgcggccgcgcggccgttaggtgcagcgtggcgaggccgggccgggcgccgccggcgggcgggtggaggacccctaccggacgctgcgtctgcgccggggggccacccgcggcgaggtcaagaaggccttccgccgcctcgcgctcatgtaccatccggacgttcgcaaggagagggagagggagatggaatgcgacggcgacagcggacgaggatctggacaggtacaggcgccgcctcaacgaggaagacgccgatgactggttcgacatgtgaagaggaagcgaaggaactgaaagcagcggccagttccagaggtattattacgtggccctgttatccgtatcggaggctgatgagcagcatgagggaggccgacgagcggctggagtactggcgcctcaagtacggcctcgccgacgaggatctggacaggtacaggcgccgcctcaacgaggaagacgccgacgactggttcgacatgtgaagaggaagcgaaggaactgaaagcagccggtcgatggataagggtctattattacatggccctgtttatccgcatggacccgattaattccggttgccatggcagcggcacccactctagtttttggctgcatgtgtatatactctgaatacttctcccctgttttatagtgggtgaagggataccgttaggctaaatggtacgtttggttcagtcgtgagttgtcaattgtgagttatctctgtaaaaataactgttgtgataaaaaaactaaaaattgtttgattcgaaaaaaaaaaaacaagggc

SEQ ID NO: 101378 - DNA, 419 bp, Zea mays
  Clone ID: MRT4577_2396C.1
gactgtttaccgtttatcatttaggataacattggtgtttgaatacattaaacttattcaacatcatcatgttgttctgtttgaaaggcacgggacatacttgtgcttcttatcagacaaacagcgaagaatacatgcaagagacctcaacccacactgtgatatgcaatatattactcactggcttgtacactttgccgttcaagaaataaatttctcttcttctcctgattcttaaggggagggtggctttttttactgcttctctagtgccttagtagcaacttgttgttctgccaaatccttgtacaaattaaaatccgatgaggaggaagatgacgagcacatgttatgaccatggcccttcctaaagtagcgcctcttgatgatatatgccctctgtgggtgaaagacttgct

SEQ ID NO: 101379 - DNA, 605 bp, Zea mays
  unsure (1)..(605): unsure at all n locations
  Clone ID: MRT4577_23970C.1
cctcgaggccggccgggaaccactcttgtgtggaccctccggatcgaagcctggacacacgcgaccgacgcggcggcggctcgacgcaaccggcgcgacggcggcttcgacgcgaccggcgcgacggcggcgcacagccccgacgacgaccctccccgctgccttctccccgatccctnnacacacnattatagttgggggaagggtgaaccttccctcccctcctttgggggatcccggggaaccccaaactttcccaaaaagaaaaaaaaactttttttaaattgggggccctttgggggaaaaacacggcctctctaaaaaaaaaaaaaaaacctnnctttttttttttttttaaaaaaaaaaaaggggtttttaagggggggggtggggaaaaacagggggggcctcccccccctcaaaagaaattcttttggggggggggagggggcccccccccccctcccccccccgcggagggaatttttttttttttaccaaggggggggggcccccccccccccccccccccccctcttttttttttttttttcttctctcaataaaaaaggggggggcgccccccacaccccncnggggggggg

SEQ ID NO: 101380 - DNA, 1127 bp, Zea mays
  Clone ID: MRT4577_23971C.1
cggaagcaaagcacaccagctcatttgcttcgccgtgcgtgcgtcgtcaaccaaagactcgtttcctttgtgctcctgttcgttccttccttccctggaacccttcccccgtaagctcgccgctgcgctgcgttcggatggcagttggaggcggcgtgtgtgtggcgtcgccctcgccgtcgtcggtcgaggcgtggtcgtggaggacgagcggggcgcggcgcggcgcggccgttaggtgcagcgtcgttggcgaggccgggccgggcgccgccggcgggcgggtggagaacccctaccggacgctgcgtctgcgccggggggccacccgtggcgaggtcaagaaggccttccgccgcctcgcgctcatggtgcgtccgcgagcgcaacccctccctcacccagctaattctggtcaccgtctcacttccaccctggcgtgcagtgtcgattcctctaacgggttgctttgcgtcgtgctcgtgcagtaccatccggacgttcgcaaggagagggagagggagatggaatgcgacggcgacagcggcgtccagttccagaggattaacgtggcgtatcaggtgggcttacgtatccatcatctttcctccgctgctaaatgctaattcgagccgccttccttccattccatttcttcttttcgtttaccgtgttacttccactggatgcagaggctgatgagcagcatgagggaggccgacgagcggctggagtactggcgcctcaagtacggcctcgccgacgaggatctggacaggtacaggcgccgcctcaacgaggaagacgccgacgactggttcgacatgtgaagaggaagcgaaggaactgaaagcagccggtcgatggataagggtctattattacatggccctgtttatccgcatggacccgattaattccggttgccatggcagcggcacccactctagtttttggctgcatgtgtatatactctgaatacttctcccctgttttatagtgggtgaagggataccgttaggctaaatggtacgtttggttcagtcgtgagttgtcaattgtgagttatctctgtaaaaataactgttgtgataaaaaaactaaaaattgtttgattaaaaaaaaaa

SEQ ID NO: 101381 - DNA, 221 bp, Zea mays
  Clone ID: MRT4577_23972C.1
gcgctctgaagccatacactaagagagcagatcatgcatatgggtcatatctcaagtcggggagcacatgccatcaacggggttaagcaggcgtaatggactacctgtcaccatgctgatctagcaaaatcattgcgctactaaaagcttagaatagttcctggcttgagatccgctggctctgcctgtgaacatgatatacaatgattgtaatagggacc

SEQ ID NO: 101382 - DNA, 255 bp, Zea mays
  Clone ID: MRT4577_23973C.1
gaatgttcagtcagaatcattaagaagaatgttatccagaaaaggtagactgatatccgtcagcctaagcacagctccaactgtacaattaataatcaactctcgagtagataaatctaaagctgagcagtataggggccaaattctgcaggcatttgaatccgttctgccgtctaccataaaacttgacattcgatacgaatctaaggatgatctggcagcaagccatgctccagttatttctgcctaccctga

SEQ ID NO: 101383 - DNA, 447 bp, Zea mays
  Clone ID: MRT4577_23974C.1
ggacctcagcgacggggcgccaccgggccgcggcgcatcgctcggccccggctccggctcgctctccggctccgacgacggcgggtccgggtcgtcgtacacggcgcagatggagcggatcaggcgggccgcgcagcccagcccggattacagcaccgactaccccgtctccatcccggagttcggccacccgtcgcccgcgagcagcgccagctcagtcgagcgggatgaccggcggcatcgtggagggcgccggtgagtacgtgatcgacaggtgtgagcgtgatgtgctgacgactaattgactcctgcgcatccctgtcacgtgtgtatagcatatagtcgtcttgctgtaaaaggttatggcatactcccctgtttaaaatgtacaggttaaatttggcttacttcaacaaagattatataataaatttgacttacatctgc

SEQ ID NO: 101384 - DNA, 355 bp, Zea mays
  Clone ID: MRT4577_23975C.1
gccggccgggccgggggtagcggcgagacgagccgtttaaataggtgtcaagtggaagtgcagtgatgtatgcagctgaggcatcctaacgaacgaacgatttgaacgatttatcagcttgcctaccccgaaaggcgcgcgtaagcgtggtggggctgcaaaggatttgtgatgacgaccggcgtaccggaaaacgagcgtgatccggccgttgcgtcgggttcggcgccatcgccttgcaagccatcaaaccggcccgccactgcgcgcaatgatcgggacgacgagctggaagttaacgacatcgttccgctcacccggggcgacggaaaaaaaaaaaaaaaaaaggccccta

SEQ ID NO: 101385 - DNA, 293 bp, Zea mays
  Clone ID: MRT4577_23976C.1
cgcatccagagattcaggacaagagaccacgatcctaacacacagcgtctctgtcatcttctatcgcgggggcgccaaaggtcgcgacatggacggctatggacgctgcggccatgttcacgcgcaagcacgttcatgaggacatcggcctgcggatcatcggggtatgctaagcagcttgacgatggagccgggggccatgcccagctgcaccgtcacgtgaatcagcacatgccggtgctgatgaaagttcatgcgaaggtgactaatatcaagagcacgctggctgaaca

SEQ ID NO: 101386 - DNA, 415 bp, Zea mays
  Clone ID: MRT4577_23977C.1
gcgtccgaggaaaccaaaccttatcaccatggccgcgcccgtgttgaatgcgccggtgcccgccagggcgcacacagcggttgctatctagaggataggcacgctcccgcacttcgctcctacgtgcatacggtcatccctcagccgccgtcaccggtccggaacgctataggggacggcatgctgaaatgtgttcggaaactacttgcaggcagcaacctatggcgaatcccatggaggcgggcgctcggttgcatttatctagctcgctcgggcacacagcatagggctcttactgacgcatgcatgcaagtagaactagacataacacctccgggtcaaagaacaatgaccgccgcaccaaatgacactgactcatgaacaactctatcagggacacatgacgggacgacta

SEQ ID NO: 101387 - DNA, 244 bp, Zea mays
  Clone ID: MRT4577_23978C.1
atccatttcagcatttccaacgccttcgccctaccagccacgtcggttcgaggccgggcgagcgagcagctggtggcaatggcggcagcagcggaggtcgtgctgctggacttcttggtgagccccttcgggcagcactgccagatcgcgctggcagataagggcttggcctacgagtaccgagagcaggaccttctggacaagggcgagctgctactacgatccaaccccatccacaagaaga

SEQ ID NO: 101388 - DNA, 552 bp, Zea mays
  Clone ID: MRT4577_23979C.1
aagctcggaattcggctcgagctgagctcacagtcacatgcacaggccggtgctatatataatcatatcagagagttagattgtgacaggtggttttagctagctaaggtacgtacaaccagtgccagggcaattatcatcaattaagaaaaagagagatcagagagaggaacttactaatcatgagtgatctgaagtactcatcctacacgaggctgggcctgcggcggtggcgacggacggcgaggggagtccggctcagcccgacgcgcatcaccgtgcgcaggctccgtgccaagctgtggacgctgctgggaatgctgggccgctgcgtgcgcaacctacggctactcacgaagggccggatggcagcggcagccggtgctgagaaggcgagctcgccccctgccgctgccaccggcagcaggaggtttcttgtggccggtcagaaacgctcactcgccggagggaagaccggactacaggccgccggggacggggggagcagcagcagtaagccaccgcggcggccggcctttttttttttttttt

SEQ ID NO: 101389 - DNA, 625 bp, Zea mays
  Clone ID: MRT4577_2397C.1
ggaccctcgagtcgccggacatagaataggattagaacacccagcgatgtgtctattacaacctagaacaaaggctaccaagaattataacctacttgtgctccttgcgctccgtgcgagcgcaacagatgcgaacatgataccacaatgcatcactagatcatagctacattattgcacagaccctgcatgaaggtacatgaatggccttagaacacgcagatgtgcaagcctatacctctacaacaagcgattgctgcgagcgagatacaacagccaaatgagcaataggaacaacaatcacatgtgacatgtaacaatacaaacgcattgtaacgcaacaaaaacaacagtgactaccagcactgagccacctagccatggtgaaccctatacactacttgcagcaagatctgcttgcatacaacccacttggtgtagcagacgtagttgcaaaccagctgcaacaacaactgaaacagattgtgtcagcgcttagtcaactagacatggtgaaccctggcgctctacactacaagaggaacatctgctttcatatagcccgctcgctgtggccaatgcacctacatacctgcagcaagatatgtagcaacagattgtacca

SEQ ID NO: 101390 - DNA, 284 bp, Zea mays
  Clone ID: MRT4577_23980C.1
tcttccacgcgtccgcccacgcgtccgcggacgcgtgggaaaaaaaaaaaaaaaaaaaaaaaaaaaaaaaaaaaaaaaaaaaaaaatgaaaaacaagaggccgggcgcccgttttgggggccccccgcttccgtccgcgtgcatggggcctcctttcttttggatccagtcttctatatccaattcacgggccgtttacttacatcttaggggcagccaaaaccctgtcattgcccaccttattcccccggctgaacttggaaaacccgcggggtgccgaaata

SEQ ID NO: 101391 - DNA, 613 bp, Zea mays
  Clone ID: MRT4577_23981C.1
tcgagcggccgcccgggcaggggtttttttttttttttttttttttttattttttatttttttttttttttttttttttttttttttttcccaaccatctttttcccttaaaaaaacccccccccccttccacggggccaaccaggccaaggcccccccggccccccgggggggggggggcccccccgccccccagggccggggaggggggaacccacccagccggggagcaggcccggggccccaaaccaggaagccgggcccggggccgccccccccccaagggcgaatcccaccccccgggcggccggcccaaggggaccccaccggggccccaagcggggggaacccaggggcaaaccggcccccggggggaaaggggaaaccgggcacaatgccgcacaacaggcgggccggaagcaaaaagggaaaagccgggggggccaaaggggggggccaccccgcggaaacgggggggggcccacggcccgcttaccagccgggaacccgggggggcccccgggataaaggaaccggccaacccccggggagaggcggattgggaaaggggcgcgcttccgcggcctgggacacggaccccctgcgcccggcc

SEQ ID NO: 101392 - DNA, 370 bp, Zea mays
  Clone ID: MRT4577_23982C.1
gggaaagggccttttttttttggggggggccccaacctttgggcaaaaaacttttttttgggccttttcccccatggaaatttaaagaggaggggccccccaaagggggggtgggggggaaaccccgtggggtttgtcaaaacaaggggggtggttgggccaaattggtgcctttttaaaagggggccaccttttgggccccgggggtgggtaaacggcaaaaactggggggtttttaagaaggggggggggttcacaccaactatcggggtgaaagggatcagatggggttgctttaaataacggggaaagatcaaatggccccacatggtgtctttggaaaaataattgggggggtggccaaaaggat

SEQ ID NO: 101393 - DNA, 632 bp, Zea mays
  Clone ID: MRT4577_23983C.1
acscrratcgccaacccgaatctgcccgcatcagaaaatagtgcagcagatgactccgcaatggaagtkattgcaaagccgaatgtkgccacagaggatggtgcatcaaagttgaatgtkgccatggaggatacagcatcgaagctgactgtbgctgatactgcagcagtagaaccaactttgctggaaaccaccattgcagctggatcaaccgttgtagctggaaatgaacagtgtkataactcaaactcaagtkgagcaagtctacagcagcaagccgttgacaatgtattgatgtccactgctatgctagctgaggacgctgccacacstgtkgctgctgccgagctcaagcctgcaagggccttcactcgattkctgctcaagaatcatgagccagacaaagaagartctkcagcytgtkaaartcaggcaacaccagatggcagcaaggatacstcatttgattttgctttgctcctgggagaagcctcaragaaggktcacaaggkcgtcgctcaagacaaaggttgararcagtbtggttggatcttacgatgcgctggacarttcatcttatgcccgtccatcarttaagaagatggagatgaaaatktcaaagaaagttgcct

SEQ ID NO: 101394 - DNA, 446 bp, Zea mays
  Clone ID: MRT4577_23984C.1
ggggggaggaaactcaggaaatacattaaacgaacaccacagggaaccagaactttagtagacaaactgaggacatccatacatagattcagcaccccaaaaggggacccaacaaacgcaaaggtggggaccactttccaccatcctacgacattaccaccattttgacaaacgccataatttttggaacccaattttatttaaaaaaacgaccgaggggaactggcgttcctaaaaccacccagggaccaaaaccgcaaaccgggggttaaccgggaaactgaaggggcttaactttagggtttttgggggcctcctttggcacaaggactgtaaacaccccgttctccaaggggggcgggaactggtccgttttggggttttcgggcagggggaacctgggcaggaacctcccggtggtccgctccacgcggggccagggggcc

SEQ ID NO: 101395 - DNA, 708 bp, Zea mays
  Clone ID: MRT4577_23985C.1
gacctcccactcgcacagggcgtcgctgtcgtgatcgacggtcttctcaaatcacaatccagagctcctgcctacctccatgcttcccttctgctatcttggatgccggaaggcctcccggccaccacggtagaaacagggacgcgaatcccaacaacaccgtcacaatgacagagaaggaccagaagcccgggaaggaccgccggttgctggtcggaccctcgttcacgagagccctagacgaggacggccccgcgaagattgaggctgacatgcacacatcatgtcacgtggtcagcgaagaagcagacaatcatgccgacaagcggatgctcccatggcagcccaacatagagaaggagcggcaggaccctacttgcggaaagcatacccagaaatccaccaccaactgctacaaccacgatctcgcctacaaaagctgcgactgcaaccacttctccccctagtgatctactgagagaactgtcctcaagagatactgccaatgcacgcttgcaatggctataggctactatgtgacccactgcatcatactctacgggcacgagctgacgactacatcatcgatcatgacgagatcgacgacgtcttcatacaggacaaaaaactacaagatacactgtccacaaactgcagacctgccaagagaataaaagcattgtcggccgtcactacatcgacaactga

SEQ ID NO: 101396 - DNA, 875 bp, Zea mays
  Clone ID: MRT4577_23986C.1
ctcgaggccggccgggccgggaaaaaaatagtaggaacccgtgactgattggttcttggattggggagctccgcctccgtctcgctcctcctccctctcctcaagtttgaccaaccctcacccacctccctccgtcgtctagtatgcttcttgcctcccgcctgcttcctccgccgccctcctccgccgcggccggttcctcctcatcctctctgactcccaactcaaaacacagagaactctgaaagctaatcggcaatggataaccacatccatagtcagccagctgctaacctctactaccagttcggcatggggactgagcagcaatacccaccaccgttcgcctcgctgttgggcgcctcatcaccaccatccaccaacatctcgcacatggactggaacccggccacgatgctagacaacctcaccttcatcgaggagaagatacagcaagtgaaggacgtcatccgcacaatggtggacaacgccgggcaggttcagtgccaccaccaagcaggcgagctgctggctcagaagcagaagcagcaggtggtcaacgcggacctgacatgccttatagttcagctcatctccaccgccggcagcctgctcccgtcactgaagaactcgtcgttcctcagccacccccaccctggtggccacgtggacatggctaaccatgttggcccaagctcgagcctagtgcctaatgcgatgaccgtttctgaagactatgaggagctgttcaagggatggaccgatggcgccatggaagaacgcggtattgaggtcgacgacgacggcgttcttgtcgaggagcaggaaaccaggacggagacagcctctcgtacgagctgctgcagctggaggag

SEQ ID NO: 101397 - DNA, 1214 bp, Zea mays
  unsure (1)..(1214): unsure at all n locations
  Clone ID: MRT4577_23987C.1
ggccaacatggttagccatgtccacgtggccagcagggtgngggtggctgaggaacgacgagttcttcagtgacgggagcaggctgccggcggtggagatgagctgaactataaggcatgtcaggtccgcgttgaccacctgctgcttctgcttctgagccagcagctcgcctgcttggtggtggcactgaacctgcccggcgttgtccaccattgtgcggatgacgtccttcacttgctgtatcttctcctcgatgaaggtgaggttgtctagcatcgtggccgggttccagtccatgtgcgggatgttggtggatggtggtgaggcgcccaacagcgaggcgaacggtggtgggtattgctgctcagtccccatgccgaactggtagtagaggttagcagctggctgactatggatgtggttatccattgccgattagctttcagagttctctgtgttttgagttgggatcggagtctgcaaaagaagatttgaaaccccaacggttcggttcgtcagaacctgcagataggtaatcaattgctctcgtctggacgagtccctcacgtctgtttgacccaagaaagccgtccgcccgtccttctctctctctctctctcgagagagagagagagagtcgagagatctccgcccctcgacctccgtcaacagtacgatgacgcgatatccagacagaaattaaacccttaacgacttgtttccaagaaaatatagcaagaggcgcataccagagaggatgaggaggaaccggccgcggcggaggagggcggcggaggaagcaggcgggaggcaagaagcatactagacgacggagggaggtgggtgagggttggtcaaacttgaggagagggaggcggagctccccaatccaagaaccaatcagtcacacgggtgtcctactattgtttactcggtggcctgtgaataattgcgtagattattggctcgctcctgatccatcctcggaggctgctgccctgctgatgctcgtcgcccgcttaccatggacatggtcgtcacatggccatgtcagagactagacgatgcctatgaccgtgtgatgctaccattggcacggtaataggcatcacgtggagatggcaacggttatgtgtgacctgataacatatgntgtatttaggtatatatnatgagttaatgttgtaacaaaaaaaaaaaaaaaaaagcggcc

SEQ ID NO: 101398 - DNA, 1242 bp, Zea mays
  Clone ID: MRT4577_23988C.1
accaggccccgagtaaacatagtaggacacccgtgtgactgattggttcttggattggggagctccgcctccctctcctcaagtttgaccaaccctcacccacctccctccgtcgtctagtatgcttcttgcctcccgcctgcttcctccgccgccctcctccgccgcggccggttcctcctcatcctctctgatctgcaggttctgacgaaccgaaccgttggggtttcaaatcttcttttgcagactccgatcccaactcaaaacacagagaactctgaaagctaatcggcaatggataaccacatccatagtcagccagctgctaacctctactaccagttcggcatggggactgagcagcaatacccaccaccgttcgcctcaccaccatccaccaacatcccgcacatggactggaacccggccacgatgctagacaacctcaccttcatcgaggagaagatacagcaagtgaaggacgtcatccgcacaatggtggacaacgccgggcaggtgcagagtgccaccaccaagcaggcgagctgctggctcagaagcagaagcagcaggtggtcaacgcggacctgacatgccttatagttcagctcatctccaccgccggcagcctgctcccgtcactgaagaactcgtcgttcctcagccacccccaccctgctggccacgtggacatggctaaccatgttggcccaagctcgagcctagtgcctaatgcgatgaccgtttctgaagactatgaggagctgttcaagggatggaccgatggcggcattgaggtcgacgacgacggcgttcttgtcgaggagcaggaaattaccaaggacggagacagcctctcgtacgagctgctgcagctggaggaggacgagatactggcgccgcacacgcacttttgcaccatctgcgggaaagggttcaagcgggacgcgaacctgcggatgcacatgcgagggcacggcgacgagtacaagagcccggcggcgctggccaagccgccgagggacccgggcgcggagcaggagccggcgaagcggcggtactcgtgcccgttcgcggggtgcaagcggaacaagctgcacaaaagcttccagcccctcaagaccatcctttgcgtgaagaaccactacaggcggagccactgcgagaagagccacacctgcggccggtgccacgccaagaagttctccatcgtggccgacctgaggacgcacgagaagcact

SEQ ID NO: 101399 - DNA, 350 bp, Zea mays
  unsure (1)..(350): unsure at all n locations
  Clone ID: MRT4577_23989C.1
cacgcatccggacaanacatgagaagatgacgactaatcgctggcggatccggaaggtctggcctggtgggtgataaacgccgcgtggcatcacggactaccgctctgtatcgagagcgctcttacctgccgtagtggcgaggcgtattccaccatgctcgacacggagaatcctaaggacgatcctgatcgttaccatgccgctttcattgattaccgacagcagaagcagtccacgctccgagaacctagcctatctgagcagtgcacttttttaaagtgcatgcacggagaggctccccatagggtggagggttgaatgatagtagaaactgacgcgctgactctac

SEQ ID NO: 101400 - DNA, 1220 bp, Zea mays
  Clone ID: MRT4577_2398C.1
cattgggtacctcgaggccggccgggacgcacgctctccacgccacagcttgcgcccgcaatggcactcgtctccgcctcctcgtcctccaccaccgccgtcacggcgctccccaggaatgggcagcgggcgtcgtcctccttcctcggcggcaagacgctgctgagacaggccgaggcggcccggccgtcgttcgccgtgcgcgccgcggcggaccccaacaggccgatctggttccccggcagcacccctccgccgtggctcgacggcaggttggtggctgattcttggagtcgtcttcggttcactcgttaaagctagccaggtggttctcctttcgtgttgatcgtcacctctgaatctctgacatagtgtgctcttgttgtctcgttgatgcatgcatgcagccttcccggcgacttcggctttgatccctggggcctcggatctgacccggagagcctgcggtggaacgtgcaggcggagctggtgcactgccggtgggcgatgctcggcgcggcgggcatcttcatcccggagttcctgaccaagatcggcgtcctcaacacgcccttctggtacaccgccggcgagcagcagtacttcaccgacaccaccaccctcttcatcatcgagctcatcctcatcggctgggccgagggccgccgctgggctgacatcatcaagcccggaagcgtcaacaccgaccccatcttccccagcaacaagctcaccggcaccgacgtcgggtaccctggtggcctgtggtttgacccactcggctggggctccggctcgccggagaagatcaaggagctgcgcaccaaggagatcaagaacggacgcctcgccatgctcgccgtcatgggcgcctggttccaggccgagtacaccggcactggccccatcgacaacctcttcgcccacctcgccgaccccggccacgccaccatcttccaggccttcacccctaaatgaggtttagcattttgaggagtgctaccgcacatgcattgttaggttgatggccgatatgaaacttcatttttttgtgggggcggactgcggagtagactgtcaatgatgatggaatgttcgtggtgcgatgcatggtgtacttgtactatgttgtaaaccaatgtaaaaatgggatactcgttagataatatgtcctctcttcactgaatcaatggcttgatgatgatgatgtgtgcaacgct

SEQ ID NO: 101401 - DNA, 424 bp, Zea mays
  Clone ID: MRT4577_23990C.1
attcggctcgaggacaggcctaaatggttgtggccggaacaacccccggcgccgaccgggccattggcgctagtgggtgccaactgcaacgggccatcagggctacttatgtcgcaggtggctacgccatcgagggcacccgcctcgcatgtcggaagcagatacaggcggctacggggctagcttcttccttgatctgcctatatcatacagcgaggcggatgctcctatgcgacgctgaagacggagcctccacaggtcctgctggagaaggccagccccacggactagcagagggataccaagtgtctcgtgacaggatgagacatgcatttgcggtcttttctgaatggaatatttaacatggtcaacaagaagatcttgaactacttgacctatgcatatattgtgtgagtgagccatc

SEQ ID NO: 101402 - DNA, 513 bp, Zea mays
  Clone ID: MRT4577_23991C.1
aaaaaaaaaaaaaacaaaaaaaaaaaaaaaaaaaaaaaaaaaaaaaaaaaggaaaaaaaaaaaaaaaaaaaaaaaaaaaaaaaggggcgggccgttctagaaggatctctatctttgctttcgcgtgccttgcaatgctgcgcactgttcttttgtgtcgcctcgtgttaaattccgtggcgggggggggggctccgccttgtattggaataaaccctcgttgtgcccttccttagtttgccttgctgggcactccctctttcgctctgttggctttttagccaagtaggccagcccggatggcccttgctttccgtcgggctgcctgactggaagtggggagggtccctccctgcgccattaatcccggcgggtgtggtgtgttccctacacgcggctcttccacttgtcttgcccctaccccccgccccttttgtttgctttccttcctttgttggccacgccacgtgggctttcccgggcacgttttaattggggggctgcctttagggt

SEQ ID NO: 101403 - DNA, 314 bp, Zea mays
  Clone ID: MRT4577_23992C.1
gttggcttctcctccccctccggttcgggttcgggttcgtgaggttctccggggttcggttcgtgggtgagcggatcgagatggcggtcgatgttgagtaccgtgttgtcgcgctgctggcaggacgacactctcaacgcttagatacggggctggcaacattacgaaccaagcggttgtttatttacggagagcgcgctagctgcgaggctgcgcgacatacgacagcatccccgcggagcggggtcggtgctggcggtacggggcctatggggtacgggggtcggcgggtacggggggtcgggacggggtcg

SEQ ID NO: 101404 - DNA, 210 bp, Zea mays
  Clone ID: MRT4577_23993C.1
atcttttatctttttgcagggttatttggtattggtgtgtatggggcacaccaacatgcataagtataatcaatttatcgcctgctggttactataccagttttcttagagagagagaggattttttaccatacagaccgccgctcactaagtaagagctaacatccaacgagtcccgggcgtgaataaaacagtttgacccacacatcc

SEQ ID NO: 101405 - DNA, 491 bp, Zea mays
  Clone ID: MRT4577_23994C.1
cccctcgagtttttttttttttttttttttttttttttttttttttttttttttttttttttttttttttttttgagaccaaaccttttttttactaattttttaaggggaaggaacgcccatttgactttaatcccgaaggggaggaaagtgggaccaacctagatcgcccgctcaacaagtattggacaggcccaagtccccaaactacccacgggcccatcagctatactttagaaactcccggcgggggatttaaaaggtttttttgtatccggggcggggggcttttaaggggattactttttccggcagggcatgccttttacggggtcaccttttcaaccaggaaaggattgcccccggaggaggcgaaaaggcttccaataatggggtttgattgggccaaaaaggccacctttatttgggctagggtgcgaaacaaaaacccctttgaattatccatggggccccccccaaaaaccccattg

SEQ ID NO: 101406 - DNA, 199 bp, Zea mays
  Clone ID: MRT4577_23995C.1
gacacacgcatccgcccactcgtacgaccacgcgtacgaccacgcgtacgcaaacttacaacatatgggtatggcgacgggagaactgaactccccggcctaccagctggctcgatggcgggggcgcgcgccgatctgttttttgccgctggacgacggagatccacagcaacgaaggctcctactcggacaagctcat

SEQ ID NO: 101407 - DNA, 333 bp, Zea mays
  Clone ID: MRT4577_23996C.1
gaaatgcatagtggagtctatttttagaatcaaatagatagcaacggagcgtccgaatacattcaaaggaaaccctaaagaaaacatgcgccaagaaaacttgggtactaaaacgaaccttgggggacaatagtccctaactttgggaaaaaggtaatttaccgcaaaaacataaatgcaatggaaagggaatgggcggcccgaaccagggccccccaacaaaccaggggggatccaggggccgggcatttcaaccggtaaaaaaccgggcctgtaccacttcgggaacttcaagttaggcttaagcgaatccaggaaccgaaacccgcgggg

SEQ ID NO: 101408 - DNA, 163 bp, Zea mays
  Clone ID: MRT4577_23997C.1
ctttttctcctcctgccgttcgtccgttttagcttgcaaagctctcggcagctgttgccatttcaagcgccggtgcgccctcaattacccatgcctgtcgcccagcccccaacttctacgtcatcgtagtgggcgccggcatcatcgtcagcttcactgctca

SEQ ID NO: 101409 - DNA, 2598 bp, Zea mays
  Clone ID: MRT4577_23998C.1
cctcgaggccggccgggtggagataatgcggaggacggtgattccgacgccaccgcggatccatcgcgggcgctcgagtcgttccggctgctctgcggcgaagcggattaccacgccttgaggggattcctggagagggtttcggagggaggtgatggttatttgtcgccaatcattctgtcagctgatgcagataaggcacatcgatccgaggtgcacgagttcatcaagaggaatttcaagttcctgaacacggatacagttgagcacaatgatggtattcagaaatgcattagggtgcgcttgggttcagggccacgctgtggtaggggaaggaacaggagaggcatggacacttcaggctggagagatgacaagccgtttgacagtagaggctctacattctggccttatcacctggggaagttcctgaggtttcacctttataaggagaacaaggacacacatgaggcactaggggttataggaaaattggcaggggttcagccaagatcgtttggatttgcagggacaaaggataaacgtgctgttacaacccaacaggtgacagtttttaaagtgcatgctagcaggctggctgctcttaatagcaaactcacaggtatcagagttggagactttagttacgtgaaggagggccttgttcttggtcgactcagagggaaccactttgcaattactttgaggaatgttattgcagaatcggccgatgttataaatgctgcagttaatggtctaagtaaaaatggatttatcaattactatggcttacagcgctttggcagcggttctgtacctacccactttgttggtgctgctttgctcagaggagaatggagacatgctgttagcttgattcttggtacaagggtacattataaatggcatgttgatgttgatgcagcacttaggggcatgccccgacatctcacagtggagagagctattcttcagagattgaagaactaccctggcaactatctacaagcactaatggctatacctaaagcactgaggctgatgtatgtaaatagctaccagagttacttatggaatcatgctgcaagtatgagagtggaaaagtatggtatttcacaagttgtagaaggtgacttagtttacaaaactgggtcctcccttggagaagcaattaccacagatacatttgatgacgatgatagccacgttaattcacctgaaatggaaatgtcttgtgaaacacttactgaagaaatgatccagtctgtgaaggtagttgattctgaagatttattgaaggcagtctattcgtttgaggatgttgttctccctttgcctgggtcagaaacattgtttcctgggaatgaagttactatgatttatcatgaaatagccaagaaggatggcattagcctgatagagagcgcccatggtatcaaggacttctcgattacaagcatgaaaggaggttaccgccgcgtactccaacgccctattgattttgaatgggacctgatgacttacacagatgacaatacacctttagtaccaactgatttagatgttctatcagaaacccagttatcagaaacaaatgagccattatctgatgggacttgcagttgtccatcaagtgattccaggttgcaagttttattggacacctctggaccaaccattgaagctagctcagtagaaaccaaatcaattggcatctcagatctgtcaccagagaaactggctgtgaaattagaatttactctaccagcatcatcttatgctacaatggccataagggagttgacgaaaacttcaacttcggttgcttgccagaaaacattaaacggctgaccaagccttgcagtgtaaaatgctttcttcgcaagctggtatccattgtgacaaaacacaccatgtgggtttaactgggcccaggggatggaaccaagcttcggaaaagaaggaacatttcggttctttgctctcactaggaatgatgttccatgattttttagaaaactggaacaggtgttggtctgtcatacatggatgtaaacttagatgactgaaaagtagctttaccttttgcagacagatctttttgtctttagtttatgcatcgtatattgtgatgtccgcgatcgggtcactttctttagggcatgcacgtatatgctttctctttgacagacgtgtatcgtacaaaacaatgtattcagtttgccctccaatgcttgaactcatcccccaacatcctctcttatagccataatgttatgttttcctttggtaatgtacaggttgcttgccagaaaacattaaacggctgaccaagccttgcagtgtaaaatgctttcttcgcaagctggtatccattgtgacaaaacaccccatgtgggtttaactgggcccaggggatggaaccaagcttcggaaaagaaggaacatttcggttctttgctctccctaggaatgatgttccatgattttttagaaaactggaacaggtgttggtctgtcatacatggatgtaaacatagatgactgaaaagtagttttcccttttgcagacagatctttttgtctttagtttatgca

SEQ ID NO: 101410 - DNA, 2067 bp, Zea mays
  Clone ID: MRT4577_23999C.1
atgcccgtcctcctcaacactaccccttcccggccccccgccgcccacttccgcgtccgtgacgcagcccgcccgcccgcgccgctggcagagcccgacgtcggcatctctcgcttcgcctcctccatcccgggcttccgcggcgcgctgaagcagcgctactccgacttcatcgtccacgaggtcgcctgcgacggcgccctcgtccgcctcacttccttcgatctccccgacatcgaggagagtggagataatgcggaggacggtgattccgacgccaccgcggatccatcgcgggcgctcgagtcgttccggctgctctgcggcgaagcggattaccacgccttgaggggattcctggagagggtttcggagggaggtgatggttatttgtcgccaatcattctgtcagctgatgcagataaggcacatcgatccgaggtgcacgagttcatcaagaggaatttcaagttcctgaacacggatacagttgagcacaatgatggtattcagaaatgcattaggttggtaacaataagcaatgttaccaggtttcacctttataaggagaacaaggacacacatgaggcactaggggttataggaaaattggcaggggttcagccaagatcgtttggatttgcagggacaaaggataaacgtgctgttacaacccaacaggtgacagtttttaaagtgcatgctagcaggctggctgctcttaatagcaaactcacaggtatcagagttggagactttagttacgtgaaggagggccttgttcttggtcgactcagagggaaccactttgcaattactttgaggaatgttattgcagaatcggccgatgttataaatgctgcagttaatggtctaagtaaaaatggatttatcaattactatggcttacagcgctttggcagcggttctgtacctacccactttgttggtgctgctttgctcagaggagaatggagacatgctgttagcttgattcttggtacaagggtacattataaatggcatgttgatgttgatgcagcacttaggggcatgccccgacatctcacagtggcgagagctattcttcagagattgaagaactaccctggcaactatctacaagcactaatggctatacctaaagcactgaggctgatggcttttcgtatttactttgtgctctggtactccaatggatccatgctgtgcaggtatgtacatagctaccagagttacttatggaatcatgctgcaagtatgagagtggaaaagtatggtatttcacaagttgtagaaggtgacttagtttacaaaactgggtcctcccttggagaagcaattaccacagatacatttgatgacgatgatagccacgttaattcacctgaaatggaaatgtcttgtgaaacacttactgaagaaatgatccagtctgtgaaggtagttgattctgaagatttattgaaggcagtctattcgtttgaggatgttgttctccctttgcctgggtcagaaacattgtttcctgggaatgaagttactatgatttatcatgaaatagccaagaaggtaatgggttttgtcatgaacttttcagttattcaagaggatggcattagcctgatagagagcgcccatggtatcaaggacttctcgattacaagcatgaaaggaggttaccgccgcgtactccaacgccctattgattttgaatgggacctgatgacttacacagatgacaatacacctttagtaccaactgatttagatgttctatcagaaacccagttatcagaaacaaatgagccattatctgatgggacttgcagttgtccatcaagtgattccaggttgcaagttttattggacacctctggactaaccattgaagctagctcagtagaaaccaaatcaattggcatctcagatctgtcaccagagaaactggctgtgaaattagaatttactctaccagcatcatcttatgctacaatggccataagggagttgacgaaaacttcaacttcggtgacttcctgttcaattctttttttggttttgtaa

SEQ ID NO: 101411 - DNA, 1324 bp, Zea mays
  Clone ID: MRT4577_2399C.1
cattgggtacctcgaggccggggccgggcgagatcccttaaactgccgggcaccacccaccgccaccacacagcccccgcgctcaccgacgccacagcttgtgttgtgcgcgcgcaatggcactcgtgtccgcctcctcgtcctccaccaccgccgtcgcggcgctccccaggaatgggcagcagcgggcgtcgtcgtcgttgttctcctcctcctcctcttcctccttcctcgtcggcaagacgctgctgaagcaggccgaggcagcccggccgtcgttcgccgtgcgcgccgcggcggattccgacaggccgatctggttccccggcagcacccctccaccgtggctcgacggcagccttcccggcgacttcggctttgatccctggggcctcggatctgacccggagagcctgcggtggaacgtgcaggcggagctggtgcactgccggtgggcgatgctcagcgcggcgggcatcttcatcccggagttcctgaccaagatcggcgtcctcaacacgccctcctggtacaccgccggcgagcagcagtacttcaccgacaccaccaccctcttcatcatcgagctcatcctcatcggctgggccgagggccgccgctgggctgacatcatcaagcccggaagcgtcaacaccgatcccatcttccccagcaacaagctcaccggcaccgacgtcgggtaccctggtggcctctggtttgacccgctcggctggggcagcggctcgccggagaagatcaaggagctgcgcaccaaggagatcaagaacggacgcctcgccatgctcgccgtcatgggcgcctggttccaggccgagtacaccggcaccggccccatcgacaacctcttcgcccacctcgccgaccctggccacgccaccatcttccaggccttcacccccaaatgaggagttgaacttattattagcattttgaggggtgctaccacacatgcatcgtcaggttgatggccgatatatatgaaacttcacattttttttggtggggaaggactgctgagtagactgtcaatgatggaatgctcgtggtgcgagtgcgatgcatggtgtacttgtactatgttgtaaccagtgtaaaaaggggatactcgttagatgttatgccatgttcactgaatcaacggcttgatgatttgtgcaacgcttacaatcgttttgggtgataaagggcagtcctaggctcccagcctgaaaatcatttagcgcaaaatcatttaggggttgtttgtttatgccaataaaaaaaaaaaaaaagcggccgtgccgtcaaaaaaaaattaggc

SEQ ID NO: 101412 - DNA, 420 bp, Zea mays
  Clone ID: MRT4577_239C.1
gggaaaaaaaaaccattggtggtggtaaaaggacccccggagagggttcccaaatttgtttttttgccccaaaaaaaagcgggggggggggggggggggggggggaaaccccctcaaaacccttttccgggtcccaatcccaggggggggggggacctcccttttgggggccttttaatggctgggaatgggggccgggtttttttgaattaatcccccactgggggggggggccttttgaagggggcccctaaaaaaccccccgggaccccatttcccccccccatttttaattcttttttgacccggttccccgccccccttgttgggcttgaccccttaccctgggagaacatggtgaaaacattttttaaacccctttcaagggcccttcctgggggggggaaccccacccccctc

SEQ ID NO: 101413 - DNA, 523 bp, Zea mays
  Clone ID: MRT4577_23C.1
cccacttttttttttttttttttttttttaagaaatcgcgtataattttctattgttgatatatgacaatctgtcattgtataataaattaggtacataatgtgtaaataggtaaatactatcatttaacaacctaatagctaaatagaaacttaaaactaacatagtatttatgtttttgttcatttaaattattataaataagtcgcctataaataaattatttataaattgatatcacacagaagaatgactgaataaatagcaattaatttcactacaaattgtttccattgtgaaaaattgttatgatttatgtatatatataaaaaaatttttaattaagtctaattagaaaccaacttcatcggttcatgaatttttgggaggaatggcactatagacgtacatgatatatattttttttgtattaaatttgtatgacaaatattgttgtttatttgttctgcatggacgttattctggtccttttagtagttggttcgtttatattgctattcag

SEQ ID NO: 101414 - DNA, 147 bp, Zea mays
  Clone ID: MRT4577_24000C.1
ggtttcctgatcgggaccagcggcatacagtcccgtgtgtacccctcaggctccttgtgcgatcttcaatcagtcagcacacttggcatccgataggtacacacgggactcgataaagctgttccatcaatgccgtgctacgtgatt

SEQ ID NO: 101415 - DNA, 218 bp, Zea mays
  Clone ID: MRT4577_24001C.1
ccggtgctgttcttgcctcctttgcggggctgggaaccttgagttcctcctatctgtttcttgggttaagaggcgttttttccccttattttctggcgactggtttctggtggtcgtgtgcgcgcccccaccttctgtctgactggtgtttggtgtccttgtggtgattcttcttcgttctctctgtttctgtaggaggataccattttggatctttg

SEQ ID NO: 101416 - DNA, 545 bp, Zea mays
  Clone ID: MRT4577_24002C.1
gggggggggggggtttttttttttttttttttttttttttttttttttttttttttttttttttttttttgaaaaacaaacaacggaaacaaacatatatcccattcaaaagggggcgggaacaaggggggacccactctaaacaaggggggggggggggcaaactcggaccactgggaaaccgggggcgggggggaggctaaaaaccaacaaatcccatccaccccacagccttgggccctaattccccataccaaaaaaatatgaagggcccatagatgggcccaaagaggagggatcccagggaaaaaaacggtacccaagccctagctttctacaacaaaaacagccccaggacgggtacccatcggcatcgggggcattgaacctctcgagagggtcaaggccccctttttcttcgggggcgggtgcttgccatcggcaaaagagaagaattttcggagaccgggcttcaacgaaaaccaccctgcgtccacgggaaaaccctggccccgggtgttccggggtcaaggaccggggtatcg

SEQ ID NO: 101417 - DNA, 354 bp, Zea mays
  Clone ID: MRT4577_24003C.1
cgggctttttctgctgcggctgctgggtgctgctttttctggacgaagaagaagaggggagcaggaaagctgaaggtgaggacatgacctccttgcctccgagtactgcagattttgcgctcccgtacagggtgaggagccagccttcgtcgagcccagtacgggatcacaaacagcttcttgacgcctcggaggaaacaagataccccacggacaaagatgttgacctcccattgtttgaactggaggtgattctggccgccacggacaacttcgcgggccacaaaaggatcggagcaggcggatttggcccagtttatatgggagttcttgaggatggacagcaggtagcag

SEQ ID NO: 101418 - DNA, 935 bp, Zea mays
  Clone ID: MRT4577_24004C.1
agcccacgcgtccggacggcccagggcatcggttgctggccggcgctgtggggacgcgggcgccggccagccaaggcctgcagctgaagctgaaagacgaccgccgccgcgcgccaccaaccggagtccggagaagcatgcttgctttctttcatgagctttcgttcttgaatctacagtctacaaccgacctcagaccccctgctacctgcacctctgtaaaataacgccgtcgccgtcgtcgccatctccctttctggtgtgcgtgtgacgcagcgatctctgtcgcagctcttgacgtctgaaccgtagctcctcccgctttgagccggcgcggggcgcgggcctcacgttccagctgccgcattgcacgtgttcagagaaagcgaacagaacagaacagaacagaacccgacccagaccctgaagagtctgaatgagtggcccatggccagtgagacgcgctgctgctggcaaatcagaggaggtgcagtgtaggcatcggggggaaaaatgtctttgggctcgtgctgcggcttcgtgcctgtcaatcgtcttcctactgttaatgtggactgtgctgtgttttccgagctgtggagagcgcctgagacgccacatcgcacgacgcggcacacatgagtacgtgacacatgggtctcggagctcagcgtagccaatccggcagcacgaaacgactggttggtgtgccagcgatgggactacgacatgacgagcgagcgcgccatcgatgcgccgtgtcgtacgctgctggcttccaggttccaatccagcccggggatgtggccggtttccgcggagaggcgcgtccgtttctggcgacctgaaatcggccgtctcatcagggagataaatcgtgtcccgtactccttccgtagcatagcataatcacataattgattgttcattgaatc

SEQ ID NO: 101419 - DNA, 300 bp, Zea mays
  unsure (1)..(300): unsure at all n locations
  Clone ID: MRT4577_24005C.1
cgtctcggtgtttggtggcaaatttttcttggcacctcgtggatggtgcggtccggttcatatgttattcgcggcggtactgtgcaaacctgtaagtcgatgacggtatgtctctctttttgcggtggtctagagcagtnggngtatagggatgcnacgtgtgttaacaatcataacttaggagaataaaaaaaggggcgggcccgctcttggggggagtccagtctggcggggcgccttgcttcctcacgtctttacctcttctttggggntcccgctaagtccatttcacgtggcgcc

SEQ ID NO: 101420 - DNA, 201 bp, Zea mays
  Clone ID: MRT4577_24006C.1
gccgaatccgtggcccgctccaaagcggaccaggggtggggcgcattggttgtgtctgaactcaaaccccgtgtactcccaacgcgacggcgaccgcggcagaggagacgccacgtaagacgcccccacgtatccgctgcacacgtggcacccaacaaagtgccaatttcaccgtattggccacatgactatggaaaccta

SEQ ID NO: 101421 - DNA, 422 bp, Zea mays
  Clone ID: MRT4577_24007C.1
aatcataggaccttaccccataaagggcctgctacttattaaaacgtatgcacgctccaactacacctcacgatcatgaatttccccatataatcaactgctacaccatgtaacctaaaggttttgtaaccaccaattttcttcgcttatcgtcaccaacaaatatttgaaactgtcgtgatcgtgatgtccaatatccatatgatctgttaaagtaagcttagtattcccggatgtaacctttaagtccaatgtactgtttgcccagcacttagaatgttaccgcatgttctatatttgaagaatataattcatttttcactgattaaaaaaaaatcatcatctaacataaatctatttcatctaatcttttatttcaacctcctttctttttttattttctataaatttattatttattt

SEQ ID NO: 101422 - DNA, 117 bp, Zea mays
  Clone ID: MRT4577_24008C.1
gccgggccgggagtaagacactagattggaggaaacgattcaacacaattgaacgagtagcacgtggatgtgaatatcttcaggaaaacgctcaatcgaagagagcgcaaccagagc

SEQ ID NO: 101423 - DNA, 405 bp, Zea mays
  Clone ID: MRT4577_24009C.1
gccggcgccggcccggttccttggtccttgacctgggaccacagctggggccacgcggccttcctgatctcggcgacggcctccccgtcccagcccctggcggccagcctctcggcctcagcgacggccgcggccaccacgtcctcggggccgccgtccacggcggcgtccacgaggccccggcgcacggcctcggccgcggccacccggtccccgcgcagcaccaggtcgcgccgggccgcggcgtcggggaccttgtcgcggagcacggcggccactaagtcgacgaacttgatgccgacgtcgacctcgctcatgtacaggagcccgcgggaggcgcgcatgagcgcggcgtcgtgcgcgagcgccagcgcgcacccggccgccgtcgcgtggcccgtcacc

SEQ ID NO: 101424 - DNA, 1508 bp, Zea mays
  Clone ID: MRT4577_2400C.1
ctgtgcggcgctcgagcggggcccccaggggggggcgggaccccacagctcccacgctcaccgacgccacagcttgtgcgcgcgcaatggcactcgtgtccgcctcctcgtcctccaccaccgccgtcgcggcgctccccaggaatgggcagcagcgggcgtcgtcgtcgttgttctcctcctcctcctcttcctccttcctcgtcggcaagacgctgctgaggcaggccgaggcagcccggccgtcgttcgccgtgcgcgccgcggcggattccgacaggccgatctggttccccggcagcacccctccgccgtggctcgacggcagccttcccggcgacttcggctttgatccctggggcctcggatctgacccggagagcctgcggtggaacgtgcaggcggagctggtgcactgccggtgggcgatgctcggcgcggcgggtatcttcatcccggagttcctgaccaagatcggcgtcctcaacacgcccttctggtacaccgccggcgagcagcagtacttcaccgacaccaccaccctcttcatcatcgagctcatcctcatcggctgggccgagggccgccgttgggctgacatcatcaagcccggaagcgtcaacaccgatcccatcttccccagcaacaagctcaccggcaccgacgtcgggtaccctggtggcctgtggtttgacccgctcggctggggctccggctcgccggagaagatcaaggagctgcgcaccaaggagatcaagaacggacgcctcgccatgctcgccgtcatgggcgcttggttccaggccgagtacaccggcaccggccccatcgacaacctcttcgcccacctcgccgaccctggccacgccaccatcttccaggccttcacccccaaatgaggagctctgatgaacttggcagttcgaggagtgctaccacacatgcatgcattgttaggtttgatggccgatatggaactttttctttttgttgggggcggactactgggtagactgtcaacgatgatgatgatgatgatgaaatgttcgtggtgcgatgcatggtgtacttgtactatgttgtaactaatgtaaaaatgcgatggtcgttagatgctatgtcctcttaattaaggcggacctacatgcaagtaaggatgcaaataagggtattcagtatttaattgaatactcattattttttgcaaaaaaatatgtatacatgtatatgttactagccagttgttcatactttgctaccattgttatatatcatataaataggtattgaaatatttgtttaaatataattattgtttatttctgaaaaaaaaaaaaaaaaaaggcccctaggggattgaatttgttttaataaaaaaaaaaaaaaaaaaaaaaaaaaaaaaaaaaaaaaaaaaaaaaaaaaaaaaaaaaaaaaaaaaaaaaaaaaaaaaaaaaaaaaaaaacaaaaaaaaaaaaaaaaaaaaaaaaaaaaaaaaaaaagggcggccg

SEQ ID NO: 101425 - DNA, 688 bp, Zea mays
  Clone ID: MRT4577_24010C.1
actctgccccgagctcctcccgcctccaatatctcgctcagactcgcaggcagtagcctcgaagatatgatcatctcatacctgctggaacatgaacaacatgctgcccattcaggtgaacgaatggtggaacccgattgacgccaagatctgcgcaacggcgcgcgatgaacatggcttcgaccctaccatcgtgcccatctgcttactcccaccttcagcacgaaacgcgctagtgcctactacaatgaacgctcctgcggacgctttgtcccccgcactgtgctcatggatcctgagactgacacaatgtacagaggcccgatcgtaccctatacgaagatcatccgccctgacaactttagctctgggaaatctgatgctggtatcaattgatctaagggccactacaccaaggcagctgtgctctttgacctctgctctgtatggtgcgcataaggacgatgataactgtgactgcctgccaggattccgagtatgccactcccttggaagctgaacatggatctgagatggttacactgacgatctaccagatcggggtacattgcctgacctcatgatgcctacattctcatgaatctcgtcactcgaagtatctgacagcgcgcttgagccaaaccatgtcagtccttctgctcaccacatgtgagagaatgctgatgag

SEQ ID NO: 101426 - DNA, 226 bp, Zea mays
  Clone ID: MRT4577_24011C.1
cccacgcgtccggggacgtaagaaggtgttcatatgttatgcacgatctactggccagtgatgatctattcgttaaccactgagctagatcgagagctaataacaaactcttactgtctgaccggcacattatggatactttttggatccgatcatggcatttccgcagtagatgaagcagattgttgacctaattgaaaatttacctggacaggaacaggtcaat

SEQ ID NO: 101427 - DNA, 507 bp, Zea mays
  Clone ID: MRT4577_24012C.1
tttttttttttttttttcctttttttttttttttctttataattggctactcatttctctaaggggatccatgtcttttgaactcactaatggggtacctaactcctcggtatggggcaatgaaagatggggagtttgcatatctactatctataaaatagaacttccccattggcacatgaaagcccagcctaaaagctgaacataaaactcccgcatcagatgcagaaccttctcaaccacatgagatgaaagtaaaatttagatcaaagtcacatgcccacatgacattctgtgacaaagttcctttcctatttctaaagggagttgccctatcttctatgatggggattgggttatgtgtgccatcaattgcaccaatgcaattctgaaagaaaggcataaaccaagggttagatgcaatcttcacatgagtttgatttgcatttggaagcttcacaaatctatgggtaagtacaggaattatatcaaagacctaatttattt

SEQ ID NO: 101428 - DNA, 451 bp, Zea mays
  unsure (1)..(451): unsure at all n locations
  Clone ID: MRT4577_24013C.1
gggtggggtgtgtttttttttttttttttttgggggggttttttttttttttttttttttttttgttttaacagttaatcatccaacagaggaggaccaaaggggaggagagtggcggcgccaggcggctttcaccgccccaacatgggggcgttagcaaggggggnccatcacaagagttttcggctgccctttacccttggcccaggcgggacacggccccccgccccaagaaggacccacctgccggccgcaaagggaaggcccgaaagacccggggggggggcccccggggcccggcccgggtggaaccggcggccaaaaccaccctgcccccctggggccccgccgggtggcgggccccgggcaccccctggggcccccaggcccgggggggaggaaattttttcttgcccgctntggcccgggggccctggaacttcgggccccc

SEQ ID NO: 101429 - DNA, 151 bp, Zea mays
  Clone ID: MRT4577_24014C.1
gttttggaaaggttggcataacttggttgaatgtctaaatttgcgtttacttaatcagcagtttcaagcaaacatatgatttataattttatataaatatttgggtcaaactttgagaaatctttagaatacacttgatagatagagatga

SEQ ID NO: 101430 - DNA, 151 bp, Zea mays
  Clone ID: MRT4577_24015C.1
aggctcgaggcgacctacgctacacgggcattaacggcaactattccgtcaacaagagcaagtgtgacaaactgtaatgctgcacgcacacaatccctgatgatctgatgaaggcaaccgtcgtaatgatcgccggtaacgtcgccgtggt

SEQ ID NO: 101431 - DNA, 365 bp, Zea mays
  Clone ID: MRT4577_24016C.1
gccgccctttttttttttttttgttaactgagaagtggtttcataagcaatggctgttacaaataatgggggcacgattttcacttcagctatactagggggtagcaaaagatggaacatttgtttcaacaaattctgtgtgacaaacaagtataatttcatatgtatgacactatgactgtatcatcgtccccaaattaccaggggcaatacatcaacaccattgcctactaacaatgggcaaagctccattttgagatccaacttcaaagaatacggaatacaactctgaacctgatatgtactaaaagtaaggtttgtagtgtagcgcccgcatgaaaaaagctaattttgattcaagccca

SEQ ID NO: 101432 - DNA, 392 bp, Zea mays
  Clone ID: MRT4577_24017C.1
ccaccggccacctctggctcagtccgcttctgtgccgcccccatggccattccttcgccagcggaggacgaggcggcggacccgggcctcactgagtgcctgcgcctgctcgaggcggtgcccgccgccgcggactcctccccagccttccgccgccactggccgtccatctccgcctcactcgcggcgctgtcggcctccctcgcgagccccgccttcccgccctccgcgccgctgctcgcgccgctcgccgccgcgctccacgcgctgctgtcctctgcgggggacgcgcccaggctcggacacctacacaccgtctcgctgctctctccacggccgcctcgctctcccagctcgccgccgacgcgcgcctcttcgccgagcccgtgccc

SEQ ID NO: 101433 - DNA, 744 bp, Zea mays
  Clone ID: MRT4577_24018C.1
cctcgaggccggccgggccgggctttccgtgaccgccccacctcatcctcggcttctctccgcggagcttcttcaacgtcgtgtgcagcctgtgcgtgtacgccgccatctgccgcaaggagggggtcgctctgcgctggccggggtgccttggctcctgggagagcttcagcaacgcctccgacgcggacctcatcgccgagcagcacatctgggcggccgtcgaccccatggccaagaaccaggcgttcaactgcaacaacggagacctttacaactggaagacgctgtggccggtactcgccgctcgtttcgggctggagtggaccgggtacgacggcgaggagaagcagttcaaggtgtcggaggccatggccgggaaagaggcggtgtgggcggagattgtcagggagaacgggctcgtggagacatgcctccgcggcgttgccgattggtggcttatcgacgtcgtggtctatgagcatggcgccaactggaagcttttggatagcatgaacaagagcaaggagcacggattcctcggcttccgcgacacagtgaagtccttcaacaagtggattgacaagatgaaggcctacaagattgttccttgaatgtaccttggattggatgtttattctggtcagtttctttgataacgctggctgcgacatcttttcagtatcaggtatatatcaaactgttcccgaggaatcaaataaagatgaatacgtttgttcttcc

SEQ ID NO: 101434 - DNA, 291 bp, Zea mays
  Clone ID: MRT4577_24019C.1
ctcacaattaaaactgacatccgaaaagaaatgtttaacaaaatttgatgtggtttggaacacaaatacattagggaacgggcgcccctatggctgaaaaaagaaaaaattttgacagctcaaaccgttacagattaactgtcacgcagttggaagttaacgaagatggttgacatctcgggagggttcaaaaaaattccgcagcgcgaaaagaatcctgttttatttacaaaaaggttccctcaacacacgctaccaaactgtacggtgaaatacacatggatgtattgt

SEQ ID NO: 101435 - DNA, 2581 bp, Zea mays
  Clone ID: MRT4577_2401C.1
ccggtcgggcccgcagactcggagcaagacgatcgtactttgtgaggctggtatcttgcacagactcggagcaagataggcctagctggttacaagccaagaacaagtagagcggtagagggaaatatctggagagggaaacaatggcgggcgaggagggtgaggcttaaggtcctcggcctgcaggtgagcccgttcgtgctccgcgtgtgcttggcgctgaacatgaaaggagtgagttacgagtacgtcgaggaggacgtatccaacaagagtgagctcctgctcaagtccaacccggtgcacaagaaggtgcccgtgctcatccacaacggtaagcccatctgcgagtcacccgtcatcatgcagtacgtcgacgagctgttcgccggccggccgatcctcccaaccgacccctacgagcgcgccactgctcgcttctgggctgcctacgccgacgacaagctgttcccagcgtggtacggcatggtgaaggcccaggcggaggaggagagggcggagaaggcgaaggagacgctcgccgccatcgagcacatggaagtggccttcgccaagtgctccggcggcaacgccttcttcggtggcgactccatcggctacgtcgacatcgtgctcggctccttcttgttctggttcgaggcggtgcgcagggttttcgacctggagatcattaacgctagcaagactccgctgttggctgcgtgggcggagcggtttgtagggactgtagaagcgaaggaggtgctgccgttgcccacggcggacatggcggtgcagtacatcaataagcttcatgcccccctgccgccgccatgagttcacaatgagtcgtgtaagtgtaaccaagcagggaaaaaggtaaatggtgcggtgctatggtccaaatttcaaccgaataatgttcaaagcttacatcgataggcttgggttgttgtcatcaaataatgtggttcagtcgtctcctctgcaataaatataaatatgattattaaaaaaaaaaaaaaaaaaaaaaaaaaaaaaaaacggcccgctctccaacgccacagcttgcgcccgcaatggcactcgtctccgcctcctcgtcctccaccaccgccgtcacggcgctccccaggaatgggcagcgggcgtcgtcctccttcctcggcggcaagacgctgctgagacaggccgaggcggcccggccgtcgttcgccgtgcgcgccgcggcggaccccaacaggccgatctggttccccggcagcacccctccgccgtggctcgacggcagccttcccggcgacttcggctttgatccctggggcctcggatctgacccggagagcctgcggtggaacgtgcaggcggagctggtgcactgccggtgggcgatgctcggcgcggcgggcatcttcatcccggagttcctgaccaagatcggcgtcctcaacacgcccttctggtacaccgccggcgagcagcagtacttcaccgacaccaccaccctcttcatcatcgagctcatcctcatcggctgggccgagggccgccgctgggctgacatcatcaagcccggaagcgtcaacaccgaccccatcttccccagcaacaagctcaccggcacccgacgtcgggtaccctggtggcctctggtttgacccgctcggctggggcagcggctcgccggagaagatcaaggagctgcgcaccaaggagatcaagaacggacgcctcgccatgctcgccgtcatgggcgcctggttccaggccgagtacaccggcaccggccccatcgacaacctcttcgcccacctcgccgaccctggccacgccaccatcttccaggccttcacccccaaatgaggagttgaacttattattagcattttgaggagtgctaccacacatgcatcgtcaggttgatggccgatatatatgaaacttcacattttttttggtggggaaggactgctgagtagactgtcaatgatggaatgctcgtggtgcgagtgcgatgcatggtgtacttgtactatgttgtaaccagtgtaaaaaggggatactcgttagatgttatgccatgttctctgaatcaacggcttgatgatttgtgcaacgcttacaatcgttttgggtgataaagggcagtcctaggctcccagcctgaaaaaaaaaaaaagaaaaaaaatgaaggattgattataaaaaatgaatatttctaaatttgggggggggggcccggcaaaaaattcccattaatgaaggaagcaaaacgggaaggtttagggggcaaagcgaaaccaaaaaaaagggggccctggaacccccttagaaaaacccagggatttttcccccaaaatcaaaacccggggtccaaaatgagggacccgttcccgaaaaacccccacccctttggccccgtactctaaattatggggcacctacatgcaagtaaggatgcaaataagggtattcagtatttaattgaatactcattattttttgcaaaaaaatatgtatacatgtatatgttactagcctcgtgcaaaaaacaaaaaaaaaataaataaatatagatacg

SEQ ID NO: 101436 - DNA, 426 bp, Zea mays
  Clone ID: MRT4577_24020C.1
cggccgcccttttttttttttttttattaaatagaattgttataattatctgttcagaaggaaaccataatgattcaatcgttacttaattatatacttaaattattcagtaatttattagaactttagtaatttacgcaagagagtggatccatctcgcgcgcgggtctcaagacggtcatgctatcatttcaccatccccaaatcccttggtggtgtcttgagttacctcctccaccttcatcttatggtcctccaattccttgaacaagactatttcttccttcccagcatgaaatggctgcatatctttctcctccggcaatgcacctaactccatcaccaacctctcaacctccatccgaagcttaccattctgagcctccaccttaccataagcatcctccaactcccggttcttcgcca

SEQ ID NO: 101437 - DNA, 110 bp, Zea mays
  Clone ID: MRT4577_24021C.1
cgagaccctggagctgctaaaggacgtgcacctgggcctggctgtaccctgccaggatcccgtcagatgagctctcctctcaggccactacctttactatcactacggtt

SEQ ID NO: 101438 - DNA, 366 bp, Zea mays
  Clone ID: MRT4577_24022C.1
atgggcattatctagccattttaaacaggttcattgggaccctaccacttgggatgacaaaggctgcccgctagcacactctatatttacatatcccatggcgaccgaccgaaagcacaaagtgtacgtcatgcaagaacataagccttataggcggcatggcatattttagagggccaaggattatatcacaatgtggtacttgcggtaaaccaggtacaaaggcgaaacccagtataactgcacacctaagtacacctgccacaaggacgatcaggaggatgctagataacgcttcctatcagcgaggcgggtttccgaggccagggaacaaccatccctgccggagtggatactttttccttg

SEQ ID NO: 101439 - DNA, 246 bp, Zea mays
  Clone ID: MRT4577_24023C.1
tgtctacattattttgtctcgtcaacattgtctattattacttaagcaatatggctgtagctactttaaaaggacaagcactgtcttattagttcggtatcaattttttttaaactagtgctaatactaacctgtatgatgatcaagtgtttttctccattttacgtgacatcattcatttgcttgcttatactgattcatagccttaggacaatgcattcataatttatatgccataccagtgtt

SEQ ID NO: 101440 - DNA, 137 bp, Zea mays
  unsure (1)..(137): unsure at all n locations
  Clone ID: MRT4577_24025C.1
cgatagaccacgcgtccggaccagctttcgatccaacagacaatggctaccagtgcatcacgctaatnccagccggtggtgcatgttctcgctcggttcgtttcccatgctcgcggaatagcgctacccccaccagc

SEQ ID NO: 101441 - DNA, 849 bp, Zea mays
  Clone ID: MRT4577_24026C.1
gtgctccagtgccgctcgggcatgacaagaaagaggaggagatggtgctgccaagagaagccaagtgcagtgacatggctgctcttccaaggagcgggcaatgatggcaagaaagccgtgtctaaggagctcgcaaggctcgtattcggttcctacagcaagttcaccgccatctcactatccgagttcacccacgtccactccgattccagctccggcgagatcacgttgaagaggcaaagatcactggacactgggcgtagctacgttcagagattgtatgatgcaatactcgaaaaccctcatcgggtgataatgatcgacggtgttgagcaactggactacgagtcagagatcggcatcaggaatgcgatcacaaatggaagaattaggggctgcaacggcgacgagatcagtctgggggatgccatcatagtactgaattgtgaagcactccgttcaatgtctaacgcttcctcccctcggctcaagcaaagggtcatcgagaaggatggaaaggaaggaaatgacatgaacatggagaatgggatggagtcatctggttttaccttggatttgaatgcatgtgccgaggattgtgaagggaactatgaagagagtgtttcagataatgcgaggatcgttaatattgtggatggcgtgttcttcttccaattaatggagcactcatgacattgtattattgcttcatttgcatcttcaagttagcctagaattcttagttattagttgtttttctttgtatttgtcctttatttgtcctagatctgtagctgatccttatatttattggtaatttgtgttatgtatagttaaaaaaaaaaaaaa

SEQ ID NO: 101442 - DNA, 478 bp, Zea mays
  Clone ID: MRT4577_24027C.1
atccccattctcttacgatgatcaatctttttcgttctcaaaatctctcgaccagaatgcggatagtttatctcatgggctcgccagccatcatgaactactggagagaatgtcttgtaaccgtcttatctgatgatgttttcattacttctctgtttaatctttatattaactttttttttttttataaatattattaattatatattttttttatttcttatttttaatttctttttcttatttttgttttatatttttttaaacttaattttttttatatattttatttaatattttctctatttatttaatatgttggttttaatttaatttattttatttttttattttatttctattataaattatattattttttttatctctcattttttatttataatatttataattttttttttttatttttattttaatatatatattattatatattattattttttatattttt

SEQ ID NO: 101443 - DNA, 399 bp, Zea mays
  unsure (1)..(399): unsure at all n locations
  Clone ID: MRT4577_24028C.1
attgtccaatccttcttcgncgcgtggggttacgcgtccactgaatttatacatacatttatcttatttatttcctttttatatcgccacccaatgtttgtgggaacatcgcatttcctcaaacataggggatatatgaaatcaaaaaaaagggggggcgaggaaccaaaaaaaaaccatgtgcatggaaaacaaaaaaaacctttttttttatttggaaggttttatttcaaaaaaaaaatttcactggggggggaaaaatttttaaaaacggaaaatgccctaaaccaagtttactgggcctttgggggccaaaaaaaaaaccggggccctaaaagtttgtgtggtgcaaaaaaaaaaaaacaaggggcctatttaaacgcttgtagtttttaaaaa

SEQ ID NO: 101444 - DNA, 566 bp, Zea mays
  unsure (1)..(566): unsure at all n locations
  Clone ID: MRT4577_24029C.1
gctctcatgaatgtcttcataagtgtagtgtatgtcacaacatctgggctcataccactatccttgatatgctgaaatacagctagtgcctccaaatgccttccagcagtgccaaaagcattgattaacgaattcagcataacaaggtttggctcaaatccttcttcctccatcaactgaagtacatttacagtttgttcacacagtccctgctgcattggggcaagcttattaattgtactaaacaaaaacctgaatgctgtttctcaaatgcactatatcgtaaaaaaatcctggtccaagtacagtactgttgagcataagcgtttgcaatgacacaaaatacacgaggcaaaagctgtgtattctcagctctaagagcagctatacangtcctgtgcatcacgaaaatggccatacntgcccgtaaatgtcaaccaataattgcgtacactgcgccactctccttgaaacctcgattgttcatgccatcaaacaacttcttaatctcatcccacttccctttgntcccccaaccggctgatgatcataacaaatatctttgg

SEQ ID NO: 101445 - DNA, 305 bp, Zea mays
  unsure (1)..(305): unsure at all n locations
  Clone ID: MRT4577_2402C.1
tagcctccgcctctccttccgtgtccgccgtcgtgcgctcgctacccctctgctgcaggcctttgccggcgaagagcgcccagtcgcccaccaggatgaagtttgttgctgcctacctgcttgctgtcctcgctgggaactccagcccctctgccgaggacttgacagccattctggagtcagttggctgtgaagttgacaatgaaaaggtggaggtgggggtgtcccaactgagcggnaaggacattaccnanctcattggggagggcagggagaattttttttnanncccatgtggcggnggc

SEQ ID NO: 101446 - DNA, 225 bp, Zea mays
  Clone ID: MRT4577_24030C.1
cccggatttccgggttgacccaagccttccgggaagaaaccagggggggccccgttcaaaaaaattggtggtggccctcggcaagacccgtgaataaaatgcctttaaggaattattgaactttgctggccttgggcctgttaaggggaaagttaataaagcgggactttcctcacgtcgccggtttgtgttttttggaagtttaatttggatcttggtttcccg

SEQ ID NO: 101447 - DNA, 182 bp, Zea mays
  Clone ID: MRT4577_24031C.1
cgcacaccatcactgcaactctctgctttcctcgccggaactgcatgcctgggagcgggcgatctaccatccgccgacgcgcacggccctgatcgccagcgaggactgacagcatattcagcgtttgctaaacaccaacgtggatgggaagcaaacgatcatgctagccatgacctcaatca

SEQ ID NO: 101448 - DNA, 403 bp, Zea mays
  Clone ID: MRT4577_24032C.1
aattgggctttttttttttttttttgttacaacattttttatgggaatcttctttttataataaattgacttgtttttttgacactgaacaacaaaaccagaaaaaaacaaaaccccgagaaaacaaaccgtgcaaaaaacatggcgaggggaaaacccaaaaaagttttatgggggggccaccatactaaacaagccccaaaaagggccggcgcacccggactcgaaggggaaacacaaccgggccaccaaaaaaaaaaacacaagaagcccgcaccttgggtgccgccaaaaagcaagcaccgtgcaaaaaaaacccctcccgcatcatgttaccccaaacaccccccatttatctttggccaggtacagtccccccccccagcggcaaatcacttggggc

SEQ ID NO: 101449 - DNA, 2302 bp, Zea mays
  Clone ID: MRT4577_24033C.1
gccggcctcagcttcctccttgtggtcgtggtcgtggccccgccgtcccgtgcgccagcgccaagtcgaggcacgcggccagtggtgccctcgtcctcgaatcgtcaatgagcaccggcgccgcgcccctcctccactctacccgcacagcgcccctcgcccccacaccccaacccaaccatccgctccttgtcgccttccgacgctgagtttgctggtgtcgatttgcgccggcggatgctcgatctggtagctgcatgtgccgacctactcgtcgaatccgttatctaacgtaatggatgggcaaggcacaaagcacaggattttgatggtgtccgactttttctttccaaactttggtggggtggaaagccatatctactacctgtcacaatgtctacttaagcttggccataaggttgttgtcatgacacatgcatatggaaacagatctggagtacgatatgtcacaaatggtttaaaggtctattatgtaccatggaggccattcctgatgcagaatacacttcctacactatccttgacgtttccaattgtaaggacaattattattcgagagaagatttctgtcgtgcatggacatcaagctttttcaacactgtgtcatgaagcattaatgcatgctaggacaatggggtacaaagttgtcttcacagatcactcactttatggttttgctgatgctggaagcattcacatgaataaggtgctgcagtttactcttgcagatattgatcaggcaatatgtgtctcacatacaagcaaagagaacactgtcttgaggtctgggatatctccagagaaggttttcatggttcctaatgcagttgacactgcaatgtttactccctctcccaagcgcttaaactgtgatgaaatagttattgttgtggtcagtagattagtataccgaaaaggcgccgaccttcttgttgaagtcattccagaagtgtgtcggctatttccaaaggttcgctttattgttggtggtgatggtccaaaacgtgtgcgccttgaagaaatgagggagaagttctcccttcaggatagagttgagatgttaggagctgtacctcatgctcaggtgcgatcggttctgatatctggacatatatttttgaacagttcactcacagaggcattttgcatagccattctagaagcagctagctgtggactgttgacagtgagcactagagtcggtggtgtccctgaggttcttccagatgacatgatagtacttgcagaaccagctcctggagatatggtaagagctgtcaagaaagccatcgacatgctacctggaatagacccccagattatgcatcttcggatgaaagaactttatagttgggacgatgttgccaaaagaactgagattgtttatgatcgtgcaatggaatctccaacaacaaatttactagatcgccttcctcggtatcttacttgtggatcttgggctggaaaactgttttgcctagttatgatcatcaattacctactatggcgccttttagaatttctacagcctgctgtaggtattgaagaagtcccagatatagggccactacatgctcatttaggttcaaggaatgatgaggctcaagagaagtgaaacttaaatctttgacagttttgaaatggttggggacttgaggtggcagtcatggtatcttctgcttgtcagcattcgttctgatccacatgcagtatatgcctttatgatatggcccccgcacagcattttctcttgaagcttcccgtctccgtagtcgcagctgaaagagagtggaacgccttgatttgtaggatttcttgtcatgctggttaaagctatggtccgagtctctgtcattgccagcttcttttttttttcttcctctgcgtaatgcgtagtgagtggatggcctgcgttttaggcacgtcatcaaaccaattatctgctggaacgttggtactctcttgccaccatattgcaactagaagtcttgattggcatgttgccacacaaattcctactatgtttgatgtcttgtatcatgtcggagcaccaattcctgctgtgtttgtgatgtaataatgccaattccaaccagcgacgtgagaccaatctgcatggatccagtcgataatactttttgaatataaaataagtgcaatctcttttcggccctgtttggaattcaagactggcctttgaattgtttgataagttcgtcaaatcctcaaaaacaagtacacaagctttgtctatgaaatacccttatattcttttggataa

SEQ ID NO: 101450 - DNA, 235 bp, Zea mays
  Clone ID: MRT4577_24034C.1
ccagcgtccgaaaaaaaaaaaatagaataaaaaaaaaaaaaaaagggctatcgtctgggggatcctatcttaggtccacgctcatgcacacttgtatgctgattatataatgtctcctatagttacacctactgtccatcgatttacacctcgttttactgcgaaatcactggcaaaacccatgttaatcgcatcttaatacatcttgcatttcatcatctgtttgtactacctg

SEQ ID NO: 101451 - DNA, 1409 bp, Zea mays
  Clone ID: MRT4577_24035C.1
gacactatcgaagagctatgacgtcgcatgcacgcgtacgtaagctcggaattcggctcgaggccaagtcgaggcacgcggccagtggtgccctcgtcctcgaatcgtcaatgagcaccggcgccgcgcccctcctccactctacccgcacagcgcccctcgcccccacaccccaacccaaccatccgctccttgtcgccttccgacgctgagtttgctggtgtcgatttgcgccggcggatgctcgatctggtagctgcatgtgccgacctactcgtcgaatccgttatctaacgtaatggatgggcgatgttgccaacaaagcacaggattttgatcgtgccgactttttctttcatccgaagagcataatctgggggtctattccagggtatgcatcttcggatgaaagaactttatagttgggacgatgttgccaaaagaactgagattgcttatgatcgtgcaatggactctccaacaacaagtttactagatcgccttcctcggtatcttacttgaggatcttgggctggaaaactggtttgcctagatatgatcatcaattacctactatggcgccttttagaatttctacagcctgctgtaggtattgaagaagtcccagatatagggccactacatgctcatttaggttcaaggaatgatgaggctcaagagaagtgaaacttaaatctttgacagctttgaaatggttggggacttgaggtggcagtcatggtatcttctgcttgtcagcattcgttctgatccacatgccagtgtatgcctttatgatatggcccccgcacagcattttctcttgaagcttcctgtctccgtagtcgcagctgaaagagagtggaacgccttgatttgtaggatttcttgtcatgctggttaaagatatggtccgagtctctgtcattgccagcttctttttcttcttctgcgtaatgcgtagtgagtggatggcctgcgttttaggcacgtcatcaaaaccaattatctgctggaaagttggtactctcttgccaccatattgcagtgatttagcaactagaagtcttgattggcatgttgacacacaaattcctactatgtttgatgtcttgtatcatgtcggagcaccaattcctgctgtgtttgtgatgtaataaggccaattccaaccagcgacgtgagaccaatcgtccaatctgcatggatccagtcgatgatacttttttgaattgtttgataagttcgtcaaatcctcaaaaacaagtacacaagctttgtctatgaaatacccttatattcttttggatatatcggagtttatctacctatcataatgaactctgacttctccgtctcttcctgtagctacctcagggctaaattaatggattcatgttggttcagcc

SEQ ID NO: 101452 - DNA, 202 bp, Zea mays
  Clone ID: MRT4577_24036C.1
atcagactgccatccattcccttcggctttgcaactcaaggtcctctaccttgataagctcaaagttttacgtgaacaagaattgccgtgggtccctcaattttatttctaaagaaaatttgaaacaagggtttccttgtaattccctttgaagatggtaagcaatctaaaattctatgtaagatgttaaattacactcagg

SEQ ID NO: 101453 - DNA, 466 bp, Zea mays
  unsure (1)..(466): unsure at all n locations
  Clone ID: MRT4577_24037C.1
ccccgcgtccgncccacgcgtccgaaaaaaaaaaaaaaaaaaaaaaaaaaaaaaaaaaaaaaaaaaaaaaaaaaaaaaaaaaaaaaaaaaaaaaaaaaaaaaacaaaaaaaaaaaaaaggggcgggccgtttttatggaacccaagtttccttacgtcttggcgtgccgacgttcttacactcttttttgtagggggacacaaatttacatttcactgggccttgtgttttacaacggccgttccttggttaaaaccctggggttaccccaacttaaaagggctggaagaacatgccctttttaacaggttggcgtattaaataagaggcccgacccgctctcctttaccaacatttgcccagcctgattggctattgcgcccccccttgtagcgtcactttaaccccgccgggtgcccggttaactcgcaatgtgccctttctttttgccagggccctagggcct

SEQ ID NO: 101454 - DNA, 426 bp, Zea mays
  Clone ID: MRT4577_24038C.1
atcacctcgaccgttgagatctaacacgcacgcggcagcatggcgtcccggaaccgggcgcaattctaccataagtacctggacacgctggggactactctgtcgccggccggggtgacatagttgttcactataggcgggggttggagagggacggtaatgcagatggcctaactcctgcgctccgacaagacttacccgctcatatacatcacctacccctcctaatatgagagagccacttctactgctgggctaccatcagcctggctggaagtctctctatagatatcagggaacatgcctcggtcaaagacaacaatggcgtgagtgactaaggcgcatgcaaaatccttaatgccgtcctttagcattggcagggacgacatacgagccattgaggtgctcacccacgaggtagcggac

SEQ ID NO: 101455 - DNA, 246 bp, Zea mays
  Clone ID: MRT4577_24039C.1
ttatgtgcttggtacactgtagagacgcataaatgacttacccatacacacattccatagatatagtttaccagtaccgcctaaggaagtctcaatatagatgacgtcgtaaccaaaccaagtcattacgacggttacgaccataacatagaggccgaacttcgatagtagatcgccagggtacgaaccggacacaatcgatcgagaggggtacatcacgcggatacggattaaaccaaagtcgtc

SEQ ID NO: 101456 - DNA, 426 bp, Zea mays
  unsure (1)..(426): unsure at all n locations
  Clone ID: MRT4577_2403C.1
aaaaaaaaaaaaaaaaaaaaaaaaaaaaaaaaaaaaaaaaaaaagaaataaaatttgtaaaggtaatttataaaaaaaataaaaaaaaagtttgggcttgtgcctgggaccgcgcctaagggggagagtttgtgtttatttccttttccactgggagggggagtcgagcttgacatttgttgggcccgggcccgccctctccctttggggggtttttttgaaattcccttccctttggggtgcccgtggctgggacaatcaaggccctcccttcccctttttggtgggcctttaaacactttttgcctgctgtttttgccgtngtggagggggagacccgtgggggttccccatttaaaggcctttctgaatggcctgggttcgccccctgggttgtccattaaagtccccgcgcggggggctttc

SEQ ID NO: 101457 - DNA, 1668 bp, Zea mays
  Clone ID: MRT4577_24040C.1
atggcgccgagcaagctccggcaggcgatgggcgcggccaaggaccagaccaccatcgccctcgctagggcgagcgccgtggacgaggtggcctcggatgtcgaggcgtccatcgtgagggccacggcgcacggcgagtccgtccccgcagacgagcgccacgccgcggagatcctcacgctgacgcgctactcccgcgcgcgcgtggccgcgtgcgtggcctccgtgtcgcgccggctcgggcgggcgcgggcgtggcccgtcgccgtcaaggcgctggcgctcgtgcaccgcctgctcgcggagggggacccggcgtacgagcaggaggtgttcctcgccacgcggcgcggcaggcgcatgctcgacctgtcccggttccgcgaccgcgaccgcgaccgcgcgcggtgccgcgactggtgcttcgccgcgttcgtgcacgcctacgccacgtacctcgacgaccggctcaagcaccggatgcaggcccgcggagcatgcggggccagcccgggcaaatggcacgtcgacggcgaccctgacgcgatggcgtgcgaggtggccgaggcggcctgggagctcgtgccgcggggaaggtcggcgtcggcgacggagacggcggcggcagaggatgtcgtcgggaaggcgcagcagctgaagcacctcctcggccggttcatccagtgccggccgacggggaaggcgaggacgaacccggtggtgacggcggcactgtacaggctggtgaaggagagcgcggcgatgtactgcgagctcacggaggtgatggtcgtgctcttggaccgcttcgccgacctgggcactcctgcctgcgtgcgcgtccactccatcttcaccagcctcgcgaagctggtcgacgagctcgacgacttctactcgtggtgcaaggccaccgacgtgtgccgcccgtcggatatccccgagatacaacgcgtcaagcagacgaatctggacctcatggacgagttcatccgtgacaggcaagcgtcggcgtccccgtggggccgctcgccgcctacccccatcaagaagaacgacgtcagaggaacagagccgacgccgaaacagcagcagggtgttgcgccgaaggagaacagtgccggcaaggctgcgccggcggaacctgctacctcacccgtcgtcgtggacgtggtccacgacgacaagacagccgacttcttgaacttgggcgaagacgcatcgccgtcatccggcgaagaagagcatgggatgaatctgacactggcactgttcgagggtaactcggcggaggctgcgccgaaatgggtggcgttcgatgattcagaagccgactgggagacggcgctggtgcagtccacaagcacccagcgatcggagctcggtggcggcttcaacacgacgaccgtgacaagcacgcgtgcgttcaccggaagcgcaagcagtatggcaacgcagccgcttggcgcgacggtgcttgccctgccgccaccgcttggggccagcaccgcaagggccgatccattcgccgcgtccctggcggtgcctccgccgatatgtgttcagatgacggacttgcagacaaggcagcggctccttatgcaggagcagaattcatggcaccagtatgaaatgcatagggcagcctggagttacaatctgctgtaa

SEQ ID NO: 101458 - DNA, 527 bp, Zea mays
  unsure (1)..(527): unsure at all n locations
  Clone ID: MRT4577_24041C.1
ccgggtncgnacccacccgttccgctttgccctcgcgccgccgacaacgcgaccgttggggggccaatcctcacacaaccagggtggcgcgcaggagtccctactctctgcgtggagcactgatgctgcgcgccagcaaccggcgcagggtgtacggtcggatacgcctaccctcgatcgacaactccggcgttcatcgtctcctcctcccgcgacagggcgctgctggtgtgggacctgaccaacccggtccactccaccccggaatccggcgccaccgacgactacggggttcccttgcgtcttctcaccggccactcccacttagtgcaggacgttgtgctcagtacctacggccacatcgccctttacggctcctgagatggagagctcctcctgtgggacctgtgcaccgggctcaccacccgtcgttttgtttgccacacaaacggacggcctctccggagccttctgcgctgacaaccgccagatcggatgcgcattccgcgacatgaccattaagctct

SEQ ID NO: 101459 - DNA, 1410 bp, Zea mays
  Clone ID: MRT4577_24042C.1
cttgatccttatcagtaggtaaagttcagatgagggtatatgatttattgattgattgacgtcaccattagcaatataaaacgtgcgcccactcgcccgaaaaccacactgtcagtcaggcgctggcagagagcaccttctccattcttctgtttttttctcagttctcactccatggccgccgcggcctgcaacccagtggctccttccgggcctgtgccgttcaaggacgtcgacgacggcagtgttccagagcacactcccaaggaggagttcggcgacctcgtggccgcgctgccgagcaggcagcagtccatcctggagctgcgcctgtaccagggcttctggctgccggagcactgggtgccggggaccatcgtgttccagcgccgcttcacgccgcgccccgacgacgtgatcctcgcgagctaccccaagtgcggcaccacgtggctgaaggcgctggccttcgccacggcggcgcgtacggcgtacccgcccggtggcgccaggcacccgctccgacggctcaacccgcacgactgcgtcccgttcatcgacgagatcttcgccagcggggaggaggcgaagctcgaggccctcccgtcgccgaggctgatgaacacgcacctgccctacgccctgctcccggcgcccgtcaccgccaccgccaccgggtgcagggtcgcgtacgtgtgcagggaccccaaggacatggtggtctcgctctggcacttcctccggcgcgccaagccggacctcttgttcgccgacacgttcgagtccgtctgcgacggcaccgtggtggccggcccggtctgggaccacgtcctctcctactggcgtgcgagcgtggcggccccggacagggcgctcttcctcaggtacgaggacatgctgcgggaccccggcggcaacgtgcggcggctcgccgagttcatgggccgcccgttctcggccgccgaggaggccgccggcgacgtcgcggccgtcgtggagctctgcagcttcgacgagatgaaagggctggaggtgaacaggcctggtagcggcaccgcggggaggtaccgccccatgccgcgcgacgccttcttccggaagggtgtcgccggggactgggcgaaccacatgacgccggagatggcggcgcggctggacgggatcttccgtgaaaagctccaagggacggggcttatcttctcataatgcaaatgtgtatacggctcttgatttgcgtggtcatctcttctgatcttttccgtggtgtcttgtgtttacacgagatatgttagatccaaaataagtggtgatgatttaatatatacatcatgtgcatcaatctcccatgtacactagatatgttctcccttttaaatcgttcacccgaatttgatcaaattaattatccat

SEQ ID NO: 101460 - DNA, 1322 bp, Zea mays
  Clone ID: MRT4577_24043C.1
attgggtacctcgaggccggccgggcggcgcagagaggattggagctggacgacgagagcgcgcccatccggacccggacagagctcgcctgcgcctgcgcctccaccgatcggcaagcgggaggggagatgaggggttcgtcgcggaggccggtcgccgtggtgatggcctgggtgcggcgccagccgcccaaggtcaaggccttcctcgccgtcgtcgcggggatggccgcgctcgtcttcatccgcttcatcgtccacgaccacgacaacctcttcgtcgccgccgaggccgcgcacgcgctcgggatcgccgtgctcatctacaagctcaccaaggagaagacctgcgccggattgtcactcaagtctcaggatttgactgcattatttctggccgttaggttgtattgtagttttgttatggagtatgacatccatacaattctggatacagctgcacttgcagctactctttttgttatttacatgattcggttcaaactgaggtcaacttatatgctggacaaagacaactttgcattgtactatgtggtgctaccatgtgctggactggcactacttgttcatccttcaacatctcataacattgtgaaccggatctcctgggcgttctgtgtttatttggaagctgtttcagtgctgccacaattacgcttgatgcaaaatactaagatagttgaaccgtttacagctcactatgtatttgcgttgggggttgcaaggtttcttagctgcgcccactgggttctacaggttttggatacgcgtggccgtctgctgacagctctcggctatggcctgtggccgtctatggtgctgttttcagaaatcgtgcagacattcatccttgcagatttctgctactactatgtgaagagcctggttggtgggcagctggtgctacggcttccctcaggggtggtgtaagagaagtgcaagctgcagcagaacacaaaactttagtgcttcaccggttcatatgtactttgagtagtgcccaacctgggagccttttttagttgatgttacgagttatgactatatgtatggcaaaattgctgcaagggtcctcttaaaagataggttgacattgagactgtttatagctgcgcttttctggatacccaatctttgggtacttggcttctgccgtatgactgtcgtggtcttaggatcaggtggttaatggtctctttggattagacaattctagaatgctttcataaattgatattgatctatgtaaaaaaaaaaaaaaaaagtcccctagctacggtcatcaggtcgtattcacttta

SEQ ID NO: 101461 - DNA, 1662 bp, Zea mays
  Clone ID: MRT4577_24044C.1
accacacgtccgcccacgcgtccgcccacgcgtccgcccacgcgtccggtcgcgctcgcgcggcggctctcatccctagcttcaccccatccgtcgtctgatgccagccgccaggaaccgctcggttctctcgcagggagccggagttacaagagcgcgaaggtggcagcgaagaggctggaagaggcagcgctctcctgcaaaggggacgaacgggtgcagctgctgcgccggtggctcgtcgcgctcaaggagacccagcgcgcgaccacggtggtccgggagccgcaacttggggacaatctggaccagactacgcccctgctggatttgtacatcgattacgacagcggtgcggagccgatgaactttttccatgtcttcctctacagtcaagccctcgagtgtgttgttctctcttgagcgttattagtgccgccaagccagctatagccaattatccttttaccacattgctaccgaaccttggtgtggtctcattagattttgatgctacaatggtagtttctgaccttcctggcttactggaaggcactcatcgtggttatggtttgggtcatgagttcctaaggcatagtgagcgatgctctgtattggtgcatgtcgttgatggttctgcacaacaaccagaatatgagttgaggcagttcgcttggagctggagttatttagcccgtctctggttgacaaaccgtatgtggtggtgtacaataagatggaccttccagaggcatctgatagatggaatacatttagggaaaggctacagtctgaaggcattgaacctttctgcattagtgcaataaacaggcagggcacacaggacgtcattcatgctgcttacaagcttctgcagaaagagaggcaaaggatgaaggaaactgaaggatggagcgggacagaaaatctgaaccacgtgtctgaggcaataaaaaaggaaagacgtgcacccatgaatgagtttgaggttttccatgataagggtacaaatacatggaatgttgtcggagctggaatccagcgtttcgtccagatgactaactggcagtactcggattccttgaaaaggtttcagcatgccctagaggcatgtggcgtgaaccgggctcttatgaaacagggagttaaggagggtgatacggtgataattggcgagatggaaatggtttggaacaacgaaacggatagagcacgcccgtcaaagacgatgaacacgcaagatgatgctgtccgttggcccgaatttggctagagcagcaatagttcttgaggctcttcgcacctgtagaggaagatgccagtgggttgacgtgcatgaagcaggatgcagatctttggcatggttgttttgaggagggccacgggtgggcggcgcggcacatgttgtagagaagttgtaggggaagatgagcacgacgctcgacgcggcgatttattaaaatgcttgtatacaacggtgttagtacgcaaacaaaacaatgatagattcaatacacgtagctcgctcttgtctgatgtagtcattgacaagtttgatcttagagcgattgaggctgattcaatttctaacctaacccatgagaaattggatagggctctcgtgttaactgaatatatgcgtttaaatatcctttggtattt

SEQ ID NO: 101462 - DNA, 1445 bp, Zea mays
  Clone ID: MRT4577_24045C.1
gcgaaccgtcgcgaacaacacccaaccccgcaccccaccccacccccaaagacgacacagcgagcgagcggcggccggagccggagccgaggccaggggcacgaaaacggcgtcgatgcagagctggcgcaaggcgtacggcgccatcaaggacaccaccacgtcagcctcgccaacatcaactccgacttcaaggatctggatgtggcgatcgtgaaggcgactaaccacgtggagtgcccgcccaaggagcgccacctgcgcaagattgctgcggcgacgtccatcgcgaggccacgggcagacatcgcctactgcatccacgcgctctcccgccgtctctccaagacacgcaattggattgtagcactgaagacacttgtagtggttcataggcttctacgagagggcgatcctacatttcgggaagagcttcttaattttacacaaagggggaggattctgcagctctcaaacttcaaggatgactccagtccaattgcctgggactgttctgcgtgggttcgcacatacggtcagtttttggaggaaagattggaatgcttcaggatcctgaaatatgatgttgaagctgagcgtttatccaaacaaggccaaggtcctgaaaagggacacagtagaaccagagacctagattcccaggatctgttagagcagttgccagctttgcagcagttactgtatcggcttgttggatgtcggccagaaggagctgcaaataacaactacttggtgcaatatgctctagctttggtgctaaaagaaagctttaaaatttattgtgcgataaatgatggaattatcaaccttgttgataaggtaaaggctagttttcacgtgggaatatcttgcacaccctgacaatgtgcacttatgatggttttcattttgtccagttttttgagatgccaagacatgaagcacataaagctcttgaaatatacagaagggctggccaacaggtaactccagagtccagaagaagatgatatttgagtactcctaggctctaaaaagatcaaaatactatgaattttcaagattatttgacacatttgtcaggctggaaatctatctgatttctacgagaattgccggggtttagaacttgcgaggaattttcagtttcccactctgagggaggtgaggagttataccgtctgtctagttttgactatttgcactggattatgttgtgacatctcatgtgagaaaattctcagccgccacaaacatttcttgcaactatggaggagtatgtgaaggaggctccacgcatggtcccagttcgagaacccctggaacttcctgagaggcttcttcttacatacaaacctgaagaatcggaggacattcgtgagcctgcttctgttgaagaggaaaatgcaccagttgaagagcctgttctgggtaccacctgtact

SEQ ID NO: 101463 - DNA, 1365 bp, Zea mays
  Clone ID: MRT4577_24046C.1
aagtaaatacaaacctgatgaccttggtccaaccattttcacgtggtctagttctgctgatacatcaagatcaatctgtttcatatgaaagcattatagaattatataatccaatgagatcactaaccacctgattctaagaccaccacgacagtcacaggaagctagtactcggagattgggcatcaagaaacggcgcagctatgaagtctcaatgacaaactatgttttaagagaacccttgcagcaattttgtcatacatagtcattacttgcaacatcatcagctaaaaaaaggctcccaggttgggcactagagcataactgttattcagagtatctcttctgcacttcttacaccacccctgagggaagccgtagcaccagttgcccaccaacaagactcttcacatagtagtagcagaaatctgcaaggatgaatgtctgcacgatttctgataaaagcaccatagacggccacaaaccatagccaagagctgtcaacagacgaccacgcgtgtccaaaacctgtagaacccagtgggcgcagctaagaaaccttgcaactcccaatgcaaatacatagtgagctgtaaagggttcaacaatcttagtattttgcatcaagcgcaactgcggcagcactgaaactgcttccaaataaacacagaacccccagcagattctgttcacaatgttgtgcgatgttgaaggatgaacaagtagcgctagcacagcacaaggcaatatcacatagtacaaggcaaagttgtctttgtccagcatatatgttgacctcagtttgaaccgaatcatgtaaataacaaaaagagtagctgcaagtgcagctgtatccagaattgtatggatgtcatactccataacaaaactacaatacaacctaacggccagaaataatgcagtcaaatcctgagacttgagtgacaatccggcgcaggtcttctccttggtgagcttgtagatgagcacggcgatcccgagcgcgtgcgcggcctcggcggcgacgaagaggttgtcgtggtcgtggacgatgaagcggatgaagacgagcgcagccatccccgcgacgacggcgaggaaggccttgaccttgggcggctggcgacgcacccaggccatcaccacggcgaccggcctccgcgacgaacccctcatctcccctcccgcttgccgatcggtggaggcgcaggcgcaggcgagctctgtccgggtccggatgggcgcgctctcgtcgtctctggcccgtgcgcggcgtgaggacctgactcctgagctggggaagcctgggacggccggacgggcgaggcggtggagtgttcccggccggcctcgaggtatacaatg

SEQ ID NO: 101464 - DNA, 172 bp, Zea mays
  unsure (1)..(172): unsure at all n locations
  Clone ID: MRT4577_24047C.1
ctcgagccgccngnctctcgcctcaacataccgcggcgacggtaacgactaccgcgcgagcgccgccgactccctattgcagcaggtgcctcggccttcgtcgtgctctccgccggcaacgagtatagacgaacgcgcatggccaccatcgagcagtaggggagggcgataa

SEQ ID NO: 101465 - DNA, 195 bp, Zea mays
  Clone ID: MRT4577_24048C.1
gagaggcattctttattttattttacaaaacagttcatgattacaacagcaactcgtttataaattataacattcagggatccttaaaaaccaggtagtttcaaaacattacaaacagattgctttatgaaaaaaaaaaattaaacttggaacagcacattcagggggtttatgccttggcagaattctgggcag

SEQ ID NO: 101466 - DNA, 375 bp, Zea mays
  unsure (1)..(375): unsure at all n locations
  Clone ID: MRT4577_24049C.1
gactcctgcngtctagcatttggcattctccgacgagganctcctgcgggggctggtgcgggttccaatgagcccggcgcnncctatcctgtcgccgaggcagaggctgctgctcccgaggagctcgccgcggacgagccggaggctcctgctcctgctggtccccaggagccggccgccgaggcgcaggctgctgctcctgaggagcccgagaaggccagcgagtgaggccgtgcgcacgcagcggcggccagggcccaggggatcggcgtgcgcgcgtggcggcgtagtcgctcgcgcgcgtcgtggcatatgacacgggatttgctgtcagtacgctcgttatactggcgtttctgtgtggggtgcgacgta

SEQ ID NO: 101467 - DNA, 274 bp, Zea mays
  Clone ID: MRT4577_2404C.1
atttttataagctttaactatgtatctagacataacgcatatcgaagtgcatagaaaatactatgtatgtagaaaaaatattacatatgataattgagaatggagggtgtagtaggatatagctgcctcaatgctaagatacagttatctagcttgtcagggtgatgtgaggatattagcgatgatcctaacagacccatgtagaatggtctgttgtggaatagtactatcctctatctattgcttgtcaggttgatgtcaacggtagcaatgc

SEQ ID NO: 101468 - DNA, 356 bp, Zea mays
  Clone ID: MRT4577_24050C.1
acgatgccgcggcgtaagcagctagcattctatacagcccacccacgcctcattttgtccaacgtcgacgaactgcaggggggagttagaaccaaagcgcgcgcagcacacgacgcaagaactctgtacctttacgggggcattggacatggcagccaatataaaggacgtgccggctttggatctgatgcactaatcgctcccatggatgaatgacggctgcaaaccggacaagcacctcatcctcatcggcccacctggcattgaaagggtctaaactccctgtataaggaggaatattgcctgtgccattgatccactgcaaagatgttgatggctgctgaagcaggcaagac

SEQ ID NO: 101469 - DNA, 474 bp, Zea mays
  Clone ID: MRT4577_24051C.1
ccgaaccggacgggtccgggtagagcccacgcagtccgttcggcaaaggcggtggtggtcttggcggaggttgtggctacggtgctggtggcggcgggggccttggtggtggaagtggacatggcatgggtgccggattcgtcaagggtggtggtattggcggtggcgatggccttggtggtggaagtgggcattgcatgtgttcctgatatagcaaggtgggtggtcttggtggcagccacgaaagacgtgatggtagcatcagcagtagatatggcataggatattgctctgggtttgacaaaggcatctgattctgtgttagggtcggcaataagatcgaccaacatggcaactaatgaattcgggatcattaatgatacgtgaagatgacacatacttcttcacaggaattataattcacgtatgcattcattcatgcgtcgtaccttgtcatgtctatgggtgatggtg

SEQ ID NO: 101470 - DNA, 211 bp, Zea mays
  unsure (1)..(211): unsure at all n locations
  Clone ID: MRT4577_24052C.1
ttcttttactggtgcccgncggcgttcaagggggggagggggggggaggcgccgccagtggtgccgggtgcctacctcaccaaggtgcagcgcgcggagtgcatgatctccaactataccatcttcctccaggtgaactcccacatcaacagctagttcgacctcatgtaccccaagcgcgcggggggggcgcggtttttttttttagggc

SEQ ID NO: 101471 - DNA, 393 bp, Zea mays
  unsure (1)..(393): unsure at all n locations
  Clone ID: MRT4577_24053C.1
cttcctcagctcgctcccggccggagctccctgctgctctctcctgctcagccgcctgccatggagctcgccgagccctcccgagtcgaggcccctgctcccagcgtcacgatccccagctcctctgctcactcggctgctcgcgccgtcgccttgctgctcgcccgtccgcgcggcacttcgtctatggccgctgtccgccgtcgagttcctgtacgcgcgcctctggttcgccattgctctctgcgcgcgcgctctgctcggcgtctccatctcctcctgtgctccagctcgctgtcgggacggtttttcccatggccggcgatgctccagtcctctgcgcggcggtactccctgccgagcacctnccagccgaggcccttgtcttccatg

SEQ ID NO: 101472 - DNA, 781 bp, Zea mays
  Clone ID: MRT4577_24054C.1
tccacttccacattggtagccatcgctggctggctccaagtactggactccctcctgagtcctcatctgaggatcgggaggaagcaatggcggctgagaggcagcggcagcagcagcagcacgagggcgcggtggcagcggcggagccgagcgtggcgcggcggctgtggcgcgtggtgcgcgccgtgctgtacatgctgcggcggggcctgccgtcgggccgcaagctcggcatggacctgcagctcctcctccaccgcggcaaggtcgcgggcggccggttcctcgcctcggcccagcacggccgccacgccgcgaccttctcgtcccacgctggcgccggcgccggcgcggggggttcgttctcgtgcggcgcgctggacccgagcgtggcggtgcacgagccctcgcgcaggcggcgcgaggtcgagttcagctgcagcaacacgccgtcgtccgcctcgggcgtggggggcctcggcctcctcggcgccgccagacgccgccgccgacgccggcggcagcagcagcagcagcagcgcgacgagccggagccggcggccggcggcagcgggtacctgatgcagtactacagctacgacgcggccgaggtggcgcgggtgttcgagatgctcagcgacgaggacgaggacgaggacgaggacgtggtcgacgtcgatgaccgcggccggctcttcggcggcgacgccgtgcgagtgccggtgccgggcgcctcctccgcgacgccgtcccccgcgcaggcgcagctgctgcgcctggt

SEQ ID NO: 101473 - DNA, 298 bp, Zea mays
  Clone ID: MRT4577_24056C.1
cggactcgtgggtcttaactcaaaaaaatttataaaaaaaaaaaaaaaaaaaaaaaaaaaaaaaaaaataaaaaaaaaggcaacccctttaaaaaaatccacaccttacttacccatccattcaacatcataacattttctataattttacctaaatttaatttacttgccttacttttacaacatcttaacttgtaaaacccttacattacccaacttaaatacctttcataacatccccctttttccagcttgcctaatatccaaaattcccaaacctatcgtcctttccaacaat

SEQ ID NO: 101474 - DNA, 249 bp, Zea mays
  Clone ID: MRT4577_24057C.1
ctccataaatattacaggctcaaataaaaaatcgaacacatgtgcatctttttcctgattaacaattatcattcaaacttaatgaatcgttcttaagtacaatttatcatgaaaggataaatcagctattacattatgaccacattcctacaccatgttttaaagatgcaagaaaaaacacccaagcagaagatattctttacccacagcaaacaggaaatccttagccaccggctttaaactgtatta

SEQ ID NO: 101475 - DNA, 393 bp, Zea mays
  unsure (1)..(393): unsure at all n locations
  Clone ID: MRT4577_24058C.1
gtcagtcgatttttctctccaacataccctctgcttcctgccttcctccacgagctgccttggaagcctcgaccatgtaggaagctctcgtatctccggccaatgccggccgccttcgctttcgctcggccttggagctcaagcccgtcgccttcggtgaccagcgcctcgcctcgccgcgctacctcaacctcaacctcggcggcgccgatgacgcgctgttccgctgctcgtcgccgacgttcagccccagcttcggcttctactcctcgccgtcgccgctcgccacgtcctccgtctcgctctcgccgacctcctccgccttcctcgccgacgacggctggaacggcgccggcaccgacgccgacgccgacgccgncacgggccacacgc

SEQ ID NO: 101476 - DNA, 182 bp, Zea mays
  Clone ID: MRT4577_24059C.1
cgcacgcatccgctcacgcgtccgtaacacccccgcggactataacatccaaaaggagtttttaaaagacctcgagcccacgctactcggtggaatcattgaaccctctctgcaagcactcgctcgcaaactacaaccaggacaagacgatcagccgcaaatgcaattcacgactgcaccca

SEQ ID NO: 101477 - DNA, 264 bp, Zea mays
  Clone ID: MRT4577_2405C.1
tgcgttctggaacaagcctccggaggccgtgttccggcgaggcctgacggcgagcagagacaagagcctggagctccagtggccgccggcgccgctgccggccgcgagctactacctggcgctctacttccaggacaaccgggggccgagcgcgctcagctggagggtgttcgacgtcgcggtcaacggccagcccttcttcgccggcctcaacgtctccacggcggggtgcatggtgtacggcgtcgactggccgctatccgg

SEQ ID NO: 101478 - DNA, 325 bp, Zea mays
  unsure (1)..(325): unsure at all n locations
  Clone ID: MRT4577_24060C.1
ggccacggnggtgcgagngagacgccggacaagtacgcgcatgactgccgacggcggcgggggcgggcgtgatcagctccagtgccgaccaattaatactagtaaatagtggccgccgacccgtcgctaccattggcgcgcgcgcgcagctatctaagcggcggttggggatgcccttttcagagttcctttctttatttatttattatttatttggggggggggcatatcatccattcatccncattccatttcnccncntggtgaatgtgctccttgtggtgcggngacggatcgagaggcgacttnccgaaccggtccggac

SEQ ID NO: 101479 - DNA, 726 bp, Zea mays
  Clone ID: MRT4577_24061C.1
ccgggaccgacccttctttataaattcccagtactacaacaaacatcaccaaccacctagtatatacccgaccattcgctcgctcatacatacctcccatacaacttaaatcctagctacaaaaaaaatgtccctcgcaccctccgccacatccagcgccccgagcgccagctccagcgcagcagcatgcagacaagcagacttcacccagttcccaacgggcgacgccgcctgcgccgtcggcagcatcagcggcgtaccctccaacaccaccgacgtcctctccagatgctgcaaatccgcacccgtcgaggaattcaacggcgcctgcggatactactgtctgagcgtcgagcagacgattcgcgagctgcagacgtgtttcatggagaatggagctaggccaggcgatatcatgtgcaattcgaataatagtgctactgcgacggggacgccaagtaagactgctggtgccagtcgcacatctgggagtgggacgagtgcgacgggggattcgaagggggcggcgccggcagttacagtcagtaaggttgggctgggaatgctgggcatggtgattgtttcggcgatcagtggtgcgcttttgtgagggtgaggactgggtggtatgaaggcatttttatgggcgtttccctggtcggactggatgatgttttcaatgaagggtcgattgtagattacaatggaaatgttttttttctatcc

SEQ ID NO: 101480 - DNA, 1568 bp, Zea mays
  Clone ID: MRT4577_24062C.1
gccgcgtccccccggctcttccttcatcctccggcgagctataaatccctcccgccgacgccacccccatggcatcccgcggttccccttcctcctactcctccccgaggaccccgacgtcgtcgacggctaacccttggcccgcgccctccgccccgccgctgtacccgacgctctccatggccgacctcgcgcccgtcgagatagggcccgcctcgtcgccgacggcctcggatgactacaacgcgcctccgccgtctgaggacgtcctcctccgggtccccggcgcgcggctccacctcgtcgaccgcagccgcagccacccgctggccgccggcgacctctccctcctccgcatccgctccggcgacacctccctggccgccatcgcgctgctgggcccggtccagtggccgctcgcgcgcgacgtggccgccgtcaagctggatccctgccactacgccttctccctcaccgtgccggcctccgccgacgaccccagccccgacccgctccactacggcctcacgctctcccgccccgatgtgcgcctcgacggcgtcctcgccgcgtacaccagcttctccgtccacgccgtggtcggcgccgggcagctggaggccagggtgcgcgacgaggccgaggccgccgcgtactggacggccgtcgcgcccaacgtggaggcgtacggaggcgcggtggccaggaccatcgccacgggcgccgagcacctcggcacgagctgtggtgcggggaggtcacggtggagagcctccgttgggggaatgaggtcctcaagaggaggatgcagcccggcgacgccaacgccgaggtcagccccgagatgctcaggcgaatcaaaagggctaagagggtgagccaaatatctgagaaagtggcgactgggattttgtccggagtggtgaaggtcactggttacttcacaagctctctggccaactcgaaagctggcaagaagttcttcaacatgttgcctggagagatcgttcttgcttcgcttgacggatttgggaagatctgcgacgccgtggaggtggccggaaagaacgttttgtccacgtcgtcaactgtgacgaccgggctagtatctcacaggtacggagacaaagccgccgccgcaacgaacgaagggctggacgccgccgggcacgccatcgggacggcgtgggccgtgttcaagatccggcaggccttgaaccccaagagcgtcctcaaacccacggcgctggccacgtccaccatcagggccaacgttgccgagcttcgcgcgatgcacggcagcagcaagtagctcgcgcctgccgtccccgtttcgtaaactctctattatctcgctctgtcacgaccaacgatgcactcgctgcttccagcagcagcgttggccgttggcctgtaaattcgtgtggctgaaaactgggaaagccgggaactgaaaggcttaccgcttccgctttgttagtgatgctggtgatgttctaagagcttttaccactgctgtgctcctgcgttggcttgaactgtcatgagttgttcggttttggccaaaa

SEQ ID NO: 101481 - DNA, 265 bp, Zea mays
  Clone ID: MRT4577_24063C.1
tatagcgggcggccttttgtgttctaaattttgacttggttggaacccggaaatggggtttatttattttggttaccaaaccaaaccaattggccaaaagtttccttgttccattccttccggtccattccattcccggaaaggggagaccccattccggccttcaacttcttgttcttggggggggggaccgggggggacttaccggaagggaggattgttgggcaggtaaattttaccattaatttttttgccgggggggttt

SEQ ID NO: 101482 - DNA, 247 bp, Zea mays
  unsure (1)..(247): unsure at all n locations
  Clone ID: MRT4577_24064C.1
agaaggaacaaaaaagcaccctgatacccctccgcaattcccccgattacacttttcttttttagccggccacataaaaccccgggctggattaaataaaaaaccggacgggtcaaancctgnacatcatccttactctccttaaacacccttacacattcactccctaacctccaaatcagtgctccataatcccatccaactttaatctccataaaccacaccatctctacctacaattctatac

SEQ ID NO: 101483 - DNA, 228 bp, Zea mays
  Clone ID: MRT4577_24065C.1
caacagatatgcactttctatatagattactagaacgaagaccttgattgtatgccccaactatcacagcaagtgaaacttgaaagccacttgcaacatcactgcgacatatagaaacgacctcctccaatccgaagagtgtgaagataagccacgtatcttgcaagccaatcccaagcaccactggaagcataggtgtcactatgcgctgtagaatgccaagatcga

SEQ ID NO: 101484 - DNA, 283 bp, Zea mays
  Clone ID: MRT4577_24066C.1
ctggcttctcctccccctcttatcaaggccttctcgggttagggttccttagggttttgtggaggggcgatggcggcggcctgatgtggagtaccgttgctgggcgggcggacgtgtgtggggcaccagcaccgagtcactggaaaatgcattaacctccgacggtgagatgcttggctcgagggcaatcaccggccgggagacacgcaggtgaacccggtcgggacgaggaccgttatcgtgccggacgtcaacgcttgcggccgtgtggggcgtcataccg

SEQ ID NO: 101485 - DNA, 294 bp, Zea mays
  Clone ID: MRT4577_24067C.1
agttacagatccgacccgatcccctatctttccgatggcgtagccggccggagcagagaagggagaggtacacggagtagtcttgtatatagcgcgtctagttttaggtggtattctgcccatgtggcgtatggcggtatgccgatgtggatagcgccgccgccgtgggcgagtagcggccggtggcttacggcggtggtcttcatggtggtgctgactggaggccagaagctgtcggcgagcgcatcgacggctactccaccaataagttctcctgtctccctgttctcgtag

SEQ ID NO: 101486 - DNA, 333 bp, Zea mays
  Clone ID: MRT4577_24068C.1
acctctccccaaacaccaggagatatcaaggttaatatgaaagagttccgtataacataccaatggctatactcctaaaatcctccacagatccataggttttagaacgagactcttacacgataatagggttaattaattcatcctacaaagctcagttaattcatttccataaactggctacaaaatttaaacaacaagcatatctcaaggagacttcttgatgactggtcgacatgcaaacccagctgtaattccacctacacctcgaggatccccaccacgtcgaagaagagcatagccatttttcccccagcctgctccccaagtttt

SEQ ID NO: 101487 - DNA, 417 bp, Zea mays
  Clone ID: MRT4577_24069C.1
cggacgcgtgggtttaagcattcagcaacacaccatgcgaaccgcactaccaacgaggtaacaccaatggctaccatgatattactccttgttgcgctagttgccctttcagtgaccgcaacaaatgcatacattatactacagtgctcactcgctactagtgacattattccacagttccttccaccagtcacttaactgggcttcgaacatgcatacgtgctagcctacacgctacaactagcgcttgcagagagcgccttacaacaaccaattgaccaattgcaacaacaattcttggtacatataaccgtacagaccattgcaccgcaacaacagcaactgcaacagcttatgccattactgagccagctagccgtggtgaaccctgtcaactacttgcaacaatagctgctt

SEQ ID NO: 101488 - DNA, 380 bp, Zea mays
  Clone ID: MRT4577_2406C.1
catccttctaagatcttcgtaaactaccttatgatgcaataatttaatgttcctatacggattataggaagagaacatttaaatactgtaaaagggatttggtttagaaggttactatgtcagtttgtccagatatatcccatcaaagaaaacctagtggtagcaataaatcttctgaaaggacttcttatatttaagtacctttaaaacatctaaataattaaaaatatgccctgttaaaaatggagatggatttaggcaagttaggtaaacaacatttgaacagtctcacgtttcagttggtaagcctgatgaattttggttccttttccacccaaaactgatttagctggaattagtacattgtggcttccaaattg

SEQ ID NO: 101489 - DNA, 1066 bp, Zea mays
  Clone ID: MRT4577_24070C.1
caccaccctgctcttcacgagctcctccactctgttcttccccgccgctccactgcgcccttcctcccgccgggatcctaaaccctagcccctagggagcgggagaggctgctgctgctgctgccgctcgaggcgctgctggcgctcggcctcgaccagcgcaccgccgagaacgcgctcgtcaacgccaaggtcaccgccaacctcgcctccgtcatagccgaggctggtataaaggaatgcgacaagtcagtcggcaatcttctgtatgcagtcgccaccaggtacccaactaatgcacttgttcaccgtcctgtccttattagctatgtcttgtcaacaaagataaagaaccctgcacagctagatgctgccctgtcatttcttactaatactggtcctgattctctagatgtggacaagtttgaagaagcatgtggtgtaggcgtggttgtttctattgaggaaattaaatctactgttactgacattcttgaggagaatatggaagctataaaggagcagcggtatcacataaatgttggtatgctatgtggacaggttaggaagagacacccctggggtgatgctaaggcagtaaaggaggaaattgacaagaggcttgcagaaatcctaggtccaaagacagaagctgacagtataaaaccagtgaaaaagaagaaggaaaaaacagcaaaagttgaggagaaaaaagttgcagttgccactactgccccaccatctgaggaggaattgaacccgtatactatatttcctcaaccagaggaaaactttaaggttcatacagaaatatttttcagtgatgggaacatatggagagcacataacacaaaggaaattttggaaaaacatctcaaggcaactgggaggaaaagtgatgacccgttttccaccagaacctaatggatatcttcatattggtcatgccaaggctatgtttaatcgattttggtctggctaaggagcgaaatggccattgctacccttaggtttgacgacacaaatccggaagctgaaaagaaagaatacatagatcacattcaag

SEQ ID NO: 101490 - DNA, 275 bp, Zea mays
  Clone ID: MRT4577_24071C.1
ctcacgcgtgcgcccacgcgtccgagcgaccttttctagatagtatgggtgctaaggcctctggataaaggagcttgcctttgtcaaaagacgccaacttttgtctgctttggatgagtggtaaggtccggggtctgttcgaatcgtggcgaaggatgcgttttaaagttattttgtcatatgctacgtgttcgtattcttgtagagagttggctacgacccgctgctgtgctatgtgggtgctgagacactcctgaagtattttcaccttagct

SEQ ID NO: 101491 - DNA, 757 bp, Zea mays
  unsure (1)..(757): unsure at all n locations
  Clone ID: MRT4577_24072C.1
gtttcaagtcagccagcagcaacctattcctgctcgaccgtacattcctcgtagactagctggccactttctccgcttcccgctgaacctactcgaccgccagatccccacgccacgctcccatcaccaattcaccatttcaccaccatcgtccatagcctcctcccgcttgaagtagaagtaccccgtgctggagtccaagaacccgccctcgaggcccaggtggagacatgggatgttgcttcagcaaggagcgcaagacccgtccggtggccggagcctctgccttcccgcaccggtgcgagcccgaggaccgtgacccgccgtcgccggaggaggagacggtcaaggaggtgctctcggagacaccgagcactaagccgagggccgagtcgaagctcgtcggcaatggcgtcgtccccgccgcggacgagcgggaattggagaaagccaagaagcaggatagcgtcgacgccgccgtgagcgacctcggcagctgcgtgtcgctctcgctcgccaccgacgagcggtccgaggcggtgtcggagtcgtcggtcgccaccagctcggtgaccgggccggagcggtcgccggggaggaagccggccaggaggcgcccggtctccgtcgatctggggccagcgcggcgcgcccacgccgcggccctctacggcgtccgctcccgctagtgtcgttgggatgtttcatnctcctgtagcgctgcgctgatgcagtgatgtgatctctcgcgccattc

SEQ ID NO: 101492 - DNA, 615 bp, Zea mays
  Clone ID: MRT4577_24073C.1
ccacaaattaggcaacccacaccacaccaccctgctcttcacgagctcctccactctgttcttccccgccgctccactgcgcccttcctcccgccgggatcctaaaccctagcccctagggagcgggagaggctgctgctgctgctgctaccgcggcggcgccggaggggatgggcaccgggggagacgggagcaaggcgggcccggcgctgccgctcgaggcgctgctggcgctcggcctcgaccagcgcaccgccgagaacgcgctcgtcaacgccaaggtcaccgccaacctcgcctccgtcatagccgaggctggtataaaggaatgcgacaagtcagtcggcaatcttctgtatgcagtcgccaccaagtacccaactaatgcacttgttcaccgtcctgtccttattagctatgtcttgtcaacaaagataaagaaccccgcacagctagatgctgctctgtcatttcttactaatactggtcctgattctctagatgtggtcaaatttgaagaagcatgtggtgtaggtgtggttgtttctattgaggaaattaaatctactgttactgatgtgcttgaggagaatatggaagctataaaggaggggg

SEQ ID NO: 101493 - DNA, 347 bp, Zea mays
  Clone ID: MRT4577_24074C.1
ctatttttttttttttttttcttttttttttttttggacataaaaattacgctttactgtcatttctagaaacaattacatgatggtggatatttccatcatcaactaattgattacatgtttgtcacatacactattaccactatttaaaacttttcaatcacctatataaccaacccctatgaatgagaaacacaaatgaaaaaacagccgtcgccaccttccggctacaaagcttaatatttaactacatttgctccttggagttcttgataaattcgaccaaaatccttgttgttgtgcactggtcaaggtgacattcttcaataaaccctgaaatttttcct

SEQ ID NO: 101494 - DNA, 155 bp, Zea mays
  Clone ID: MRT4577_24075C.1
cccggtcgccccgcttcggttctcccgctcggtggccgagaaaggattagctcaaactgttaatgacttgaacttataatggggaaggtttggaaataaccggcactgcgagccggttccatggaagacccagtgggttttcttgctgtggtggc

SEQ ID NO: 101495 - DNA, 470 bp, Zea mays
  Clone ID: MRT4577_24076C.1
gagagcttttctttctttctttctttttctttccattttttttcttttttttttttacttttttctacctttgatcaacctataaaatctgggaaacctacctccctattatggggggccccattcttttatctaaaaaacattttttgtggggttaaccctaataagcattttaaaaaagggccccccccattaagggcttgttggtacggggctccttggtttacaaaaacaagttggacaaaaggcaacaattcgtactgaaccaaaaggggtatgggggtaacccaaaactactaccataaaggccgctaccgtgggcgaggccaaaatgaattcctgactcaggaacatatgctgcctaaataccagaaaattgggggtaaccaacaaaccctgttacaactaccacccaagttgccctatggacaacttgctttgacaaacccagaagcctcctaccaacaaca

SEQ ID NO: 101496 - DNA, 326 bp, Zea mays
  Clone ID: MRT4577_24077C.1
cacattaaaatctggaaatgtaacttcttatttctggttggccacatacatcatccaaaaaactttattattgagttcagctaagctgacctctaaaagcggcccctccacgatgttgtggttgtttatgaggggcctgtgtgtctctcaaaacgaggggcacagggggccacttgtgttgtttgtgagagaggggcgcggggtttgccgaacactgttggtaaaaaggcagccactggtggtgtgtcaagaaagaagcacggtttgctgcagtcgctggctaaatggtagtagtatttgctgctgcaaataaacaggggggttca

SEQ ID NO: 101497 - DNA, 277 bp, Zea mays
  Clone ID: MRT4577_24078C.1
ccatcgcccgtcggctcgcgcgtcagcccattgacctcgacaacactggctccatcttctccgactgtgctgcatgatcgggtttgcattgacttcatcctctacgactacctcgactgcgtcgctgtcttcgtctatggcgccctcctgtgccaccatcaacccggcgcctcctggtgtgccgcagggctcaatgcaatatcatcccaccatcatgcacaatatacacaatctctccttcctacatgacattcctgctttagcagcagaggcatca

SEQ ID NO: 101498 - DNA, 359 bp, Zea mays
  Clone ID: MRT4577_24079C.1
aaaaaaagcacttttttattttggggaagctataatcttttttaaaaaaactttttaattgaaattaaaccctttaaaaattaaaaaaagggccccaccaaatatggggtgttggaaaaaactttttgggttttaaaaaaaaagggggttaaaaggcaaaaaatgttgtatatgtaaaagggggcccactttagggccaacgtgttgggaaaaagggaaaaaatgggggtgttttaaaaagggggaaggggtaaaaccaatttattggataaaagggaaaaatatctgcctccggaaaaaaagaggggagttctaaatctccatttggttaaaaggaaaaaattttctgggggaggcaa

SEQ ID NO: 101499 - DNA, 702 bp, Zea mays
  Clone ID: MRT4577_2407C.1
cgggcctcctcgtcgtcctcaacccctgctcccccgccgtcgcctgctgttccgtgaaggactagtaatccatcggtccactgccttagctatgttgcagctcgcggcgcggtcgctgctgctgttcttgctcctggtctcgccagctgtggcttcagctggcatcgcgaagctcaactcctcgtcgcccctctttggcatcgagttcccgccgttcaacaccgccgtcgccgacaccggctgcgacagcaagttgggtgcagccgaggacgcggcggatgagcagaagccggcgagcccgtcctcgtcgctgaagctgcacatgacccaccgccgcggcgccgaggggggcaggacgcggaaaggttcgttcttagatttggccgagaaggatgcggtccgcatcgaggcgatgcaccggagagcggcgtcctcgtcctcgtctccgcggcgtgggcgggcgctgtcggagtcggagcgcgtggtggcgacggtggagtccggcgtggcggtcgggtccgccgagtacctcatggacgtctacgtcggcacgccgccgcggcgcttccagatgatcatggacaccggcagcgacctcaactggctgcagtgcgcgccgtgcctggactgcttcgagcagcgcggcccggtgttcgaccccgccgcgtcctcctcctaccggaactgacctggggcgacccc

SEQ ID NO: 101500 - DNA, 261 bp, Zea mays
  Clone ID: MRT4577_24080C.1
ctctggctggaggccaacatgacactgccaagagacgaggacgctgacggctcgtacatgaatggcggtgcccggaatgcgtatcgggcacagtcccggatcgaactgaagggaagtaaaaaatgcactgggtaggacaagcaacattggagtagaaagatagagctaggaagtggcacctatgcagtgtgataagccagtactaccataaggcctatagacactccgaacgacatgagatcggaattcctcgggggctgc

SEQ ID NO: 101501 - DNA, 424 bp, Zea mays
  Clone ID: MRT4577_24081C.1
ggggcttccgccgacccaagggcctatccggtaatactgggtgctgcgctgggtttcctgccgcaatggggaatggacaatggccaccccttacgtgatgcttatcgatacggggttttaccgggcgggcaaggcgacttgttttttttgttggagctgcttttggggcccccgcttactttgcctatggaggaccaggaattttaccagtctgaatgccatggacccttccccttaaggattcgttgaaaccctccctctccaataagtggtgtgcctgtaccccgaaccatatccggaggctaatggggtttttctccgacctcacggaatcaaacttttcaaattcgacatgggggactaaaaggaaccttttgtgagcctaccagaacatggaatacgtgaagcttaacaggttgtccta

SEQ ID NO: 101502 - DNA, 485 bp, Zea mays
  Clone ID: MRT4577_24082C.1
ctccacgctggatccaactcggcaatcaatgaagcgataatagaaaatgaatgaaagcgctactcactggcttacggtgctcgcttcggctctcccttcctaacctgcttgctaaggtgagtaacccaaccaacagcgctaataacggctgtatttggcggtgtgtcttacggccttctttatgtcctagtctctcttccagaggtcattggttaagtgattgctgcaaacactaacactaacactaaaagcaacccaaagaacttgccaaagctcgtgtcgtgtgttgcagtaattgctctatcaacttctcaatcacttctttaaacactagttataaccgctaggatcagcggtaggaggccactgcgtacgcgactgcggtatgctccaccgcatgatacatggctggatagctgtactgattgcaggacaggaagaagggagagaataatgttcaaaatgcccttccgaaagccaagtca

SEQ ID NO: 101503 - DNA, 545 bp, Zea mays
  Clone ID: MRT4577_24083C.1
ccggccgggacctctcttttttttccttcattcacgaatcccttcttccgccttcttcgtcgggccatcctcaccgacgagaagagatctcctcttcggcacgaggaggacagcagggaaagatgggggggcgggtggatcacgagtactcttacctgttcaagatggtgctcatcggggacagcggcgtcggcaagtccaatatcccctctcgcttcacgcgcaaccacttctccctcgactccaagtccaccatcggcgtcgagttcgccaccaagtccctacagattgacggcaaaaccatcagcattgacagcaatgcaggaaatacaaagaaggcatgctgctctacatgaataaaaaagatgtaacctttttaaaatatggtagaaaatggagcatatatagtcatcataaaatatggtgtggaggcgatattataactactgctattctattcttttcttttctttaatttttttttgtgtgtggacaaaatcgagtacatgcagtgtttctggaaaaaaaaaaaaaaaaaagcggcc

SEQ ID NO: 101504 - DNA, 221 bp, Zea mays
  Clone ID: MRT4577_24084C.1
cggacggtgggcgagacgcgtgggcggacgcgtggggtgtcgtatcccaagcgcaaccgcaagcaggcgcacgcacccgcagcacggcgcccgatctgcgcgtgcagtccaacggcaagcctggcggcggcttcgacgccggcgagaagcgctcccaggagcgccaccgagcgctgcaacagcagctcgcctccagggctgcctacctcgacgacgcacgg

SEQ ID NO: 101505 - DNA, 1299 bp, Zea mays
  Clone ID: MRT4577_24085C.1
tcgagccggccgggacatgacgtcgatactaatctctattatataaagcactatgtttctaaaaaaaaaaaaaaaaaaaaaaaaaaaaaaaaaaaaaaaaaaaaaaaaaaaaacgcacgcctcctgccacctccacgccggccgggaagccgcaaaggccaggccaccactccttaccttttcctctcttttttttccttcattcacgaatcccttcttcttccgccttcttcgtcgggccctcctcaccgacgagaagagatctcctcttcggcacgaggaggacagcaggggagaaagatgggcgggcgggtggatcacgagtactcttacctgttcaagatggtgctcatcggggacagcggcgtcggcaagtccaatatcctctctcgcttcacgcgcaaccacttctccctcgactccaagtccaccatcggcgtcgagttcgccaccaagtccctgcagattgacggcaaaacaataaaggctcagatctgggacacagctgggcaggaaaggtaccgtgcgattacaagcgcctactaccgtggcgccgtggccgccctgcttgtgtacgacatcacgaagaggcagagcttcgacaacgttcacaggtggcttcgtgagctccgcgaccacgctgactccagcatcgtgatcatgatggtgggcaacaaatccgacctgatccacttgagagctatctctgaggacgaaggcaaagcgttggctgagaaggaagggctgttcttcctcgagacgtcagctatggaggccatcaacgtggaggaagccttccagactattatcacggaggtgtatggcatcgtcaacaggaaagcgctggccgccaaggaagcagcagccacagctgccccattgccttcacagggcaaaaccatcagcattgacagcaatgcaggaaatacaaagaaggcatgctgctctacataaataaaaaagatgtaaccttttttaaaatatggtagaaaatggagcatatatagtcatcataaaatatggtgtggaggcgatatataactactgcttttcttttctttatttttttgtgtggacaaaatcgagtacatgcagtgtttctgaatcaaaagttagatattgtattaggattcataccttttatgttctccaagttgaatggtactactgcagaatcatagtccaatgttactgtaaaaaaaaaatgtgagtttgtgattttatcacgcgttctaattgttgctcgcttaaaaaactgtaacaaaaaaaagggcggacacagaactactctgctgttcc

SEQ ID NO: 101506 - DNA, 448 bp, Zea mays
  Clone ID: MRT4577_24086C.1
gggggggggggtgtttttttattttttttttttttttttttttttttttttttttttttttttttttttttttttttttttttttttttttttttttttttttggggaaaaggggagctaaaattttttttttcccctaacccaaaatgggcggtgggggtttcaaaatgggtaatttcccttccccttcatttaaagaaaaactttttaacaacccccttaagggccaatttgggttaacccgagttttccccccccgcttcaaagaagggggagctttaaaaaccttccaaatccctaggtttttcaccaaaatttttttaataaccccttctttttaacccccgaaaaccatgaaacaacttcaccccgaaaccattttttttagggaccattcttttggaacccccactcatttttattcaaaagggcccactttacgggtttt

SEQ ID NO: 101507 - DNA, 415 bp, Zea mays
  Clone ID: MRT4577_24087C.1
ggggggccaagtttaaggggtggggcccttgttttccatttaattaaaaaaaaaacatttttccctttttgggggggaaaaagccccaaaccccaccccctttttttttttttctttacacaatttaaaatttcccacggggttttttttttaaaaaggggaatcttttgggtattccccagaacaccaatccgggttttgcccttggttttaacaacttttaggggacctccccctgccccgggcggttttttaaggcaagggccccgttcccccttttaattttgcccggaaactttttaaaacttggccggaaattccccagggccttgggcccccttcctttgggcgttcaatttttcgggtccggggccttccccaaggaccccttcgggcccttgaaccccattggccc

SEQ ID NO: 101508 - DNA, 263 bp, Zea mays
  Clone ID: MRT4577_24088C.1
agcgctcgtacatcggcagatggaaggaggggggctaataaacggtcccgagctgggtgggtatatcagatgctgattcttacatctgtagcattgcaagaacgcactcgtattgcgttttggatgctttacaagaaagtggagtacatgctagatgctcttgctgatataatatgtacgccacacctgagaatgactgacaagatgccgatcactttagcaggtgacttaggccatggagtgactcatgcagcctcttcttg

SEQ ID NO: 101509 - DNA, 318 bp, Zea mays
  Clone ID: MRT4577_24089C.1
ccagttggttagggttttagttgtaaaacggggttgcgttgcccacatgacatgatggatgttacgggggggattgtcttttatatttgaacattatattgggggggggttttggcaaaaaaaaaaaaaaaaaaaagggggggccggtttaaaagaaaaaaagttgcgcccgggggcttgtccaggaaaaattgggtatgttgagtggaggaataataaatttccttggagggggggataaaatagcggggggtgggaaaattatggggtaacgaaacttataaagttgggaggaaattagcttttgatcatttgggt

SEQ ID NO: 101510 - DNA, 317 bp, Zea mays
  Clone ID: MRT4577_2408C.1
cctttttatttttttttttgtacattttgttctcttttgggttttttttttaaaaaaacacatcgggggccaaccaaacaaggcccgtgagacccaccgggctgcgagaaacaacagaactgaggcattggggctcaacgactaaacaagctagctcgccagcggcttttctacagcacatagttttttcaaggggtgacgccttaaaatactgacgctaagagaggcaaattgttgctggaggccggacatcggcgaaaattggtgcgctatctgcgccaccaacaaaccgagcatgtgggtcctgcgtcagaacc

SEQ ID NO: 101511 - DNA, 617 bp, Zea mays
  Clone ID: MRT4577_24090C.1
agaaggagaagctgtcgtatagaattgaaagagttagtacagaatgagtttgttatgctttttctgattcctctcctttaccagctactcccctataacctccagcgttaccccaacttggagcacacgttcacacattccggccacattcggcccaccagacgcacagcgtcttacacacgccaatccggcccaaacaccttcacgcttgccttcctcgctcttgttccccttctagtttccacatcagcaggaacccgagctcttttatctccttgctttggtgcatccatcctcacactccttctccgtgagcagctgccagtcggaattaaaggtgactacccgcgccaggttgttgtggtagtagctgttgtccaacaagtccctggtccggcgcatcttgccgaggaagggcgggaacgcatccgccacggcgcgcgggtcctcgtcgcgcacgttgttgggcaccacggggtcggctccgggcccctccgcgccgcacttggccgacagcaggtcccggtacgccggcacgatctgggccggcggcgccgacaggcgggcgcggaacgaggagcagtggccgacgccgacggcgtgcgcgcccgacagga

SEQ ID NO: 101512 - DNA, 606 bp, Zea mays
  Clone ID: MRT4577_24091C.1
ggccgcttttttttttttttttttctttatatgtccttcttagtttctatctatcttgtttgtaaagaaggacccccacaatactacatcaatttgattggcttgaaggagaccaactatgtaaacatttttcatggtcgactttaatacactggagagggaggggtacctatggaactcgcttacgctgatcagggcataccaactcatgagcacactggtgctcattattgcccccctttgaatccgcaacaatcgctacctatatatgtgccctttttaaccacacagcaaccgtaccaacgttttgggctggtctcaccataagcgatcgaggacaacgactttggggaaacacatcataggttagggggcaaacaatcacgcaaaaaaagcgtaactttctaggttgtccacctgcccagcgtgcgcccttgtgtccatcttgcaaacctggcagggcttgcccatcgagcccttcttcaagaattggccggtgttttcaacataacacttgtacaaatattggccggtgccaccaatatttcacctaaagaatccctgctgggcgctaccaatcctccctccaactgcggcggactgcct

SEQ ID NO: 101513 - DNA, 713 bp, Zea mays
  unsure (1)..(713): unsure at all n locations
  Clone ID: MRT4577_24092C.1
ccggccgggatgaaatggacgactcacaaggattggataagcttggagaaagtgcctctgaagaaggtcgaactatgctcgacacaacctattccgtttaccagcatcacgacggtgaacacatgattcggactgaaaagtatagcttaccaagaaatcttcatcatcacattgaattgattcagccgacaaccatgtttggccgtttgcaaaaacaaagatcggcagcacgcgtgattgagcagctcccttcggcgaagcacgaagtcttgataaaccccaacatcccgaacacatgcactgacccatctagtgttacgaatgactgcctgcgacaactctacaagactgccgggtacaaagttcaggcacctcaaaccaacatgattggcatcactggttatcttgaggaagttggaaacttcaaggatgctcagatgttcctccaaacgcaaagacgtgaccaggtaggtgggaaatttgagttggtgaaggtcaatgatggtaaggattttcaagaattagatcaagatcaagttgaccgccagcttggtgtagaagcgaatcttgacacccaaaccgcgctagggtttactttacccactcgcaatatatttttggtctactgggggggaggtccgncttttacgcctngatttaaatacccnctccaataccaacgagccgtatctcgagtggttgaaattcatcct

SEQ ID NO: 101514 - DNA, 359 bp, Zea mays
  Clone ID: MRT4577_24093C.1
actggcgctaaggttcagcattgaatggctgactgagcgttgagatagactggatgtggctgccgtggtggtaagtggttgcaactactttctgcaaaacaggcgtattggatgcatgctttttgtcttgcttgtaagctgtagggtatagcatgggtaccagggtaattgctgttagaaacttgcggtcctgtcatgcatatgatgcaattgcatgcgactaggttgtgagtacatgatgttgccgtatacattttgttgtgctgtaaagaccataaccgcaagcaccagacatgaagcgttggctactatatgtatgtgtatatgctcctatggagagagtgcaggatgaactgctt

SEQ ID NO: 101515 - DNA, 530 bp, Zea mays
  Clone ID: MRT4577_24094C.1
cccacgcgtccgcccacgcgtccggcttggccttcgtttccgcttctcttgcgctttcgactcctgctagctggcggtgcggctcgcctctcgcgccacaatggaggtcgaggacgacgacaacacggcggcggcgagcgcgtggccgagttcatccaggcgtagccacctcatccagttccttctccacgcctccatgaggctcgacctccggcccatcgtcaagtacgccgcgcttaccttcttcgctggacgcttcctcccggcactcccgaggaagatggggttctgcggcgcgcgaagcggccgaatagtcaggtcctggctcctcgagcccctgagggacagcaatctcgagctattcgcgctcgtcgcggtgtggattgccagcaagatccacaatcagaagccaatgtcagtgaagagcctcaaagccctgtgtgatcgcatcatcgccgaccagcatttcatgtgccgtgattttgccagtgccgaattggtgttcttggaggtagtggaacacaacattg

SEQ ID NO: 101516 - DNA, 1829 bp, Zea mays
  Clone ID: MRT4577_24095C.1
cttttagctcgccccttgcgttcgcggaaaaagctcatcttttcaggtggaaggagcgattcgtctgtgcctgcgcctgcgcctgcgcctcgccgggctcgtgccgctgtaccctccttctccaggagacctgtacggtgaaggggcgctcccgcgccaaacgggaagcaaagctcgctcgcgcccttttttcggatcatataacgccggcgcctagctcaaacaccacagctcgctgcctagatctacgcggcagcggcgtcggcagaggagagggacccggagctgcgccatggggcctaccgccggctccggcgaggacaaggctatgttagagctccggaaaaaacatcgtgtggacctggagagactaacaattacatcacgaccgttcaagacattgtcattctttgtgttagccatcgctcagaatttggaaagaacatgttcatctgttctgaaaaaaggttaccagttaaaaaccgcaatgcttttggttgttgctacttgggttctgctcatgttcactgatggcctgaatgaaaagcatctgcaggagctactttggtatgtcaggtttggattgtggtggattatactaggggtcgcttcatccattggattaggttctggtttgcacactttcataatgtatttggctccccatgttgccctgttcactatcaaagcggttcagtgtggtagggttgatttgaaaagtgctccttatgacactcttctccttgaaaggagaccatcctggttagagaaagactgtctgcaatttggacccccaatttatcatgaaacaattccattcagcaaaatactgcacgaagtttatcttgaagctattctttggggcattggaactgcacttggagagcttcctccatattttctctcaagaacagctagcatgtcaggccgcataattgatgagttagaagatttggatgcttccatttcagaaggctttctatcatcagctttacgtcaggccaaacgatggctcatgtctcattcacagtatttaagcttcactctaatattgctacttgcttcggtgccaaaccctctatttgatcttgccggtatcttgtgtggacaatttaacatccctttctggaagttttttctagcaactttgattggaaaggctattgttaaagtttgtatccagactacattggtgattactctctgcaataaccaacttcttgatttggtggagaaaaggcttatatgggcatttagcaatgttcctggagtggcatctgtccttccatcttttgtttccaaactgaagatggccaaaaataagtttttatcagcccatgttgctgcatcagcttctacttctgttaagggaaagaagtggaatctgtcattctctttggtctggaataccctggtgtggctcatggttgcaaacttcattatccagatagttacttctacagcacagggttatctcaggacacaacaggagcgagagatcagtaaaaagttggaaaccgagctttctgcctcttaacgttcttctggcgcaccaaaatgattcgccctgggaaagtccaatcatacattgtacataaccatgcatcaaccatcagctcaaggctaaaggctctcctgcagtattgtggtgcactgactattgatctatttctttcgaaagagagagagaggaaagctattagctagtgctagaaatataatgctgccccagctacaattgtaagtttgtggccttgtacatagcatcaaatattattaggggacaaaaatatctaatgatataagttaatacctgattttgtctccgc

SEQ ID NO: 101517 - DNA, 203 bp, Zea mays
  Clone ID: MRT4577_24096C.1
cacaagtgcaacatggcttgaaaggccgctggtggtactcgtggcgggggcaggatgacttgcaaccttaaaacttcttgcgccaaggcaacttgtgtggcaaattccagtctttgtgggaaggaaccccttcttcctggggccgagaaccttccggggttatattccggggggaacttttcaacaaggggccaaatttttgc

SEQ ID NO: 101518 - DNA, 511 bp, Zea mays
  Clone ID: MRT4577_24097C.1
atagttaccttctacagcacagggttatctcaggacacaacaggagcgagagatcagtaaaaagttggaaaccgagctttctgcctcttaacgttcttctggcgcaccaaaatgattcgccctgggtatcgatctggtttcttcaatcttttacatacttatatcgagtttagagaggaatattaacatgaataatgtggtaactgactgggaaattcaaaccgtgttcaccaactatttgctgctactgttcttcaggaaagtccaatcatacattgtacataaccatgcatcaaccatcagctcaaggctaaaggctctcctgcagtattgtggtgcactgactattgatctatttctttcgaaagagagagagaggaaagctattagctagtgctagaaatataatgctgccccagctacaattgtaagtttgtggccttgtacatagcatcaaatattattaggggacaaaaatatctaatgatataagttaataccctgattttgc

SEQ ID NO: 101519 - DNA, 811 bp, Zea mays
  Clone ID: MRT4577_24098C.1
cgtcgatcaatccgacgatctcaatcttgattcttttaaatctataacggggaaacgatatatcagagtcacgaactcacgatcgactcgcaatggctgctctgaagattgccgccgtgtgcgtgctgctcctgtttgtcggctcagacctggcgcgctgcgttgcgtcgtcagcatcccccggtgacgaggaccaggccgcggccggcgcgctcctgctgcgggagttcctggagctcgagctgagccttcttgccgaacagcacggcggcgttggcgagttctgcccgcccgcgtgccagaactgcctcataatctgcgggatcacctgtgtgctcaaccccaatccggccacctgcttcgtcaactgcaccaccaccaacggttgcttcagcaagacactgccggtcgtcgcataagcctgcatctgcattgcatgctttgggtcaaccatgtgagcttatctcgatcgtcagattgattaatggacccgtgtaattgtgtcttattagtatgtgatctgtactgcgtgtttggtacaagaacctgctggaggcaccaggttggcggcccgtgcagacgtccggacggctcttgggaagtgtagtcggtgaccgtggttatcaacggatgtgaagcgagtatatatcatatacaattgtgcatgtaaatgaatggaatgtctcttgtaaatgtgttaattactgtcctcgttcgtgtatatagtatgtatgtaagtaagctgttttatgtggatactcttaacaatacagtactccatcagtctcaaaaaaaaaaaaaaaaaaaaaaa

SEQ ID NO: 101520 - DNA, 781 bp, Zea mays
  Clone ID: MRT4577_24099C.1
aaaaatacgagattaccggcaccaatcaatcaggctggcagtggagtgacagcggcggcaacaccacgcccacgcggcgccggagccgaagccgatcccccgatggatctcccgccgctctcccaccaggccctcttcgccgccgtccgatccgccgacgcgcccgccgtccgcgcgctcctggtcgacgccgaggcgtcgggcacctcgttggccgcgctcgccgccgctcagacggacgccggggaaaccgcgctgtacgttgccgcggaggccggaagcgaggaggtcgtgcgcctcctcctcccgctctacgacttcgaggcagccaccgtccgctcacgccttgacctcgacgccttccatgtcgccgccaagcagggccacaccggggttgtgaaagagttcttggggcggtggccagggctttgctcagtctgtgactcttccaacactagtcccctctactctgctgctgtcaaggatcacttggatgtggtaaatgctatactggacactgatgatagctgcataaagattgtgcggaagaatgggaaaacatccctacatactgctgcaagaattggataccatcgtattgtcaaagcactcatagagagagatccaggaattgttccgatcaatgataggaagggacaaactgtacttcacatggctgtgaagggcaaaaatacagatgtaatggaagagttattgatggatgatgctttcattcgccatgtgagggacaagaaaagaaatactgcttttgccatagcta

SEQ ID NO: 101521 - DNA, 585 bp, Zea mays
  Clone ID: MRT4577_2409C.1
gaatcctaaggagagtaagccccaagcagggaccacgcgctcgcaggacgtgaaccgcagggacccacagaagagtccggggacctctaccactccctcccggcccaatcctgggggcgtccaagacactgagatgggcccttgccgcagacatctggactcagtgctgcagcaactccagaccgaggtcttccgaggggcccacaccctctacgtgcctaattgtgacccccggggcttctatcggaagcggcagtgccgctcctcccagggacagcgccgaggtccctgctggtgtgtggatcggatgggccagcccctggccgggtccccagacggtgatggaaacgccccctgcccctccgggagcagcggctaaggctgggtgggaggctgcagggccaccggcaggagcgtggggccatcatcttgggttatttgttgagtgatgagtaactcggaggcccagcactctaccttctggccctgccacattgtccccctcaccccaggacctcacgcatggaaaaattgttggtgttggcgtggggtattaataaagccgtgttggggtctctggcaaaa

SEQ ID NO: 101522 - DNA, 351 bp, Zea mays
  Clone ID: MRT4577_240C.1
cccacgcgtccggacagacctccggtcagtaaacaggcagatggcataatgacctatgatgtatgtagacaaactcttggatgttactgatgaagaaagaattccaatgttcaccgatgccagcccagaacttgcacctatctgtgacctcggtaccgaaggtgccaacagactgcataaggttgacacgcaaaggtacgacacaccttcgaccatcctgggacctcatgcttcaggtgtgcatgcgatctacagcatgccgagttgtgagaacccagcttacaccggtattatagctgtgttgatgcgctgcgaggtcgatctatctggagcacgacggatacacactcc

SEQ ID NO: 101523 - DNA, 149 bp, Zea mays
  Clone ID: MRT4577_24100C.1
agcggccggccgggcgggcacagctttcatttatccttttgggcgttctgatccccgctggttatttgctgcagctgattctatctaccatttagcccgctagctgcactcagcggtgcctccttcttgacgcatcatcaggtgccgcc

SEQ ID NO: 101524 - DNA, 365 bp, Zea mays
  Clone ID: MRT4577_24101C.1
agtggaaattttttatttttttatttttttattttcttttttttttttttttttatttaaggggcgttttttttcttttaaaaaaaattttaaatccatagagggtcaaatataatgtttaatttttcttaagtttatctttttattctttgaccagtatttattccttaaccggaaaacatttcatatcatcccaaatttttgtttggggagtaaaccttattccttaccctttttaaaaaaaactttgccattactttgttggggggtgtgtccatttccattcgtaaagggaaattaatttcaaatatttgtttttgaatataagaatggttttgttccacaaatacatttttttttttttt

SEQ ID NO: 101525 - DNA, 416 bp, Zea mays
  unsure (1)..(416): unsure at all n locations
  Clone ID: MRT4577_24102C.1
ggcagcatcaaagatccagcacgggtaaacatttcagaatagtgcctcttaatcttatggaatggtagttagatgtactcagaaatttggagaactggagtttatgtatgaaatatgaactacttatgaacttatatggacttgattcgtcatgtatgacgagtcattcaaagccagatcaaccctgatagcatctggctaggtaaatatggctgttttatagtttgntcctgcttggtttttcaaatcgttttcttttatgtaccttcccattctgngccttggtatgaaagacaatactggctacttggtgattcctaaaaaacactttctttctggaacttcacagcatgggaccatccatccttggatggcctgactacctttatgcatgtgtccatctagtggattttctg

SEQ ID NO: 101526 - DNA, 484 bp, Zea mays
  Clone ID: MRT4577_24103C.1
attgtggttacaattaaaaacaagcccagaagaaggtgggttaaaagggcacacgctaaaccgaagaaaaaaaaaaaaagcgcgatgctgcatgaccgggggaactagggagtcgaacacggaacatgactgaacactgaaaaaagaaaaacgggaggacaggggggatgggggataaggttccaggttcgagttaggggaaggagcatgggccgacgatcccggtggtcccggaaccagagaaaaaagatcctcccgcacaggtaaaaaaaaggagaaagcagggagggaaaaggggtctggaacccaagctggaagaaaaaacaccaatacctcaggttgctttgaagtgggaagccctgggcgcaattcatctctaaaacccacaggcgagtggagaggggacaaccctagatacgggaccttaggagttaccagcttccaagagacaatgggaaaacagaaaacatgtggttagtgggca

SEQ ID NO: 101527 - DNA, 912 bp, Zea mays
  Clone ID: MRT4577_24104C.1
accgcggcggccacgcggcgctgctgctgctgctgctggcgctggcggtgatccccgtgacgggcgccgccggcgcggcgttcctggaggaggacgcgatcctgggcgccgtggagcgcgcgatgatgcgcggcggcggggggaagggcgccgcgaccgcgaacgcgagcgggaggcaccagcaccggcgccagcgctacggcgtgggggcgccgtggagggaggagatcgcggggctggcggggcggcccgagctggcggcgtggctgcgctcggtgcggcgccggatccacgagcgccccgagctggcgtacgaggaggtggagaccagccgcctggtccgcgacgagctgggcgcgctgggcgtcgggttccgccaccccgtcgcgcgcaccggcgtcgtcgccacgctcggcaccggccgcccgcccgtcgtcgcgctccgggccgacatggacgcgctgcccatccaggaggccgtggagtgggagcacaggagccgggtccccgggaagatgcacgcgtgcggccacgacgcgcatgtggccatgctgctcggcgccgccagcatcctcaaggctcgcgagcaccaactcaaggtacgtataatatcactccggcggcctgcctacgacgccatccgctgccccccgtcttttcggtttcaggcccgctctctgttgtcctattcactactgctataataaaatcagtttaaaaatactcagccacctagcttacaaaaaaagctactccgaacaaatatagttttttttctgctgccccccaatttcaaatagatatagctggttctctctaaccatgacaagtttttttttaaaaaaagtttgttcatccaaacgggcattatcagtctccgaagctgcaactgcaaacacaccactccactgt

SEQ ID NO: 101528 - DNA, 1064 bp, Zea mays
  Clone ID: MRT4577_24105C.1
gtagataaggaatgaagcaaagatgaggagggaaaggttagaacaatctaggttggtgataccaaagtcttacaaggagaagcaggcattggctgctcgacagaagtataaacaagctgtcattcgagtcgagtttccagatagaatgattcttcagggcgtattcctaccaggcgaggccactggttcgctgtatgagttcgtcacatctgctctgaagcagccaggcttggagttcgaacttatctctcccgccattcctaagccgcgtgtggtgcctcattttccaaacccgggagagcgggcacgcaccttgcaagaggaggagctggtcccttccgcgctcctcaagttcattcccagggagactgattccgtggtcttcaccggtttgcttgatgagcttctggaggccagtgagccgcttcctgctgcatcacaatgaagtgtgtgtgtatgtgtgtgtatagcagttcgttctgttgctgtttctgcttgctgcatcacaggattacttggataacggtacgtatttgtattggctgacatatcttgtggcagcgccccagtactcttgaagcagatcagctctatcaccatctagccgggtgttgaggtggaggtgaccgttccagacgtgtaatgacgatctatatattcgtgttgcttttgtttttgtgctccccttgtgtgcctgtaagagagacatcgagttattgttagcttataatccttttgtagctgtatgtcttatctgtgggctgcgcaacttaaaattttggttcagtaatctagtttgtcagggcaactagttcgcttcagtcttctgtcaactattgtgatgaacctcgcttcgttcaattttttatgataaaccttgtatttagcacgtgaccgaattctattagcataaagtaaactgggtgtcgaccattatgtggtacctatgaggttcatgcagcagtttagtgctctacttgaagagtctatctctgtacgactctatacatacatgtagtcttttacttttacctatctcgaaaaaaaaaaaaaaaaaagcggcc

SEQ ID NO: 101529 - DNA, 323 bp, Zea mays
  unsure (1)..(323): unsure at all n locations
  Clone ID: MRT4577_24106C.1
agcgncncngggcacaagnnngnncggagcccnncagccagnggngnnccagaaacaagggnggagcacannaaagcccnnncnagcaangnggagnancnggcgncaaggggagcaacaancangggaagcaggagggggcangccccnancnnccncngggacacccncaacaggaagggcnacagaggcnnccagaaagaagnccaaaagggcnngagaaacgcgcaccaccnaaaagancgccncaaggaagcaggaancggagcgangcccaacgagcncagnagcacgggcgngnnngaaaggccaaagggagaaga

SEQ ID NO: 101530 - DNA, 410 bp, Zea mays
  Clone ID: MRT4577_24107C.1
tttcaacctcttaattgggagccaaaaatggggaccccatccccggagaacctttaaatggcacaggcggcatattacccaaccaaagggaacgacgcaacacacaacttccattcgggcgaacacctggcacagagaatcaagatgccaaacatggcgcaacatttcttacaagaagagggctcaggcaagctgcttgatcatgaccactagagaaaactctcaatgtaccgctgaccgatccaacaactgctgaccatggctgacgaactaacaagaaagtatgcgctgaaagaagagaacaaagacccacccctggcagctcccccagtgcagaatctcatgacttcttactgcctgaaatacccctagaagggatagaaaaactgcgggctacagaaccaggcggc

SEQ ID NO: 101531 - DNA, 387 bp, Zea mays
  Clone ID: MRT4577_24108C.1
ctatttataaataaaatatttatttttggactaataattattatattatttactaggattttcctataagaagaaatgctaataaatatccacaaatcaatcatgagtaatcaaaaattatttcaaatgcaaataaataacaaacacttgaataaaaaattattaccgtaattaccataaataactaaatgcattatttttagttgatgggttttatagggttacaacccccgccgggctaaccttggacgttaataccccgctggcctgccctaagcgtgctggcctccgttagcgccgtcagacttccccaccagcttgctgcacctcacacgatagtaccccgctggcctgtctttcgatcctgcacctccaccgttaggcaca

SEQ ID NO: 101532 - DNA, 142 bp, Zea mays
  Clone ID: MRT4577_24109C.1
gcggattatccaatccaagccttgctttatttgcacccttacctcccactggttggccgaactgatagtctcgtgcacctcttttcgagggcgaatagtctaccggtgtgccacgattcaactttaagctccatacatctac

SEQ ID NO: 101533 - DNA, 1420 bp, Zea mays
  Clone ID: MRT4577_2410C.1
ccaccgagcgatgcattccttctccatagtcaaggtttgcatcgtgatacacggtacacacggctcacattatggattgttggtttcatcattaatccatgtggattaagtgatattatgttgttttaaatacataacaagtcaaaatttatcccaatccattttaatacacttcaatccacaatccatatgaaattaaaataactgaacaaggctttagtgtagtgtaatcaaaggccattctgccagctgcaccctgcagacagcgacgacccatcaaagattcttcccagacctgtcagtttacatttgctgacgcagaaattgggggaaggccaggtcagcgcccaaaaccagtgaatgtctacgacgctggcccggtggccccaggattctagaatcaaagcagctaaacctaaaattaactcaacgttacaaaactacaaccttctgccctataattctggaatcaaagcaggtaaacctaaaattcctgtggtaccatcgatcctgaaaattgcaaggttccaataccccgacgtcaagagcagcccaaggtgtgctcaattcacccatagcattacagctgatctcgtaagactccagcttctacaggtttagcaatatgtccaaccaaggagtgcaggcacaatttccgaacccaactgatcacgcgcttatgtcttgggaactgtaacattcaagatttttacatcttgatatggtttgtcattcttgtcagtcttgaccttctcaatttgctggacaacatccatccctttcacaactctaccaaacactgtgtgtttgttatctagccatggagttgctacagtggtgaagaagaattgagaaccattggtgttaggtcccgcattggccatggaaagtgtaaaaggcctatcatgcctcaagctcttgtgaaattcatcttcaaattctgtgccccagattgattgtccaccagtaccatcccccaaaggatctccagtctgaatcatgaatcctttaatcacacgatgaaatataagattgtcataataaccattccgacaatgggtagtgaagttttcaccagtttttggacactcttctggatatagtctcaagtgaatgtcacccatagaagtatgtagcaccaaattatcaggcaatgatgttgtagcagtttttcctaggtctgatgcagacaaaagctcttctggcggtggtttttcattgaaaacatctctacccttagttgcatcttcaggctcttctggttccctacgactaaagagatatatccgatgcttcttgaaagcacaacacagcagcgttgggtctgataatggttccttgctatcattgacattggcagctactgaaggaatttttctaaccttcttgttgcctttgtctccttggtatagtgcagcct

SEQ ID NO: 101534 - DNA, 1014 bp, Zea mays
  Clone ID: MRT4577_24110C.1
gttggcctcctcgaccgcctgctccagcgcgcggcgcaggccggcgttgtccctccgcgcggcggcggcgtcctcctcggcggcgcgcgcgcgcgccacaagtgccttctccctggcgcgccacccggccgcggcgtccttccagttggacgtgagcgcgccgacctgctcggtggcagaccacagctccgcctcggcgccctggagcaggccccggagccggtcggcctcggcgttgctggcctccacctcggcctgcgcgccggagagccacgccttgacctgcttcgcctccacggtgaccgcggacagcgccgcggcgagctcgtcggccgccttccggctccgctcctcggcctgctgcgccgcgcggagcttggccctcagcccgttgatctcctcgtcgacgccgccgaacatgaggtccatgacgctccactgctgcgcctgcgcggccggctcagcagcggcgccgcccttgccctgctgctgctgctgctgctgctgacgcagcgtggcgacctcgagcgaggcctcctcgagcgcgatcttggtctgctccagctccttggtctgctggaccagcgactccagcatcttcatctccgtctgcttcgccgacgccacctcccgctccaggagccgcacacgctccttggtggcgcttccgtcgctcacccgcggcgactcctccatgtccgtcggcggcagcggcgaccagacgccattttccggctgcgccatcacctcctggtccgtcgcgctgccgttggcgtcgccaccgtcctgatcctgctggacctgggagacgaacgtggacgtggtggacctgctgcgctcgtgccgaggcttcatctgcctgggagacagaggcggaatagtggtccacggcccggacccccaggacctggatctgagaactcgtcaacaattcaggaagacggctgcatcggctggtccgtcgcagtcgcagttcgcagcccgggagagcaaggtgcggcggcgtccacagcc

SEQ ID NO: 101535 - DNA, 279 bp, Zea mays
  Clone ID: MRT4577_24111C.1
tccttagagcgggcgccctctccttctctccatttttttttatttgaagccaaaaaaaaacaccgggaatggttatttttctaaatgtaaacccctcactacaccacattttactcttaaaacattatatacagcttatttcctcatgtcataattgtttatatatatatattaaatcttatacaacaaatttctacatttccaaatctatcgaattgttctattctataaaacactaacactgtacaagttgttaccttttaaaatgttatttcttct

SEQ ID NO: 101536 - DNA, 305 bp, Zea mays
  Clone ID: MRT4577_24112C.1
ggaagcaaagcatcggggaaccacttggactataacacatttttgggaaaccaaaatatacgttaaaatcgggaccaagcccgtggttaacttttcagctccccatttaaaggcactagggacaaattaccccaagggtctagctttaaaaactagctggaccctaagctaaggcaaggggccttgaaggatctgatatccgaccccaaaaacatggcccgaaaccagtttttaaacagggggaatctcgttaatccattcaggcgcggcactaattaaaggacgaggcattgggctacccgggt

SEQ ID NO: 101537 - DNA, 523 bp, Zea mays
  unsure (1)..(523): unsure at all n locations
  Clone ID: MRT4577_24113C.1
ggncgaggagcgccaccacggccgtggacccgacgatgccggagacgacgctggtaaatcgggcagcggcagctcgggcgcgccacgcgcccgcacgcgcacgccagcgccgccatcgcgtcggcgcgacggaagctcctccgcagcgccgagcgccacgcgcgctcctcctcctcgcgctccggccacgcgccgcggggccccctgacgaacgccgcggcgctcgtctcggcgccggcgccgtcgccccacgccagccactcctgccgccgccgaaggaaggcggccccctccttgcccagctcctccgccacgaactcgtgcatccggtcgcggcacagcgcggacacatgggagccgacgtggccgtcgaagaccgcgaagaagtgcacgggcgagccgtcggcccatgtgcacaggtccgggtggagcgagatggtgtcctccatcatgcgcatccgccccgccatggacagggagcctaacgccacgggccacacctgcgcggggacggtggcaggct

SEQ ID NO: 101538 - DNA, 346 bp, Zea mays
  Clone ID: MRT4577_24114C.1
aaaacaacacaagttcccaattttgcttgttcaaattaaggggggatttttttcaaaaaacattgtttcaaattgacaagattgcagccccctggttccacaactttttaactttgattggtttatgggggccaacattggggggaacccccttttctggaaagggggtcttggaaaagatgtcattgtccttccaaccatgttgggaacgggaaggggcccccaggcccgaaaataacaggtttttttgggggttggacccatgaaaaatacgtgacctttaggaaggggcttcaggagttccaaaattcttatttttaggtgggtggggatccagggtcccccc

SEQ ID NO: 101539 - DNA, 148 bp, Zea mays
  Clone ID: MRT4577_24115C.1
cccccggagttttcggtgcctcctgggcccttccggcattaccccgggccccggggggccaattggaatggccttgggctcctttttcgctttgaatctccgggccggcctttcggttggtcccgctcccctggttccatatagatac

SEQ ID NO: 101540 - DNA, 206 bp, Zea mays
  Clone ID: MRT4577_24116C.1
ggaaaaggggccgcaaaaatcccctttttccgggggaaagaagcctaaaacctttcccaatctttggcccaaaaaagcggggatcccctttgatgagggcaaaccaaacatggttcttcgggatcaaaaaagcctgcccccggcgattctggaggcattccacccaaacccccgggaccccgggggcgacccgggaattccggacc

SEQ ID NO: 101541 - DNA, 252 bp, Zea mays
  Clone ID: MRT4577_24117C.1
tacctctgctttgtctcactaatggtatgttcaaagttaacaacgggcatgcaaccagattttgggaagataagtggttggggaactttacacttcaatacaaatacccaagtctgtataacattgtccggtataaacatactacagttgccacggtgctcgggtctgtcccgttgaatgtctcctttcgcaggggtcttcagggggagaacttggggagatggtatgctctagttaatcgggtagcggggc

SEQ ID NO: 101542 - DNA, 476 bp, Zea mays
  Clone ID: MRT4577_24118C.1
gagccggccgggcagggtctagccatagcccagcacgaccaaaacccagaacctgagaatggcgcagttccttcgcgagaaggacgccgccgccgccaccgtagcgggggtgctgcgtgcgtcctctccggcgccatggcggcggacgggctccgcgtcgtaccaccacacgatccacgctgtaccgcgggagacagccggcccgcgcgccgcggtgcgcgagcgccgccacggacgactcccggcgctcctgctcacgctcgtaggcgccgcgccacggaacggaattgaccatcggcacctccttaccgccgacaggagagagctcgttgtgatgctcaagcagtcgccctagttcctctccaccccccgccggctcctgggtcgcgcgggagaacgattccaagccctactccacgacgtgaccgtactccccatcgaggtgcctatacatgaaaattctgtgaatatactgc

SEQ ID NO: 101543 - DNA, 156 bp, Zea mays
  Clone ID: MRT4577_24119C.1
gcgtacgcagcaacgtgtccgtcatcatccagcccacgtccaataagaccatcgccgactacggctgtgcggagttgtatacaataccagggcgactacatgctcgtcaggcaggcctacttcggcaagaccgacttcgtgggcatattctatacc

SEQ ID NO: 101544 - DNA, 501 bp, Zea mays
  Clone ID: MRT4577_2411C.1
tttttgttttttttttttttttttttggttttttttttttttttttttttttttttttttttttttttttttttttttttttttttttttttttttttttttttttttaaaggggaaaccccccacccccccataaataaaaaggggggagagggggaaaccaaaggacccccccagggcaaatcaaaagataggagggggaaaaaaaccccaccacccccccccaaaaaaaggtttaatatttttaacccttttcgcccccctcacccttttaaaaataaaaacccacccccttttaatcctttttgggcgcagccaaatccttaaaaaccttgaaaaaattgccctttttcatacccttaccgacgtaccaatgcaaaaaagcccccttggggtaaaaaaaggcaaactttggggcaatgcgggaaaaaacccccacaacactgggggggttggaaaatatgcacaagggacccttcaccttggccaagtaacccccgg

SEQ ID NO: 101545 - DNA, 403 bp, Zea mays
  Clone ID: MRT4577_24120C.1
cctatgcgtccgcgcccagtcgcccacccaccggaggttctcgtcgcgttttgccatggtgaccactgccgtgccgccgcgggtgtgtgaaagctgtttggcgccggtccctagctccctgggccgtggtagcaatttcgaatcgcgacggcaattcatccccggaccccccacccggaaggcgtatctatcaatcggcgacggtgactggccccagaggaggatggcaacatctcatgacgacactactgttgtgctgcaatttttttgtgtggggggagctagctcagcatcaagcaaccagtaaaatcaaacagagggtagcaaggaagaataatcaaccgatgaatctgcgttgaacttagttgttggacgcacaccacaataccatatgactctagtt

SEQ ID NO: 101546 - DNA, 361 bp, Zea mays
  Clone ID: MRT4577_24121C.1
aaccaatatgttctttcactaccatgaaaaccggtgcggcacctaattcgctgggggggaaatacaaatatcattaatttaatatcattcatagaatgtcataactaacaccttcatatattgtgaaaaataactcgctactatatacacaatcatatcatcgcctaatttaatgttctaaacccttaagcaaacaaacgggctagctccctctaattagctctgataacccgcaatcaatctttgtacccatcctacccactggccaaatttccatatactacctcgcattacaggttgagataatcattgacaactctgagccatgtgtgatattcatatccactgtcaattccataca

SEQ ID NO: 101547 - DNA, 118 bp, Zea mays
  Clone ID: MRT4577_24122C.1
gcggaaccatggacagcccgctgcgctccttggtgctactgctggccgtcctggacgtaggctaggcctgcacctccaggtcaacctcgcgattgttaggagctccgcagagggcaga

SEQ ID NO: 101548 - DNA, 340 bp, Zea mays
  Clone ID: MRT4577_24123C.1
tttttttttttttttttttttttttttttttttttttttttttttttttgtaattttttttttttttttttttttaatattggggtattatatttttttttataaataattaataatataaaaataaaatttttttttttggggggggggggaattaaaaaattttaagaaaagtaaaatgggttttcaacagccaaaaaaggtaaatggctatacgccgatcagtaaccagaaaaaaacgggtacacacatatatagattgatataccaaaaaaaaaaaaaaaaaaaaatgtatgtagatatgtgggggtaggcaaagacatatttatataggtatatt

SEQ ID NO: 101549 - DNA, 236 bp, Zea mays
  Clone ID: MRT4577_24124C.1
ccacgttccaccagccggcgccccttttccttctcactccgctggcgccggcgccgccttatccatggcgtcggagaagaagcaatccaacccgatgagggagatcaaggtgcagaagctgatgctcaacatctccgtcggagaaagtggggatcgactcacccgcgccgccaaggtcctggagccaattcaatggccagtcaccaatgttctctaaggctaggtacactgtccgt

SEQ ID NO: 101550 - DNA, 1631 bp, Zea mays
  Clone ID: MRT4577_24125C.1
ggtacaaaaacgaatgtcacatctttactatataataggagttctgtacaaaataaataaataattacatcatatgaagacattcgatccagcaaccatagttgactgggagacgtcggcctagaccactcacgaactcatcacagcatctttcatgctcctcatccagtggtacctgtcctggacctggggggatgtgagtacaacaagggtgagctcacatacgttcatcgctcaacaagttgtggggaataatgtacataaactcaccataggtgggagctcatgtgaagtgtaaggcttaccaaagtagatggttaaagctgaggattgcttttagagttgatcaaaattttattagcaattactaagtaaaagtagataccaacctaaataagtaagagatcaaaattaataacaacacccacaatgcaatgcatatgataatttaagtttagttccataaattaaacatgtgtgtggtctgagctgctcatgaccgtgagcacggctagtataccagttttacactctgcagaggttgcacatctttacccacaagtcatgtcactcatctgccaagagacggccaatcccatacacctctaccgaggagacgagacagggtaacactatgaggcctttacaaagttccactatcttcagaaaacccgctgcagtttctaggaagctccaatgaagggacccctcgcctgaccgccatcgcagcaaaatcaacccaagggcctccctacactgaccactcccctactgcccttgcccctttcgggtaaggtagtcctccactagctttcctaagtcagccaagggcgtcccataccaccattgtggtagcactgttttcccgggtggttctccatgttccaactaacataatgatcttaacatgaacagtaaataacaactgataataaaaatataatcatgaatagtgtatatatctatgcccaaaaccacataaagcaatagcaggtactacccaaaaatttagtggtaaacaaggtataaagatagtcaaactagggtaacctattgggtcccatcaaaattaacctatgtagatcattatgattaatcagaacatgactgggtaaaaagaagtgatcaagggcacaacttgcctggcacttgagattccaggtaccaacttgctcttcaggtgacacgtgtcctcacgcggattttatgttgcgaagtcgtccgcccacggtggcggcaattcttcgaacgccggcgacgaattacgccagcaacgcatgccaaacgcacccgggaaaaccacgtacggaagcggtgaacaccggcgatgccccaggacccgtcgtcgaggccagagcaacgaggaggacgcagatcaatggtggcggcaacctctctgttccatctctctcccatggattcgctcagcaatatggatcacggcggctactaaccctcttggcgagcacacgatggcggcgtcaatcgggcactggacgaaggtgagggcaagtggctacgcggcggctgtgaggtcttccaacggcgcgcggcgttgggtttcctcccgtgatttctctctcctctgttcttgtgaccacggtggacctcggcgttcgttccccggccgg

SEQ ID NO: 101551 - DNA, 300 bp, Zea mays
  Clone ID: MRT4577_24126C.1
gtagacctcgctcacgagcggaccaccacggtctcaatcataggagctgggagctccagcgcacaagaacacaatacctgcattgcagtccatcaaacctccgccgtctgatcctgcgcctatcgacatcacttggcagttctagactgccacattgaagatatcaataaactgtctgccgaattattaccaacgtgcgcttgcgacaatctcaaagccgctatcttctatgagtagccctaccagagctacgtcaacagagtgctgaactacaataataagctgtacaccagcggaacc

SEQ ID NO: 101552 - DNA, 820 bp, Zea mays
  Clone ID: MRT4577_24127C.1
gccggccgggctgcggaagacgttacagctagaggggcctcttcacttggagaaacctgaaaacgattttgatcaagaattcaagataagtgttggcaattgcaacgaacctaccacaaatccccaattcttctgctccgcctggctggggcagcgtgggcgcggaacgacgtcctgccggcatcagcagcatacggggggcgccgacgatgatggccgaggcagcgagagtgcagccgcggcagcaggacggttgggtcgatgaatttgaaggcgtcatgtacgacatcttcctccgcctgcccccgaagtccgtcgttcgatgccgcgccgtctgcaggtcttggctccgcgtcgcctccgaccgcaggttccttctcgaccaccaccgccgccagccctctctgcccctcctctacttcatcctcgacgacctccgcggcccggaggtcagccaaagcgagtaccggctcgaggtattggacctccgcgccaacgacaacaagttgcagactgtcctcggattctccagccacgtcaattggttgatgatcccccatgaccatgagagacggctcgctctccatggctcctgcaacggggtcctcctcctatcctccgacgaccgccagctatcctccgtcgaccgcctatacctctacaacccaaccacgcgccactggggttgcctgccaccacttcacagcgacaacaccatcgcaggactttactggcacaggatctcggacgactaccgggtgctctacttccggctccatgaagatggaaagtactgctactacgtcatggaggccggcac

SEQ ID NO: 101553 - DNA, 288 bp, Zea mays
  Clone ID: MRT4577_24128C.1
gcgcggcgcgctgcggcggcggcgtcggtcatggaaggcgccggacgcacactcaagggacgcgacctccggggcggtggcccaacgccgggtggcccacaaccggtttcttcgacctgggaaaaaggccgttcttggctttggagggttcggtttcgttcgttcgttggccacgtacttcatttcaattgagcttgcttgcttggaccgggaccttggccggtgggcaacttttttttgcgtaacggaatgctttgccaccttcttagcacttaaaaaagggggggg

SEQ ID NO: 101554 - DNA, 854 bp, Zea mays
  unsure (1)..(854): unsure at all n locations
  Clone ID: MRT4577_24129C.1
catggagtagatagcctacggaagaaacaaaacgtttctctatctggatatctacacgggtggtcttccgagacctcagcgcctgaccttccatattctttgagcatgctactcgatcttgtcgctgatgagaatggttccgttgtccttggcgtggctggaaaaagctacagggacatgctcatgagttgggcatgccgcctgcgtcgtcttagagttaccaatttcttagtatgtgccttagaccatgagacatatgagttctcaatcttacaggggttgccagttttcagagacccattgtcaccaacaaatgtcagctttgacgactgccactttggaacgaagtgttttcaacaagtgacaaaagtgaagtcgcggattgtccttgagatactaagactgggatacaatgtgctgctgagtgacgttgatgtttattggtttggcaatccgatgccactcctgtactctcttggtcttgctacattcggagcacaatctgatgaatacaatgagacaggaccaataaacttgccacgccgactgaactcaggattctactttgctnnnnnagacaacgccaccatcattgcaatggagatgatagtaaaacacgcagccagttcaggcctatctgagcagccgagtttctacgatgtcttgtgtggggagaacggaacaaaccggatcggtgaagacagatgcttggagcccaacacgaacctgaccgttgtgttcttggatcgggacttgttccccaatggtgcctacaagggtctatgggagaagcgtgatgtacgagcaacctgcaaagagcttggctgttcatcattcacaacaactggataaac

SEQ ID NO: 101555 - DNA, 218 bp, Zea mays
  Clone ID: MRT4577_2412C.1
cgtaagctcggaattcggctcggagcttacgacacacgcctgaaagccgggaagccacccacactaacgggggagggctaaagagagacccccgggcacgcggacaaaccgaaccagcaccggcccaaggaagagcacccagcggggcaccgcagacagagaaaccgggccggcagtcccccaaggcgggcaacacggccagaggaaggagaagagca

SEQ ID NO: 101556 - DNA, 267 bp, Zea mays
  Clone ID: MRT4577_24130C.1
ccctcgtgcccacgcccgtgatgcaccgccgtctactggcgcgcgggagaaggctgaggatgacctgtgcagcctacaaggtgatacaccatactgtcgaataccaccacaggactccaggcaactgtggtctgtgagaaggcgtggggcgagattgcccatacagcgtgtagcaggagactgtcgacgggattctccgcctctggtgcagcgcccgccagctgtcgcgcgaggacagacagctcctgggcgtgcgtccccatggat

SEQ ID NO: 101557 - DNA, 831 bp, Zea mays
  Clone ID: MRT4577_24131C.1
gttgatgtttattggtttggcaatccgatgccactcctgtactctcttggtcttgctacattcggagcacaatctgatgaatacaatgagacaggtaaaagtttggatcccattttcttatgtttcttcctattttcttctcttcacaactcacaccaacatctgaacccagagtaaatttcaatgtacatgacaagaagttcctagcaaatgtccatgtgacacaaacttcaacctgcaaatacatttattgctgtctgtttacaggaccaataaacttgccacgccgactgaactcaggattctactttgctcgctcagacaacgccaccatcattgcaatggagatgatagtaaaccacgcagccagttcaggcctatctgagcagccgagtttctacgatgtcttgtgtggggagaacggaacaaaccggatcggtgaagacagatgcttggagcccaacacgaacctgaccgttgtgttcttggatcgggacttgttccccaatggtgcctacaagggtctatgggagaagcgtgatgtacgagcaacctgcaaagagcttggctgtttcatcattcacaacaactggataaacaagaggagaaaaaaggtccaccggcaaatggtatctgggctgtgggactacgatcctacctctaggcagtgcttgcaggaatggagtgctcagaatgatggggcaattccatttgtttgaggacactgacagttagtagactggttaacttacctcatcccctgttattaaattcgaatattatgtgagggattgatcaatactttcattcgacttcttgcaatcacaatct

SEQ ID NO: 101558 - DNA, 143 bp, Zea mays
  Clone ID: MRT4577_24132C.1
ggtggtaaatcaacgatgaacaagacataagtcctgaattctaaaaccagcacgcacatcaataaaattctaaacaatcaataaaattcgataggcttttgttgagttcaaggcagaggggccacaaggccatgagagaaaaa

SEQ ID NO: 101559 - DNA, 438 bp, Zea mays
  unsure (1)..(438): unsure at all n locations
  Clone ID: MRT4577_24133C.1
gtcaccatcttcagttcttcttttcgttgaataaaatgtgtgtcgaggaatgaacagtccatttaagattttgcatgtgcagcagtagtaataaaaaaaatgtttttgctgttggtcaccgaatgaacagtccagctgctgaaatgttgcagagttctagcattgaatagaaactttggatgctgtcctcggaacttggggccgggtggtccaggctgaaatcctgataacgattaaccaaccaacatgtcgttcattatcctgttccccatcatcaacagcacgtttctgtactgtactctgtagtctgtaccagtagcagcatgcaggcctccttcatctgctgaactgaactgacagcagaatgctaaagaagacacgggcacggcagcagnctttctgttcatctgctgcccccaaccgtcgacagtcgcacgc

SEQ ID NO: 101560 - DNA, 335 bp, Zea mays
  Clone ID: MRT4577_24134C.1
tgcggacgcgtgggaacgcgccggcctctgggggttccacgctcgtagagggatccatcctgaagttggcgctcatgtacctgctcgccggcaccgcgggctataccggcggcgcatcgtgcgccgggtccgcgctagccagacacatgttagagcggggggcgtactgcctaggctgccgcgtggccacgaccatgcacaagggcgccacctccacggcgggcgggatcgctggcgggctcaccgggacctggacctccaactggctgatctcaatgcggacgcgcatggacccagcgttcgagacacccaacaagccgtctcgcacgctgttc

SEQ ID NO: 101561 - DNA, 488 bp, Zea mays
  Clone ID: MRT4577_24135C.1
aagacacatgttgtcccaatccattttaatacactttcaattaacatgacaattaatgtcactgaacaagacctgattgttaagttagcaaaggccattttgacagatgtaccctgaagacagcgccgtcccattaaagattattccacaggccggacatttcgctgtcccactaattggagggaaggccatttcagtgcccaaaaccaaacagagtttactgctgaagcactgcgggccgcggattctgcaatcaaacaagttctgcttagcattatctgatacgctctactactacggcaccaagctctattattcttccttataagcatgatatcctcacatccctgtagtaccattggtcctgccttttgctgagattgaattccctgtgctcgagagcaacccaatgtgtgctcgatcctcccgtgctcttacagctgatgttgggtgaccttcgcttctacaggttcagcactgttggcaac

SEQ ID NO: 101562 - DNA, 734 bp, Zea mays
  unsure (1)..(734): unsure at all n locations
  Clone ID: MRT4577_24136C.1
ggctgcgcattctttctccagctctctgataagctagccagcgtcgcgcggtcttgttgttagttattagctctatctcgccgccctgcagctgctgatcgagtgagggaattnnnnnnnnnnnnnnnnnnnnnnnnnnnnntagatatgacggcggcggaggtggaggccgccaaggacatcgccgaggagaaggccgtcgtgccgttgccaccgtcgcccgccaagccggccgacgacgactccaaggccatcgtcgctcttgtcgtcaaggatgcttacctcgccaagatcgtgtccgagaagaggctgagtctgatcaccgcctgggaggagagccagaaggcgagagccgacaacaggagcaactgcagaagaagaaggcggcgtacgaggagaagctcaagaacaagctggcgatgctgcnnnnnnnnnnnnnnnnnnnnnnnnnnnnnncggaggccaggcccggcgaggagaccatcctggcggaggagatggccgccaagtaccgagccaagggcgagggccccaccaagctctttggcctcttgaaagcgtgacctctgctatggagaatgccctgtttcgtgcgtgtattaatttcgtattctcaacaagtgcactnnnnnnnnnnnnnnnnnnnnnnnnnnnnnnnnntattccaaggctgcttgacaatatctgttgtattgtattagtataggagaacagtgcagtgcagtgcgacgcgg

SEQ ID NO: 101563 - DNA, 281 bp, Zea mays
  Clone ID: MRT4577_24137C.1
acagagaggggcgagttccatctctgcagcagccgagcacccccacagccatgtcgcccttccccagcgagggccgtctgcttctaccacagcgactcgcttttcttctttccgttgcgggagtgggcgaagcacttggctggacatatagccctcctatggacgttcgttgtgatcccaggagaaccctttcataggaggcctgcatactgcacgaatgcgacacctatcccacaacaagggcaattttcagacgctcaagtgcctcaccccacgacaac

SEQ ID NO: 101564 - DNA, 1056 bp, Zea mays
  unsure (1)..(1056): unsure at all n locations
  Clone ID: MRT4577_24138C.1
ctccccctcctgccaggctgcgcagtctttctcctactagcttgtttgttaagccattcacttcccttgtttgttaagagctgagctacatttattctcttcttcttgagcccctggcctccccctcctgccaggctgcgcattctttctccagctctctgataagctagccagcgtcgtcgtcgtgtcttgttagttattagctctatctcgccgccctgcagctgctgatcgagtgagggaattcagcagcagcagcagcaggtagcatagcatagatatgacggcggcggaggtggaggccgccaaggacatcgccgaggagaaggccgtcgtgccgttgccaccgtcgcccgccaagccggccgacgacgactccaaggccatcgtcgctcttgtcgtcaaggacgctgctgctgggaaaccttctacagctattattggaggctcaactgaaagagatgcttacctcgccaagatcgtgtccgagaagaggctgagtctgatcaccgcctgggaggagagccagaaggcgagagccgacaacagggctgccaagaagcttgccttcatcacgtcctgggagaacgccaagaaagcggagatggaggcggagctcagaaagatcgaggagcaactgcagaagaagaaggcggcgtacgaggagaagctcaagaacaagctggcgatgctgcacaggacggcggaggagaggagggcgcagacggaggccaggcgcggcgaggagaccatcctggcggaggagatggccgccaagtaccgcgccaagggcgagggccccaccaagctctttggcctcttgaaagcgtgacctctgctatggagaatgccctgtttcgtgcgtgtattaatttcgtattctcaacaagtgcacttggtgtgtgtgctgtttgttattttctctcttgtattccaaggcttgcttgacaatatctgttgtattgtatttgtataggagtgcagtgcagtgcagtgctattctttctcaaaaaaaaaaaaaaaaatcttcataanacaacacananagggcgacgg

SEQ ID NO: 101565 - DNA, 642 bp, Zea mays
  Clone ID: MRT4577_24139C.1
gacgacgactccaaggccatcgtcgctcttgtcgtcaaggacgctgctgctgggaaaccttctacagctattattggaggctcaactgaaagagatgcttacctcgccaagatcgtgtccgagaagaggctgagtctgatcaccgcctgggaggagagccagaaggcgagagccgacaacagggctgccaagaagcttgccttcatcacgtcctgggagaacgccaagaaagcggagatggaggcggagctcagaaagatcgaggagcaactgcagaagaagaaggcggcgtacgaggagaagctcaagaacaagctggcgatgctgcacaggacggcggaggagaggagggcgcagacggaggccaggcgcggcgaggagaccatcctggcggaggagatggccgccaagtaccgcgccaagggcgagggccccaccaagctctttggcctcttgaaagcgtgacctcttgctatggagaatgccctgtttcgtgcgtgtatttcgtattcccaattgcacttggtgtgtgtgtgtacgtgttgtttgttgttttctcttgtattcgatggcttgcttgacatctgttgtattgtatttgtatagaagtgcagtgcagtgcagtgctattctttcttcccc

SEQ ID NO: 101566 - DNA, 647 bp, Zea mays
  Clone ID: MRT4577_2413C.1
gctcctcgcctacttcttctggcggtgcagcgggaagggcaagggaggacgccgccgccacaggcgcggcggcagcgagtcgggcggcggggaggacgggagctggtggaccgagaggctgcgtgcggcgcacaaccgcctggccccggtgtcgctgttccagaagcccatcgtgaaggtgaagctcgccgacctgatggccgccacgcaggacttcagcagcagccacatcgtggtcgccgggagctcgcgggcggggacggcctaccgcgccgtgctacgggacgggtccgcgctgacggtcaagcgcctgcactcgtgcccgctctcggagaaggcgttcagggcggagatgtgtcggatcgggcagctgcggcatcccaacatcgtgccgctgctgggcttctgcgtcgtggaggacgagaggctgctggtgtataagcatatggagagcggggctctttcgtcggtgatgaagaagaagccaggggaggaggcgccgctgctggactgggcgacacggctgaggatcgccgtgggggcagcgagggggcttgcgtggctgcaccacgggttccaggttccgcagattcaccagaacctgagctcgagcgcagtgcttcttgacgaggactacgaggcccgga

SEQ ID NO: 101567 - DNA, 1156 bp, Zea mays
  Clone ID: MRT4577_24140C.1
gaaaaggcaaccccatggtagtagtatgtagctagctgtacgtgcatggctttgctcatgagaatccagagtactacgtaccccagctagattccctggcatatgcatggcctggcctatcatgaactgtttcttgacagccggaaagctagctagtacatgcatgcttggaatctctggttggaagcggttgatcgcctggttggatgggactgggaacaacagctagcccatcgaaatccattcatataggagctacttcccttgttttttaagccaccgtacctcactccatttattattcgcttgagccctcctgccaggctagctgcgcattctttctctagctagctagctctctctctctctcaagtgataggaggagcgagatatatacatcgatctgaatccagcagcagcaggtagcatagcatagcatagcatagatggcggcggaggtggaggccgccaaggacatcgccgaggagaaggccgtcgtgccgttgccaccgtcgcccgccaagccggccgacgacgactccaaggccatcgtcgctcttgtcgtcaaggacgctgctgctgggaaaccttctacagctattattggaggttcaactgaaagagatgcttacctcgccaagatcgtgtccgagaagaggctgagtctgatcaccgcctgggaggagagccagaaggcgagagccgacaacagggctgccaagaagcttgccttcatcacgtcctgggagaacgccaagaaagcggagatggaggcggagctcagaaagatcgaggagcaactggagaagaagaaggcggcgtacgaggagaagctcaagaacaagcttgcgatgctgcacaggacggcggaggagaggagggcgcagacggaggccaggcgcggcgaggagaccatcctggcggaggagatggccgccaagtaccgcgccaagggcgagggccccaccaagctctttggcctcttgaaagcgtgatgacctctgtttcgtgtgtgtatttcgtattctcaacaagtgcacttggtgtgtgtgctgtttgttgttttctctcttgtattccaaggcttgcttgacaatatctgttgtattgtatttgtataggagtgcagtgcagtgcagtgctattctttcttccc

SEQ ID NO: 101568 - DNA, 306 bp, Zea mays
  Clone ID: MRT4577_24141C.1
tggacttgcactgttgcttgctcataattactagatcatcaccaaacaacaaacaatggcaccgaggttagcgtgcctcctatctctggacatggcagccatcgtcgggccgccgtgcacggcccagaactcgccgcaggactacgtgcacccgcacaacacggcgagcgcccacgtgggcgtcgggccggcctcctgccacgacaccgcggccgcctacccgcagagctactcggcccacccccagggcgactgcaagctgatccactccggagggtcctacgcgcgagaatctcctatggggct

SEQ ID NO: 101569 - DNA, 410 bp, Zea mays
  Clone ID: MRT4577_24142C.1
tcggctggaaccgggtccgaacgtccgcttggctttccttggattaccatgggactcggccgtccgactgccgggaagcaaaagcaaagcctgcaaacccaaccattgataacgccaacgatcggcagggggtccttctggcgtacatcctcccattccccttcttcgcatgcttaaaggctcaatttgccgactctgcgtgcccggccggaaacagcgccacctaccagaagtcctagttgttatgggacaatgacgtttcgacgctgcctacatgacgcccttatgcaaagacaaactgggaggttttaaagacacctatctacaagaccctcctaatgcatttataaaggctggtatggacaacacttaaattaaatgctgtgacatggtggacataggttataaaa

SEQ ID NO: 101570 - DNA, 605 bp, Zea mays
  Clone ID: MRT4577_24143C.1
atattatatcttttaataataatttaaattgttttaacttgattacctacatatatattttgcaagagcaacggttaccagagagaaaacaaaatactgaatacagcacaaaaaaaaaaagacacgccaaaaaaaaaaaaaaacggggggggccccggggcttatttaaactaggaaaaaaaaaaaccaaggaaaaaaactagctaaaaacaaaaaaacaaacttcgtgggagaagaaaactagagggcccaataccagctatagggagggaaactacaaatcactgcacaacgacaaaaaacggggggactgggaaaaaccgaaattaaaccaacaaaagggccgcgacaaaaaaaaaaaaatggccagaggcctcttttagagaagagaacaaaacgaatgcgcggccaaagaaaagctggaagggaaagaaaaacgggcgcgcccctgaaaaaaaccttaaaaaaaaaaaaactccttgataccggggggggtaaaaaaaaaaaggcgcaaaaaaccacccccacaaaaattggggaaaataaaaaaaaaaaaaaaaaaacctcgggggggcgccccacaaaaggggggaagggggggggcc

SEQ ID NO: 101571 - DNA, 481 bp, Zea mays
  Clone ID: MRT4577_24144C.1
ccggccgggatggaaatcctgggcagggactgggtggacctctactgccggacacccaacgggagcagcctgttccgggtgccgcgggactgcgcgtactgggagctcatccacgaggcgctgcgcgacttctggtggggcaacgtggtgcccgcgcgggagctggcgctcctggggaaggacgacgaggcgaggtccttcgagcctcagcccaagcaccggctcacgaacctcgtgctgtataggagccggaagctggcctccgaagcgaagctactttgtatggatgttggcggccatgtagaattcttccaatgaggagtcctgccgccgtttattgtacactgtattatgactattctttaattaacttatgaattcgttaccttcccagcgccatgttcttttttgttctgttctgttctgtttaacaaagagtgtaagtataatcttcaaaaaaaaaaaaaaaaaatttgcggcc

SEQ ID NO: 101572 - DNA, 174 bp, Zea mays
  Clone ID: MRT4577_24145C.1
atgacccctgcatggcaggacccttatccgcacaaatatatagcatgctgctgctgagagatgggaaagaaaattaccgcttggtgctctatgtcgactccggagatgaagatggtgaaagagggggtgctccatttttttgtattgatggtgcggctaaacagggcgccaatt

SEQ ID NO: 101573 - DNA, 286 bp, Zea mays
  Clone ID: MRT4577_24146C.1
aagcacgccgcctacgcctggcccttgtacaagcctgtggacgtggaggcactgggcctacacgactactgtgacatcatcaagcaccccatggacatgagcacaatcaagtctaacctggaggcccgtgagtaccgtgatgctcaggagtttggtgctgacgtccgattgatgttctccaactgctataagtacaaccctcctgaccatgaggtggtggccatggcccgcaagctccaggatgtgttcgaaatgcgctttgccaagatgccggacgagcctgagg

SEQ ID NO: 101574 - DNA, 1129 bp, Zea mays
  Clone ID: MRT4577_24147C.1
tcggccgggctgtgatgcgccctcgagccggccgggaattgaccgccattgtgcaaaccagaaccccttcgccattttcaccaactccctccgatcccggccatggcgggggaggactgccgctccggcgcggaaatggacgcgctcgtacgacgcttgaagctccaccggccgtccccatccccctacgaccccgatccggccgcggcccccgtccccgccaccgccggcgacggcgagctgttccggccgcggagagctgccgtgcttgtctgcctcttccggggagacggcggcgagctccgcgtcatcctcactaagcgctcgtcctccctctccacccactccggtgaagtttcattgccaggaggaaaggtcgaggagggtgatgctgatgatgtagcaacagcgttaagagagtcaaaagaggagattggacttgatccagctctggtaactgtggttgcctctcttgaacacttcttgtccaagcatcttctggtagttgttcctgttgttggcatactgttagacagacaagcatttaaacctgctcttaatattgctgaggtagacgaaatatttgatgtacccctggagatgttcctcaaggatgagaacaggacatcggaggagcgagaaaagatgggccagacattcacagttcattacttcacttatgagaacggaatccagaagtacttaatctggggtctgaccgcccgcatcttgatccatgctgcttcagttgtatacgagcgaccgccagactttacagagcgaagagcacatttcaaattgccaaagttcacaaaggactgctcttcaatgctagcaggacctgctaaacattagtgcacactgcctacgctgctatctcagctacatgctatttggagtacaggatgttgcaccaacatagtttatagaatcgaagaggcgtccaaatcacttgatgtcatatgaatttagattctttcgacaaaacactatagtggcatttatgttcagaacaatgttcgtatatgaatgcaccacaaatcatccatgttgatgctgttaatgacatggagcacttgctcggatgcaattggctcgtatatacatatcagattgttctactgaaaaa

SEQ ID NO: 101575 - DNA, 617 bp, Zea mays
  unsure (1)..(617): unsure at all n locations
  Clone ID: MRT4577_24148C.1
tctgtctcggcactggagcggcagataaccgtctgacgttttgagaatcaaggcccctagtctcagctgccctatgcttgaggttgttgagctgacctttatgtgttgttcgactgtgtatcccactaaaataaggttttacacagaaaggtatggtatagtcgcactcattcagacctgcccagttcgtgctttcatgctagcgtgaaacagaggctcgagcttttggattacaagaggataacaggtgctggagtgagttttgttgccccgcacttgagtagtctcactatctccggggaaggtgctcaggggcctgccacttccagcttggttagctacctgtgctgattctgaaagccataatagcctcgtaggaatgaaactcatatgccgcatgttctggaaacctttgcacttgcaacttagactgattggaaacgttttcagagaatggaactgaaatatcactgcctatgcttctttccatttcgtatacctatcatataaaagctntaggttcgaaactgttagtatgttgctgtggctagcatgagtataatcccatttctgggagatttttttagcagcatgtttgggaacatggntattttctt

SEQ ID NO: 101576 - DNA, 453 bp, Zea mays
  unsure (1)..(453): unsure at all n locations
  Clone ID: MRT4577_24149C.1
agctgcaataaaaagactcgttttatgatgggctgttatgaaaaaccttgtctggacataatttacngcctccgcgtaacctccttgatgctccataagagagttagaaacctacggatataataaaaataaaagggatttgcgctttctggcgaataacccaatcctctatgcctagactattagtcactaattaccaaacggaatctaaaccgtagttctgtctacactttcattacagcctgcgtacgaacaacaactacactagattgctgatggtgtaatcattctagcagaactagactgcgcccttgttttaacatgaacccagacttacagggtgccgttctcctcgccggatccacacctgttgccctgcccttgggggaaatgggcacgccgcccccttggagataaaccgaaggggtcttgctccagctagctgggcttatg

SEQ ID NO: 101577 - DNA, 384 bp, Zea mays
  Clone ID: MRT4577_2414C.1
ctcaggaaatgtggttatgttttatggaaatttatcctgttgctatttgattgatcaattgacgatggtgccccattatttgaaaaaaaaaaaaaaaaaaaaaaaaaaaaaaaaaaaaaaaaaaaaaaaaaaaaaaaaaaaaaaaaaaaaaaaaaaaaaaaaaaaaaaaaaaaaaaaaaaaaaaaaaaaaataaaaaaaaaaaaaaaaaaaaaaaaaaaaaaggggggggccgttttaagggatcaaatttaattgccggggcatggcaagttaaaattttttattaagggagcccaaaatcaaattgatggggcgaataataaaaaaataaaagtgggaaaaaccatggggacacaaaaataaaactcgtgtgagaaaatccc

SEQ ID NO: 101578 - DNA, 321 bp, Zea mays
  Clone ID: MRT4577_24150C.1
gggaagaccaaaaaacttatagaccggtgggggtttccccacttccaattgggggaaattggtcgggggaaaaacaacaatttgggaaaaggcctgaacacagcattcaaaatcctggttttgacatgccccccacaccaaaggggcgggggaagcccaagttgccccagggaaaaaaagcttcttagaacttcatcttttaaaacgaaaccagctgggcaaataggggcccgcggggttcatatggccataaaaaccatctgccgcaagttttgaacccctcaaagaattttactcatttgagccggtccattttccata

SEQ ID NO: 101579 - DNA, 368 bp, Zea mays
  unsure (1)..(368): unsure at all n locations
  Clone ID: MRT4577_24151C.1
tttttnttttttttttttatngatttaaacgaaagccccatcaagctggcctgttttattaaactggaatcacagattagggattcttgaaaccacagctaagcataaacggaaaataaaaccccatatatatgttcttggggatactgcgctacgcagggttggattacaactcaacataaatacgattggcctgcataatgtccagaggaagcccagaatgtccggaggaaattacagccatgggcacgatccgactgaatacacaggatcagacttgagatgattacttgactaggacacttggaattgcttctcttgtttataatacgcggcgaaacccaatgtatccttgatctcctgaaaag

SEQ ID NO: 101580 - DNA, 281 bp, Zea mays
  unsure (1)..(281): unsure at all n locations
  Clone ID: MRT4577_24152C.1
tttacgccttcaggtactctntccntaattcccggggggacggcactcttcctncactaattctaatcatcatccaatttatccacatcatccactcgactactctacatcggaaagagcctcttaacaggggagccatggcaacatttctcccaccaactatattaattcctactcttctttctctgctatcatctttacttcggcctctacctcgacctctcctgatcaccataccttgttgacttctcctcctaatccgtcctcgggtcggaccaatt

SEQ ID NO: 101581 - DNA, 126 bp, Zea mays
  unsure (1)..(126): unsure at all n locations
  Clone ID: MRT4577_24153C.1
acgcganggacggccaaaggagangcagggggcaacaaaggagacaagngcgggggcnaaggaggcgagacaacagaacgataagcaagggcacaaaggcaaccacaagaagcggcgaataaagcc

SEQ ID NO: 101582 - DNA, 424 bp, Zea mays
  Clone ID: MRT4577_24154C.1
ccagcgtacgcttctgcccgtccaccgagacgtcaagcggattgaataccttggggagtgagagggaggagttagagtaccaaacggatggtgaggattttgaacattcaccggcttctggaaaaagggaggaccaactggatgaagaggaagaatatgaagaagatgttgaagaagaagaagaagcgcctttgtcggatgaaaaaatggaggcacccaaacgtaagagaaaatcagggggtggtgggcaaaagcccgaagagcttgtgtttgaagaggaagaccaggaccaccacgattctcccgccaagaagcaggcgggtgttcccgattgtaaaaaggctgtcgtgtttgatgacagcgaccaagactaaatttgtatgaccacctgacatgatacgcttgttttttttttcccattttg

SEQ ID NO: 101583 - DNA, 319 bp, Zea mays
  unsure (1)..(319): unsure at all n locations
  Clone ID: MRT4577_24155C.1
aattcccgnctctacgccacgcatcctgacagcgtgcatattcanaacgtgctgtccatcattaatcctaaacctcctgatataaaggcctgcttcattttcagtcccggtgctcctacagctacttgtggctcatcaatattcgaccgtccaccatattatgattaccccatggtcactatgaacagccccagtcaccatatctcgtccgtcatgctgcacaaggtgtacaatatcttcacgactattcttcatcttgctgattgcactgttcttgtggaacaacgatcgtggaatttacttgattttgcactgctca

SEQ ID NO: 101584 - DNA, 142 bp, Zea mays
  unsure (1)..(142): unsure at all n locations
  Clone ID: MRT4577_24156C.1
gagcactccaccatccagcttcgcattccgcaagttcccantcagccgaacagccancngcggtgcnaaaaggccganctgcgagctccactcnccccactccccagancnaaaaggtgntggnncaantncngncgcnngc

SEQ ID NO: 101585 - DNA, 300 bp, Zea mays
  unsure (1)..(300): unsure at all n locations
  Clone ID: MRT4577_24157C.1
ggtggnataaatagnctcgcaatgcaggggctgtctgtgaattgagaagttctgaagctggaggccagcagtagcagagcctccttgttctgctgggtccagtttatagctgatatgcagtagccatagggaaccagactggtttgattgctgacggcttctacgaagatagtacctaggggagggtagagaattagagacaaaaggctaggctcggagaaggtattgaggctatattggtgagtgttacttggttggcatgaatggcgtatacagaatttttgtctgtgtgcgatgaac

SEQ ID NO: 101586 - DNA, 406 bp, Zea mays
  Clone ID: MRT4577_24158C.1
ccgtgggggggtattttttttttttttttccgtgcgcttctcggttgccggtcccggccgggtcgctgccttgcttgtgttccggccggcgcgtcgcccctgcttgctttccgccccgccctcctctggcttgtcggggcccccacctttttttgtcgctttccgctgtgctcgctgcgccggcggtctcggggggcttgctgctgccccacacctttatggggcctgggggctgggggggtcttggttggttctggttcgggccagtgcccctgcctgttcttggggtggtccccccccgggtgctgcccccggggtgccttcccctcttaatctccttgtgcttggcctccttcttttgcttctcgggcgtgggggccccttcgttttcttttcgggctccccc

SEQ ID NO: 101587 - DNA, 547 bp, Zea mays
  Clone ID: MRT4577_24159C.1
cccccgaggccggccggggccctgtcgccccttgccttgccttctacgctaccctgagtacacacgctgtgtactaagtggtggcctaggaagttgttgctggactcgggaaacctcatcaaaacgaggcttgatcaatatggacatgcgatcgatgaagaacgcgctgacggcacacgctcatggcaccatcctctacctgctactgtacccatgatcgctccatcgatccgcagcatcgccctgactggtgcaactgttgagtgccgaccatgaccttcagaggccgttatgtgcaactactggaaacgaacggactgctgtgcggacgtgatgtgcagacaacacaacgcgctcaatctggagcgcacagtagtgaagggcagccggtacatgctggcagagactacactcgacaggatggtcaacaacgatcacgtacgtagatgttgcatgtggtcgtgctcgaaagcaacagaatgatcctactggcatcaatcgtgttctaatgactcacaaggctggattagaatgactacgccatgga

SEQ ID NO: 101588 - DNA, 762 bp, Zea mays
  Clone ID: MRT4577_2415C.1
ctcgaggccggccggggtggagttctggtaagccaaacaagtggcagttaatacttcggcccttgtggatacaggcgacagcaacagggaaactccccgctccccagccggcaaacgccagccccgcgacggcgccgcgccgtcctctcccgaccgacggcaacggaaaccccggtgacttctgatacaggaagattacttttatctatactccaccttctttcgtggctatggcactagcagctatctataaccttttcatcattaacaaatctggcggccttatatactacaaggactatggttcagcagggaggatggataccaatgacagtttaagattagcaagcctctggcattcgatgcatgctatctcgcagcaactgtcccctaccactggctgtactggcattgatctcttacaagctcataactttgatctccattgctttcaatccctcacagcacaaatatatcttgtggggtagattgattgttaacatatgcagccgaaatatagagttaacatacgctgttatcattgaataggacgaaatttttcgtcgtatgcgaaactggagctccaaatatggaaatgctgctgaaagcgatttacgagctgtacacagacttcgatctgaagaatccgttctatgagatggagatgccgattcggtgcgagctgtttgatcacaacctgggctcaggtgatccagaaggaccgtgttgcgctcctgcgtcggtgaaattggaaagcttttg

SEQ ID NO: 101589 - DNA, 277 bp, Zea mays
  Clone ID: MRT4577_24160C.1
ctaaccaaaaaaccaatttttagatccacctccatgtttttttaggggagaatggttctcaaacccttctaacttttaaatgagttggcctgccaaaaactaggttgtccaattgtttgttccgggccataaaaaatggaagggatgagcatggaaaacccctgggctaaaacagccctaggaggggggagtaaccaacccgatcccatatttggcacaaaattttggacccaccaaccgggagaaattccccaacaccggggggcgttttcccacc

SEQ ID NO: 101590 - DNA, 230 bp, Zea mays
  Clone ID: MRT4577_24161C.1
ctgcaggcacatgtttggatagatcactttggctctcagactgctctggtggtgctcagtgtgggaatggcagcagcagctgggaccatggcgcttagcagcattgtttctttggagtctgtgtaatggaatgtatttttcaaatattgatattttgattttctgtaataattccttataataaaatgaggtaaaattgtgaaaaaaaatatctaagtaatagaattaac

SEQ ID NO: 101591 - DNA, 1821 bp, Zea mays
  unsure (1)..(1821): unsure at all n locations
  Clone ID: MRT4577_24162C.1
ggaccggnccttaatttttgggtttacctacgcgtccttgcatatactcgattgnaggatcctgcttacagagtccacctgatgttgataagcttcggaagattggtgtcaaaactgtattctgcttgcagcaagattcagatcttgaatattttagagtcgacatccgtgccattcaagattattctctacaattcaaagatattgtgcactgccgtgcggaaattagggattttgatgcttttgattggcgaagttgaaagccattaagttggcaactgctgacattctgaccaggattatccaaaaacacaatcacttttgaagtggtccgtcctccggtaacgcgctcgcctgctccgcttggctcatggattttcctccagggagcctccaatcgtggggtccaggtcgatgaggcggccctctccgctgaatctggcgatggtccgcggcggcagtcgccgatcaaacaccgtcaaaactttgcaggcccctggggcgtccacttccggtgccgagagcagcgccgtggagatgggcaccgagaagtccgaagtgtacagcactaacatgacgcaggctatgggagcagcgttgacatatagacatgaactcgggatgaactacaatttcatacgcccagacttgattgtaggatcctgcttacagagtccacttgatgttgataagcttcggaagattggtgtcaaaactgtattctgcttgcagcaagattcagatcttgaatattttggagtcgacatccgtgccattcaagattattctctacaattcaaagatattgtgcactgccgtgcggaaattagggattttgatgcttttgatttgcgattgaggcttcctgctgtggttagcaaattgcacaaacttatcaactgtaatggtggtgtaacatatatacattgtactgctggacttggaagagctcctgctgttgcattggcttatatgttctggattcttgggtacagtctcaatgaaggacatcggctgctacagagtaaaagggcttgctttccgaagttggaagccattaagttggcaactgctgacattctgacaggattatccaaaaacacaatcactttgaagtgggaagctgatggttcttcctctgttgaaatttctgggctcgacattggctggggtcagagaattcctttgacatatgatgaggagaaaggagcttggtttcttgagaaagagttgcctgaaggacggtatgaatacaaatacgtagtggatggcaaatggctatgcaacgagcatgagctgataacgaaaccgaatgctgacggccacgtgaacaactatgttcaggtctccagagacggcacgagcgatgaagagaaggagcttagggagcggttgactggtcgggaccctgatctcacggaccaggagaggctgatgatcagagagtacttggaacagtacgcggatgccgccgagcgctaggagaagaatgatgatgactgaggaagagaagagacacaccatgagacgacggaccgaagccgacctgaccgcaccttcctttacggagaggtcgggcttcccctctcttgtcaatcaaatactcgtagcttaaccgtgcaaaagggcacgttctgctcgcatacttggagaatgatgatgaaggagcaaactgtacgtattgttgaacagcagctgtgcagaaataacaaaggtagtagcgtaaaactactgtactgaccataatgttactactgtatgctccttcttggctatgaataataataataataataaaagagtaaataaacctcatcgatc

SEQ ID NO: 101592 - DNA, 808 bp, Zea mays
  Clone ID: MRT4577_24163C.1
agctgatggtcctccctctgttgaaattctggggctcgacattggtggggtcagagaattcctttgacatatgatgaggagaaaggagcttggttcttgagaaagagttgcctgaaggacggtatgaatacaaatacgtagtggatggcaaatggctatgcaacgagcatgagctgataacgaaaccgaatgctgacggccacgtgaacaactatgtccaggtctccagagacggcacgagcgatgaagagaaggagctaagggagcggttgactggtccggaccctgatctcacggaccaggagaggctgatgatcagagagtacttggaacagtacgcggatgccgccgagcgctaggaggtccagttgagaacaactaaccctattcctatgtgctggtgtataaacaaacaagctcattgggatgatcactcaggtggtactgggtactaacaagtatatgcgtatgacatgaactgcagaagaatgatgatgactgacgaagagacgacggtccgaagccgacctgaccgcaccttcctttacggcgaggtcgggctttcccctctcttgtcaatcaaatactcgtagcttaaccgtgcaaaagggcacgttctgctcgcatacttggagaatgatgatgaaggagcaaaatgtacgtagctgtgcagaaataacaaaggtagtagcgtaaaactactgtactgaccataatgttactactatatgctccttcctggctatgaataataataataataataatagagtaaataaaaactaaaaaaaaaaaaaaaaaagcggcc

SEQ ID NO: 101593 - DNA, 501 bp, Zea mays
  Clone ID: MRT4577_24164C.1
attattattattattattcatagccaagaaggagcatacagtagtaacattatggtcagtacagtagttttacgctactacctttgttatttctgcacagctgctgttcaacaatacgtacagtttgctccttcatcatcattctccaagtatgcgagcagaacgtgcccttttgcacggttaagctacgagtatttgattgacaagagaggggaagcccgacctctccgtaaaggaaggtgcggtcaggtcggcttcggtccgtcgtctcatggtgtgtctcttctcttcctcagtcatcatcattcttctgcagttcatgtcatacgcatatacttgttagtacccagtaccacctgagtgatcatcccaatgagcttgtttgtttatacaccagcacataggaatagggttagttgttctcaactggaccttctagcgctcggcggcatccgcgtactgttccaagtactctctgatcatcaacctttcctggtccgt

SEQ ID NO: 101594 - DNA, 243 bp, Zea mays
  Clone ID: MRT4577_24165C.1
atggcgcgcgggccacagccgctgcgagcaggctggctggccgccgccgccgcgagcaggctggctgaccgccgccgccgcgagcaggcgcgtgggcgagcggttgcgcagggagcggcggcgcgctatggttgggcgcggggcggctgctggctgggcagcgcgcaggaaaggagcgcgcacgcgcgcgtgggccggctcgcgagcggggcaggccggttgggctggctgggaaaaaaatga

SEQ ID NO: 101595 - DNA, 1827 bp, Zea mays
  Clone ID: MRT4577_24166C.1
cggggtctgctcggggctgggtccgctgccgtggtggccgtccaccgggcgagccatggagcgacccaatttctaccatggcgatccgcccataccaatggtttattctccatctgaccactcctcggtaagcctcctgcaccactaccgccctccaaatcggcgcgcgcgccaccgccttctccaccctcgcccaccttgctgccgtggccgcccataccgctaccgcgcccacgcccgcctcgagggcccgacgccagaggggctgccccctatctgaccccacggggtaggatggacaaagggaaatcggtggtggccgagctggcggcgtcgttcagcgatgtccgtgtcacgccgcgccagaaccccaagaccaagagcttcctaccgtcgccctccttctcgttatctccaaatattgacttcaaaattgtacttcagattcttcctcgaagaaagctgacaattatgtctattgcaaggaggaggaggctcctgaatgatgaagttttgacttctcttgctgaaaattcctgggaaatcctagatatatctggatctgatgtaactgatgctggtttggctactgtagcgaatgtttgtagtaatttacgagcagttgatattagtcgctgtgaaaaaattactactgctgggtgtctgagattgtatgccactgcccatccttggagatattgagatgtggaggctgtccaagaagtgaagtaacggcacggaggtgcttgaatctcttgaaacccaaattgaatgctcttgaagaggactcatgggaggaacttgatacactagatataggaggcggtgcagagtccttaagatggcttgtttggccaatgatagatgataagtcaaaggtgactctagctgtcgaatgccctcgtgttactgtcaacccacagccatcgctgttcgacctctccggatattccaaagtcccaatagaagcattgtcaagcgtaccactggaccattctgtggttgaggacattgatcccaaaacatgggctgtttctgctgctcctccaagagctgttgctccagcgaatccaaatgttccaagtgctccgcctgaaataccgatggcagaaaggttcaggctggcctatgtggagagggaagcgaggctggcacccaagagggccaagcgggaaaggcagcggcgtcggcgcgctgagagggactacatgatggttgacatcgacgcaaggtcggtcgcacttgctgctcaagcaagcaggaacctgcgcaagagctgattgtttcttgtctacgctatttgtggagactcgagagtagagaatcatgaggcaagaaatgctgttcaatccttctactttcaaggcaaagatagcatacatatatggacacagtattgtatagttgtattgggctatagcggtagcgtttacactgccatgtactagtaatagcaaaaaaatctgagtgggaataacagggaaggcgtgccttatcaaatcacaaatgggttgccacgaggatttgtgaacatgctcgtccagatttctttgaatctggatggtgcgattatgtgaggttcctcacgcaatttgttaaatctgaacaagattcgtgtgaactgttgtatacgtaattttttcttggaatttgagaatgtgtttggatgccggggagacaggagacatccaaacgctttcagatgttgatataaatattattgctttggcttacatgttggaagctgggatgcatgggactagccatttgcgggagcaccctgctggtgtgcaacttgtggggtgctggggtggtgggggtgtggcg

SEQ ID NO: 101596 - DNA, 1873 bp, Zea mays
  Clone ID: MRT4577_24167C.1
gcggggttccgttccggtccgtcctccggtaacgcgctcttctgctccgcttggctcatggattttcctccaggagcctccaatcgtggggtccaggtcgatgaggcggccctctccgctgaatctggtgaggcttcggacccatccatccctgcgtttctgtggacattctgttctgttctgcgttcccccatctcaatctgacttggttatctgtgggcggttaggcgatggtccgcggcggcagtcgccgatcaaacaccgtcaaaactgtaagcattagccccccacctcgtcgtttccgatttcattccgacaacggaaatcttatcctcacactgaggataaggtgtcccgatagaggctggcaggctgcaatgggtgctgaatcgtcggttactgttgctgttactgtcagtgcggatgtcattccgttacctcgttgacgcccgctcggctgctgaaccaatgttgtgggttgccagttgcaggcccctggggcgtccacttccggtgccgagagcagcgccgtggagatgggcaccgagaagtccgaagtgtacagcactaacatgacgcaggctatgggagcagcgttgacatatagacatgaactcgggatgaactacaatttcatacgcccagacttgattgtaggatcctgcttacagagtccacttgatgttgataagcttcggaagattggtgtcaaaattgtattctgcttgcagcaagattcagatcttgaatattttggagtcgacatccgtgccattcaagattattctctacaattcaaagatattgtgcactgccgtgcggaaattagggattttgatgcttttgatttgcgattgaggcttcctgctgtggttagcaaattgcacaaacttatcaactgtaatggtggtgtaacatatatacattgtactgctggacttggaagagctcctgctgttgcattggcttatatgttctggattcttgggtacagtctcaatgaaggacatcggctgctacagagtaaaagggcttgctttccgaagttggaagccattaagttggcaactgctgacattctgacaggattatccaaaaacacaatcactttgaagtgggaagctgatggttcttcctctgttgaaatttctgggctcgacattggctggggtcagagaattcctttgacatatgatgaggagaaaggagcttggtttcttgagaaagagttgcctgaaggacggtatgaatacaaatacgtagtggatggcaaatggctatgcaacgagcatgagctgataacgaaaccgaatgctgacggccacgtgaacaactatgttcaggtctccagagacggcacgagcgatgaagagaaggagctaagggagcggttgactggtccggaccctgatctcacggaccaggagaggctgatgatcagagagtacttggaacagtacgcggatgccgccgagcgctaggaggtccaaagaatgatgatgactgacgaagagacgacggtccgaagccgacctgaccgcaccttcctttacggcgaggtcgggctttcccctctcttgtcaatcaaatactcgtagcttaaccgtgcaaaagggcacgttctgctcgcatacttggagaatgatgatgaaggagcaaaatgtacgtattgttgaacagcagctgtgcagaaataacaaaggtagtagcgtaaaactactgtactgaccataatgttactactatatgctccttcctggctatgaataataataataataataaaagagtaaataaacctcaaaaaaaaaaaaaaaaaacaaaaaaaaaaaaaaaaaaaaaaaaaaagaagaaaagaaaaccaagatttaaa

SEQ ID NO: 101597 - DNA, 272 bp, Zea mays
  Clone ID: MRT4577_24168C.1
gtgggggcttttataaggctgtgtctttctaatctccatcaaacccaaaaaatctcatatttattgcgtttccccaacaaaaacatattttaaataattgttttttacttaaacactttatccaaaccgcccaccaacaattcagttgtcaccccgatcccctcactcctctcaagggtgatcccctcaatctttccatacattaccatataccccaccaggtctatctctttctccaccccttccaatctcactttacttattattattaa

SEQ ID NO: 101598 - DNA, 220 bp, Zea mays
  unsure (1)..(220): unsure at all n locations
  Clone ID: MRT4577_24169C.1
ggctgagaacaatgataacatgcagtttccccctcatggtcttccacacacattctgcttctaangaatgcccccctatgtggaatccagagtactggcagcatacgcgctacgacccatctagtggagccaatatcgactttagcagcagcccacttacaattcccagtatatcacgggaacagtatgtcgtaggaggtcttgcacatatgggcccatg

SEQ ID NO: 101599 - DNA, 356 bp, Zea mays
  Clone ID: MRT4577_2416C.1
gagctcactagttttcggccgccctcgccctttttttttttttttttttttttttgaatgcttccgttcttttgcattggatgctttcagactgtggaagaaacgatgagaacaacgcgccgtaattcaacccttcaaaccctgaccgaacccaactaaaaaaggcttggtaccgggccacacaaacgacaagggggcttttgggaagacccttagggggaatgaactgcgggggattgtcgtatcctaagagcccaaaccgttatccagccttgaaaactttgcattcgggggggcaaaaggggacccaaatccggacaccggcctttcaaactttgaattccggagggcaaaag

SEQ ID NO: 101600 - DNA, 359 bp, Zea mays
  Clone ID: MRT4577_24170C.1
cctgatgaaggggaacgctaccaacattcactcgcgcgcagcaccggtcagttcctattcgcggctttctatggaaggttctcccgtacaagatgcggaagacggcgacaacgcaaccttgattccatcgacgaagctccgacgtcaggcgtcgcgatctgcatggcaacatccccgtcatgccgaagatctggatttgacgtcctcccgctcgtcgtctgatgctctcattgcggcggaacccaaagaagctactcgcggtcgcggttgagtgaggctgcactcgctgacgtctcactaatcctagctccttctccgacgaggcatcaagccaccacggacgacgtcgcgctaggaag

SEQ ID NO: 101601 - DNA, 267 bp, Zea mays
  unsure (1)..(267): unsure at all n locations
  Clone ID: MRT4577_24171C.1
cgacggacaacgccggagaaaaggacagcaaacacaancgcaaggaggaaacccaaccnngaacgacacggcanagcagnagcaggagcagaccctcaaagcnccggcctccaggaacctaggggctccgctgaagattagctcttcacatcttaagcaatgcaatgcatacatccgaacatatcggtcgacatgtatgtatgtatctcccccatcaccggtcaaagggctccgtttgatccttgacgacctgtcgctcggacacct

SEQ ID NO: 101602 - DNA, 348 bp, Zea mays
  Clone ID: MRT4577_24172C.1
attgtaacccataaatccgtgctcactctatttctactgcttctagtactctccccacaagcatccccctccatgatagtgcttcctctgagctaaggctctctcacctacacacccgctcaccccaagtccacgccggcgatggccgcaatgccggcgccggcagcgggcttgtccttcctggtgctcttcgtcttcgccgccgccctgccggccctttctgccgacgacctcaacaccgacgcgcaggcgctgcaggcgctacgctcggcggtcggccgctccgcgctgccatcgtggaacagcagcacgcccacgtgccagtggcagggcgtcacctgcgagagc

SEQ ID NO: 101603 - DNA, 426 bp, Zea mays
  unsure (1)..(426): unsure at all n locations
  Clone ID: MRT4577_24173C.1
gttgtcttctttcacaacccactgtttacagattcttagcaggtgctttacaatatcttggggtgactcggcctgatatttcttatgctgttcaacaagtttgcctgttcatgcatgctcctcgtgacactcatatgtctttgctgaaacgcatccttcgctatgtccgtggtaccttggactatggtttgcatatctatcgtagttccagtcttgatctgttggcatactctgatgctgactgggctggatgtcctgacacccgacgatctacatctggttattgtgtttttctgggtgccaatcttgttgcttggtcgtctaagcggcaacatacagtatcccggtccagtgccgaggcaaaatatcgaggtgtggncaatgctgtggctgaaatttgttggcttcgccaattgttgactgagc

SEQ ID NO: 101604 - DNA, 283 bp, Zea mays
  unsure (1)..(283): unsure at all n locations
  Clone ID: MRT4577_24174C.1
cacaccacttattgagtacccaactagcaacatagtaaagcacatatagtgtacccaacagatggcagcgcaaaatattttagcctccttatgctcctctggtgtcttctgcaagtgcctgctacaggcgacctattttcccgcaatgctcacaacgctcctatagncttcccttgcttccctcgtacactctcagccagcggatgtacttacggtatagtgaaatacccagggtggtgcgaaccctacagtgataccaagcaggagcaatcagcagcatggc

SEQ ID NO: 101605 - DNA, 756 bp, Zea mays
  unsure (1)..(756): unsure at all n locations
  Clone ID: MRT4577_24175C.1
gggtatcggaccctgggtcctatgcatcggacctcgtcgtatagaaaatacttgactttaggaaaattctttaaaaatcattggatcttctacaatagtggtctgggggtgcatcgacctcgcggtaacggctacttcgggtgcgtaacagctacttcaatggtctgatgacacatggcagtctgatggtggaccgaattggtccgatgctagcccgagatggaagggtccaatcgagatcccaaaggagatgttcctgttttctgtccagtggggcaccggaccagtccggtccgcctgcgtagtgcataattccaacagcttcctcattggctatttgggggcttgggtctataaatatacccccatttcgaccccctctcaacatcaagtcactcaagagcaagtacttcattcctacgcattagagaaacatgtcaaagttatccgagcacccattatagtgagattgagttgtgttgttgtcatgcaattgtgttctttctttgaggtgttgttcttgtgcttttgtgtgtgttctactcgtccctcttgctgctctttggagttattactcacatcaaccgtgtatggctgcaagagactccgatctgtggagatccttgtgaggagaatctataaggaagaatcgtggcctcaagttgatcattagatcacttgagaagggttggntctaaccctcgttctttgacactacaacgtggatgtaggcaagcatttggggcttgtctgaac

SEQ ID NO: 101606 - DNA, 748 bp, Zea mays
  Clone ID: MRT4577_24176C.1
ctctcctaaaccctagctccaccacccacctaaacccgcgaactcaccaaggcggcggcggcggcggcgacagcagcagcggcgatggggagcgacacggagacggagaagaagaagaccccggtggcgctggcgcccatcgccaagccgctcgccggcaagaagctctccaagaaaaccctcaagctcgttcgccgagcctcggaggccaagtgcctgaagcgcggggtcaaggaggtggtcaagagcatccgccgtgggagcaaagggttgtgtgtaattgccggaaacatctctcctatcgatgtgattacacatcttcccatactttgtgaggaagctaatgtcccatacatatatgtgacctcaaaagaggagcttgcgactgcggggacaaccaagaggcccacctgctgcgtgttggtgatgaccaagccagccaagggggagatcactgaagaggtgaaggagaaactggaatcagaatacaagcaggttgtaactgaagtcgctgaggttacatcttctatgttctgagaacatttccatagccgcgtggagaaccatgaacatctttctgtctattatgtagcatgattttgtcaccctatccttgctagtgatcgacgtgtttatcatggagctttaagcatctcgagtctggtactgcgctgttcggttgattagataaacaaaatagtgcattgttaactaatatgggtgaggaaatcattatcgctgatgttgt

SEQ ID NO: 101607 - DNA, 661 bp, Zea mays
  Clone ID: MRT4577_24177C.1
cctgcagtccggtgccggccttcccgggcacggcgggtgctcgcgtgggaaatcgcgggcaagtctcagcacgaggcgctgcgccttctcggtgttgtcgttcatgatggtgatgatcgaggccacgtcgacgtcggcatggtcgtcgtgccagcagtcgtagtcggtgaccatggcgacggtcgcgtagcagatctcggcctcgcgcgcgagcttggcctccggcatgttggtcatgccgatgacgtccatgccccagctccggtagaggttgctctcggcgcgggtcgagaactgcggcccctccatgaccaggtaggtgccgccgcgcgtgtagacgatcccctcggcctgcacggccttctcgatggcgtcgacgagcagcgggctgacggggtcggccaccgagacgtgcgccacgaggcccggcccgaagaagctcttctcgcgcgcgaaggtgcggtccacgaactggtcgacgagcacgaagtgtccgggcgccaggtcctcgcgcaaagagccgcaggccgagatcgacaccaggtccgtgacgccggcgcgcttcagggcgtcgatgttggcgcggaagttgatggccgtcggcggcaccggatggccgcggccgtggcgcggcaggaagcggaccggcagccccgcgatc

SEQ ID NO: 101608 - DNA, 243 bp, Zea mays
  Clone ID: MRT4577_24178C.1
cactagtacatccgctctgccctatattttttttttaggcagccaaaaacgggaagcaagctgaaaagccctttttttttacataaaaatttctaaaatgctcccctagggctacatgagcccatgtcatctatacagagagcccaatcaatggctaaaacaaggttcatactgccctaaataggaaaaaaaaaacgacatagcttaaccatcacacgcaacatgaataactgcttatcaaaa

SEQ ID NO: 101609 - DNA, 665 bp, Zea mays
  unsure (1)..(665): unsure at all n locations
  Clone ID: MRT4577_24179C.1
gacgcctgcaggtttcggtccggaattcccgggtcgacccacgcgtccgctccctttgtcaaagggagatgtgcacaagaagaaggaaatatacaggatgtgaccttgcatgacctggatgtggctaatgcgcggcctcagggtgggcaagatattctgtctatgatgggccagttgatgaagccaaaaaagacagagatcacagataaacttcgaggggagatcaacaaagtggtgaacaaatacattgaccagggtgtggccgagctggtccctggagtgctttttgtcgatgaggtccacatgctggatatcgagtgctttacctacctgcaccgagccctggagtcctccatcgcccccattgtcatctttgcatccaaccgaggcaactgtgtcatcaggggcactgaggacatcacttctccacacggcatcccgttggatctgctagacagggtgatgatcatcaggaccatgctatacacgccacaggagatgaagcagatcattaagatccgagcccagacggaaggcatcaacatcagcgaggaggcgctgaaccacctcggngagattggcaccaagaccactctgaggtattcggtgcagctgctgaccccagccaacctgctggcaaagatcaatggcaaggacagcattga

SEQ ID NO: 101610 - DNA, 275 bp, Zea mays
  Clone ID: MRT4577_2417C.1
gggggaataaatttttgctacttgtccgagggacaattttggagtcttgactgaacctttttttttggggttccaaacttcaatagctttttgaacagctttcaagaaccaccacacaaaccaccggttgtttttgagcccaccccgcttcaaagaattttgggagctacctttttcgcatgtgccgtatgtgggcatttttgggagaaaaacgtttttccccccatcgcttttttaaagatttttcccaagcttgggagtttttttattggttt

SEQ ID NO: 101611 - DNA, 355 bp, Zea mays
  Clone ID: MRT4577_24180C.1
ccacgcgtccggtcaaacttaaaattggtttattgtgctccaaggtgtcactcttgtgagtagagggagaacacggtaatattgcaccatgttggagttattttgtgtggttgaacttgaaaaacaattcttcaaaacatggataacccatactttattgcaatggtgtgacatgagtacatgacatgacatgacatgctaaggcagaaaattatgttgcagcagtggtatatgtgtggttgcagcttggtaggtaaaattttatgtcatgtgtcagccgaatcatgaaaatatggctatgtttagtcatgtactcctattgctcttttaatttggtattaaaatatgaattttc

SEQ ID NO: 101612 - DNA, 2150 bp, Zea mays
  Clone ID: MRT4577_24181C.1
ggccaacccgactcctcctcctcctcctcgcctatagataccgagcccccgtcccggccgggccggggctaccagcccgacccaccaccaccatcgccaccattaccctctcgcccctgcctctccggccgccagctgatcccgtccccgtccccgtcccatgccgcagcgctcagcggccgcactgacacaccagtgagcgagcagagcgaggcctgatgcggcagcggcagcaaggcgaggagcaccgggagatattcgtccagtggagaccctgcgacaagaagaggtcttaggccctccgccgccacgcgcaccggcagacaaatccgcgcaggccttcttccgatccgcaaaaggcgccgcctttttcgccgattccacaggccggagcccggggagaaagacagacaaacagaccggaagatgagcgcgtccgtgggccggacccgtgtggggcggtacgagctcggccggaccctcggcgaaggcaccttcgccaaggtcaagttcgccaggaacgtcgagaccggagagaatgtcgccatcaagatcctcgacaaggagaaggtcctcaagcacaagatgatcgcccagatcaagcgagagatctcgaccatgaagctcatcaggcaccccaacgtcatccggatgtatgaggtgatggccagcaagacaaagatatacatcgtcatggagctcgtcaccggtggcgaactcttcgacaaaatcgcctcgcgtggaaggctgaaagaggatgacgcaaggaagtacttccagcagctgatcaacgctgtcgattactgccatagccgaggcgtctaccaccgcgatctcaagcctgaaaatctcctgcttgatgctagcggcacgctcaaggtttcggattttggactgagcgcactatctcaacaagtccgagaggatggtctgctgcacacaacctgtggaactcccaactatgttgctcccgaggttataaacaataagggctatgatggagctaaggctgatctgtggtcatgtggagtgattctctttgtcctcatggcggggtacctcccatttgaagattcgaacctgatgtcgctctacaagaagatcttcaaagcggatttcagttgcccgtcctggttctccacaagcgcaaagaagctcatcaagaagatacttgaacctaatgctaacaatagaataactattgcagagctcattaacaacgagtggttcaagaaggggtatcagcctcccagatttgaaacagcagatgttaatctggatgacgtgaactccatcttcgatgaatccggggagccagcacagcttgttgttgagaggagagaagaaagaccatcagtgatgaacgctttcgagttaatctctacgtctcagggcctcaatctcgggacgctcttcgagaagcaaacgggttctgttaagcgagaaacaaggtttgcgtcaaggcttcctgcaaatgagatactgtcgaagatcgaagcagcagcgggacccatgggcttcaacgttcagaagcgcaactataagctgaagctgcaaggggagaaccctggaaggaaaggtcagctggccattgcaacagaggttttcgaggtcacgccttccctgtacatggttgagctgcgcaagtccaacggcgacacccttgaattccacaagttctaccacaacatctcaaatggactgaaggacgtgatgtggaagccggagagcggcatcgtggaaggcgacgaggcgcggcaaaggaggtccccgtgatggggtctgcaaccaagttttagaagtagcgctgcagataactagtcatcagggagcctggcgggaactgagcctgtgactgcttcctgtttgtttggatgttttgtttttgtctaaggtgctttctgactaaagtatgctggataatgtgaatgaagaatgtgcagagttttcagcaaagtaaggttgtcggattttctttaaaaaaaaaaaaaggccgcttgtgcagtgttgcacgtggtggagagttgcccgttgctgacgaacttgctatcttgctagctagagcctagaggataaatatgaattcaaaatacgagtagaaatatcttaaagtctgataaattttgtagagaaaaatataaagatccaac

SEQ ID NO: 101613 - DNA, 388 bp, Zea mays
  Clone ID: MRT4577_24182C.1
aggaggtggtgcgcaaggtggagagcaccaagacagacagccgggataaacccctgaaggatgtgatcatcgcagactgcggcaagatcgaggtggagaagccctttgccatcgccaaggagtacggcacagggacatctttctttgagtgaccgtctgtgcaggccctgtagtccgccacagggctctgagctgcactggccccggtgctggcatctggtggagcggacccactcccctcacattccacaggcccatggactcacttttgtaacaaactcctaccaacactgaccaataaaaaaaaatgtgggttttttttttttttaataaaaaaacaaaaaaaaaaaaaaataaaaaacacaaaaaaaaaataaaaaaacaaaat

SEQ ID NO: 101614 - DNA, 566 bp, Zea mays
  Clone ID: MRT4577_24183C.1
ccggccgggatccgcgaggatccccccacctcttgcaacctgcattgccacccagcaccatacacggtttccgcgccaatgttgtcagccatacctgttcttgataatacgacaaaaggatggacgaaaatgtcccaggtagatgctctattgttgattctcgtcctcgtcacaagaaacttggtaaccatcgatgactaaatgggactaaccatgcccatgcatgccttgatcaatgtgagatacgagaaacacttccgagaatcgagatatgagaacgagaaggacgataaatatctttgaaggaaaatagtatatgtttatcgcagagactccagatggaggtcttctgctacagcagcgacagatgcgacgaggtgcgtatgaataatagctttcacgaagagcatggcaagcgggactgggccatgttgaagtgattctgcaataagccttgctagttcatcggtcttgctaattgttgatgagtgcttcattaagttgacttgatggagctcatgtctaccacaaacaaaactactgttgataaaatgcagggcatgaaa

SEQ ID NO: 101615 - DNA, 4224 bp, Zea mays
  Clone ID: MRT4577_24184C.1
ggctggggaaattttttactttaccagcaacgggggaaatgcccattttggcggggcaatcctattcaactgtatacgcagggcgatacaagctttcgtttacgtcgcacaggtcgaagagggccccgcaaagaatgaatacacatttttgtttgcactgccatgtttgtacccgatgaaatgcagcatccccgtacctgcacgagcctacaagttcctaacaaaattgtcaatctaaggtaatttttttgtcaggtttcaagcaggcgactccgcgagcaccaaggggggccaccagccacatgatacgtttaggggggggtaagcgtccacacgtacagttttttcatcttataattcttgagttataggaatcatcgtgcaattaagagggatccgcaatggttaagtaagttatgcaatgagctaagttcaaaatcctttgaaaacatttttgagaacatttttccagatcatgaatgcccttgagaaaacccaatttcacttcccacaaatactccatttttgttctcttcaaaatactcaaaatttggtttcagccctgcaaaccggttcaaccggtcctgaaaccggttcaaccggtcctgaaaccggttcaaccggttttgggactgctcctctgccatccctgctctgacctgtctgacagtcagagctgtcagaaaagtcgctgcagatcttttgggaaaaccggttcaaccggattttccccctactcaaccggttttgaatccggtcgagtctccgactgagtaggttagtgaaccgggatctccctggtagaaaccggttcaaccggtctaaaaaccggttcaaccggtttttactccttttctcccaacgactgtcagcttttgggggatcctttatataccccccacactctctctcttattcacttctgtctctcccacgaaatcttggctgaccaaactctcaacaagtgcattcatttcacctttcacacccgcatcacatcccttcaatcgcttgaaggatccttatcttcctccgaagccaaatcagccgcacgttgtgaattattagcttcagaaacatctctcgattcaattcattctcgaacacctctgctgcaatggccttctcctcatctgtcaactcctccatagcttcaaatatgtggacacacctatccatagactcctctccacgactcttcttctcaaggaacgcctccatagtcttattgtttggttcttcttgtgctccaaatagtcatccaaaacacttgcaacttgacttttcttcctctttttcccgcttccatgtactgacgtaccggaaggtggtgactgaacttcacaagcctcactacccatattcccttgtccacactgtccatacagcccccacccaaatgtaagaagagctcctgaatctgttactgcagtgtgcacaggtccatcacaaatgctgcccgtaacatcatttcctaaaagttaacctccagtcacctctacagccgctctccgtaaaaaaggtcaaagtatatccccgtaaaaacttgatgaaagactgcacagttccgaaagagaagaaacaattcttccgattcttctgtaaatagggggtttcacttgcccacttctcccacaaatttggttcagctgacatcatccccatagtctcattccatcctacaccactctcattctttgcgttgcttatggccttgtagcttgctttcaaatctttctccttgtcttgaagttgttgctttgtaaaatgtgctgaggggttttactcgttgaactttcaattgatgcttctccaaccatctgagttccaaccattttgtccaacccacatctgcatcgcaatgtcatcccttaaattgtttccatcaacagactctgagccggtagggtagttgacttctccctccgggacatcgacatattgagacggttcaatgttgcttgggaggtgatctagccactcttcttggccatgatgttctttaataacattatgaaagacagctgctcccgctggaatcttaacctgagactgaataggcttcaaggtgccaaattttagaataggaaacctctccttcaagaaacctatggcacgctctatatggtttcgtaggcttgcatggcgatgcctaacgagctctttgtagttcgcataggaacgtcgactcctaaactcgctcaactggtaccgaactcctcgataaggggcaatgaatgatgttgtatttgcatatccaccatcgacaagataaaactttccttctggcacatggaatcctctgccaagtgctgaacgaagaaccccagcatctgatgcggatccgtctatggcaccaatgcaattactgcaaggcacgttcctgtccattgagtcgccaaggccaagctggccatacttgttccatccccagcagaatacctcaccttcatctgttataatagcactatggcgagctccacaagaaacggatctggcgttcttattctccaggcttgtagcatctaccaattttggaagagtctcagcctgatcagaaccagtgccaagctgtccaaactggtttcctccaaacgaatacacatcaccatctgcggcaacatcttgcatcttgattcccaggatagacgatacacacgttggacttaaaacatcatctgtattcccttgtccacacctagccgccaacactggctctttgcacgtctcctctgtcctctcctctcctctcttgcaccgcccctgcctctcctctcttgcaccgcccttgcagtcctggacaccggcgggcggcggtacagcaccctgcgtccctgccccttctcctggagtcctgcagcctgctgcactactgcagtctccaaccgactgtggctgtccatacagcccccatccaaatgtaagaagtgctcctgaatctgttactacagcactgtgacgacctccacaagcaattgccctcacgcaatttcccaagactttactgacatgtccttcagcagccttgttacctttcatagctgatgggctatccttggtgtatagtgctgattcaatgcacggtacaggatggggagaagaaacagttcggattctagaacccaaacctagttgcccttctcctccatatccccaaccccacacctgacctaaatctgatagtgctaatgtatgacgaccaccagcggctacagccactattttcactcctgtactaaatgtcacaacacaagggggtgctgaaagactttcatcactggatgtcgaactctcaggtccatgttttgctaaagacaactttcgtcgctttgtgctgtcatcagtgcctctgctttcagaggaaccagctgccgctccgctgcttgtcctagacacctgtgacctagggctcacaccttggtcagtggccattgccatttgcctttcatccttttccatggttccaactgaagactggtctccaataacccttccagttggaacacattctttccaaccccatgtataaacatcatattcatcagttattgcaacacagtgagcccatccagcatcagcgcgcactatcacgacactgctaggaagtggaaaagcttctggagtctcctcgtgcttcccagcagtcacataactttggcccatgtcatcagctgaaccccaagtgaggagttttccagactcagagatggccatcgcgaagccgcaaccgccgccgcacacgtctctccacccatcaccggcggcagtcgccgccgtcgggggcaaccttacggggaccggcccgagcagcggcgagcgctgcggggacacgccgggcaagtacccccacatcagcaccacccgctccttattccccgcgccctccccctgcgcgcagctggggccgctgtcctcctccatctcatcctcccctccccctcctccgccggtgccgcggccgttcatctcctccgggagcctgggcctccgaatccaccgctgatttcgatcgctggccgacgggagcggacagcggagcaagcgagcaaagcgttggtgttggttgcgggcttgcggcggccacttactcttccgagcgtgaggctgagacgcgagggttggggccgtatcagtttcttcgggggcgggagcgccacatcggacgccgacgtggccgatctctgacacgtggcgcgcgctgggacgctggatcgggacggccat

SEQ ID NO: 101616 - DNA, 504 bp, Zea mays
  Clone ID: MRT4577_24185C.1
ccgggccggaattccagggcgatgaactccacgctcatgtaccagggccaggagatggcggctgccgcggtggccgccggtgaggcgaggaaagggaacggcggcggcggcggcggcggccgagggagcccgtccaacttgtacttccccaatggcggcttcccataagtattatattgtgcccttcccttctataatccatcgtcaagatgatctttcttcttcttcttctgttggattggatctttgtgagaccatggtgtagctagctactagtactatttattttgagtaggagacatgcatgcgcgagagcaagaatttcatggtatttgatgtggattgttcgatcgacgactgtgggagacaaagcaactgttgctttgttcaaatgcttcactgtgatgaatctttgtaatggggcttcaacaatagtagtccaacattaccaatttagagctagcttgcatgaacaaggtttttttttaaaaaaaaacaaaaccc

SEQ ID NO: 101617 - DNA, 187 bp, Zea mays
  Clone ID: MRT4577_24186C.1
atcaaaaggatgacctctactataaagaatctctaatatcaacccccaatccagaaactcaaatttctaggttttaccgcaaaaagggcgtattgccttgttgccagtttcaatcaactataacctcttaaccctaaaaagaaaacaccttttttatcattttagtagcattctccttttttaaaaa

SEQ ID NO: 101618 - DNA, 399 bp, Zea mays
  Clone ID: MRT4577_24187C.1
cccacgcgtccggcattgctagaggtgacatgagtttcacttctactgaaccggtgctacatgtagcatctgttgatgaaccaatgctacatgtaccacgagcgggcagcgagatcaatgttgctggaccaagtgtgggcagtgagactaatgttgttggactaacgttggatcgagaggcttgtgaagttcagtcaccaccttctggtacgtcagtacatggaagcgggaaaaagaggaagaaaagtcaagttgcaagtgttttggatgactatttggagcacaagatgaaccaaacagataagactgtggaggcgttccttgagaagaagactcgtggagaggagtctatggataggtgtatccacatatttgaagctatggaggacttgacagatg

SEQ ID NO: 101619 - DNA, 753 bp, Zea mays
  unsure (1)..(753): unsure at all n locations
  Clone ID: MRT4577_24188C.1
gcaaccctggcgatcaaagttccagggagcagagaagagtgcatntcacctgcgcagtgaacgtcagccctgggacgtgtgagctggtggcctctgtcgcgctgtatctgaggctggctggaaagagaacgacgaccgacggcgtggagctcgtcaagcgggtgatgggcgggtgccagttccgcgaggagcaggccggcgtggagctgctggcgcggtgccgcgaggacgacgacgcgacgggcctggtggtggtgaagccggtgcacctgcggctgcggctggtgtgcggcgaccacccggccggcgccaccaacaaggagaccatcagcaccgagtccagcctcaagatcaatgtcaccttggactagctagtggttctgaattctgattttggattttgatccgtgtctatttttattctttggaacctgtctatttttattctttggattttgatccgggctggcgatgggaacgtgtcagtacgtgtatgcgactatgcgatggtaaggaacaagctgactgaccccatctcatgtactggagcaatatagttgacctagttgtgccgagaacttagctggacctgtcttgacaagcctcgcccgggccttttagccaggcctgacgttttgattttgtctcaacacatgctggacctttttcaacagtgattcataggatgactgttgtaggtgacatattgttcaatgcaggcaacgtatttaaactaaaaaaaaaaaaaaaaaa

SEQ ID NO: 101620 - DNA, 2015 bp, Zea mays
  Clone ID: MRT4577_24189C.1
agcttgtgaaattttttacattagcagcaacggaggaaatagcgcaatttgtcgaggcaagcctactcaactgtatacgcagtgcgatacaagctttgtctacgtcgcacaggtcgaagagcgcaccgcaaagaatgaatacacatatctgtatgcactgccatgtatgtacacgatgaaatgcagcatcaccgtacctgcacgagcctacaagttcctaacaaaattgtcaatctaaggtaatttctttgtcaggtttcaagtaggcgactccgcgagcaccaaggtgtgccaccagccacaggacacgtttagcgggtggtaagcgtccacacgtacactgcaaggcacgttcctgtccattgagtcgccaaggccaagctggccgtacttgttccatccccagcagaatacctcgccttcatcctgcatgagcatgtataagtagcgtggtcgtgtaagaagataaatgggcgtacaagatgatacaattgagatccctgttataatagcactatggcgagctccacaagaaacagatctggcattcttattctctaggctggtagcatctaccaattttggaacagtctcagcctgatcagaaccagtgccaagctgcccaaattggtttcctccaaaggaataaacatcaccatctacggatgtacatacagtgtgccacagacccgcggcaacgtcttgcatcttggatcccaggatagaggatacacacgttggacttaaaacatcatctgtattcccttgtccacactgtccatacagcccccacccaaatgtaagaagagctcctgaatctgttactgcagcactgtgacgacctccacaagcaatggccctcacacaatttcccaagactttactgacatgtccttcagcagccttgttacctttcatagctgatgggcgatccttgctgtatagtgctgattcaatgcacggtacaggatggggagaagaaacagttcggattctagagcccagacctagttgcccttctcctccatatccccaaccccatacctgacctaaatctgacagtgctaatgtatgacgaccaccagcagctacagacactattttcactcctgtattaaatgtcacaacacaagggggtgcggaaagactttcgtcactggatgtcgagctctcagggccatgttttgctgaagacaaccttcgtcgctttgtgctatcatcagtgcctctgctttcagaaggaccagatgctgccccgctgcttgtcctagacacctgcgacctggggctcacaccttggtcagtggccattgccatttgtctttcatccttctccttggttccaactgaagattggtctccaataacccttccagttggaacacactctttccaaccccatgtataaacatcaccttcatctgttattgcaacacagtgagcccatccagcatctgcccgcactattgcgacgcctctaggaagtggaaaagcctctggagtctcctcgtgcttcccagcagtcacataactttggcccatgtcatcagcagaaccccaagtgaggagttttccagactcagagatggccatagcgaagccgcaccctccgccgcacacgtctctccacccatcaccggcggcggccgccgctgccgggggcagcctcacggggaccggtccgagcagcggcgagcgctgctgcgacacgccgggcaggtacccccacatcagcaccacccgctccttattccccgcgcccgcccctttcgcgcagccggggacgccgtcctcctccatctcttccgcccctccccctccctctcctcctccgccgctgccgttcatctcctccaggagccttggcctctccgaatccaccgatttcgatcactgtcggccggaccgcagatggtagagggcagcggagcaagcaagcaaggcgttggtgttgattgcgtcggaatggggcagaggcgggcaattgcttttccaagcgtgcctcgtgccgaatt

SEQ ID NO: 101621 - DNA, 296 bp, Zea mays
  Clone ID: MRT4577_2418C.1
gcgggtagcgtagctgttgcagtgacaggcgagccgcgagcgtacagccattggagttttagagaaccagcacagaggaggggagaccggagatggtgccctgcgcccagcagccgcagctgcccacagctcctcctttccacactttccgtcaagcgggcaggagggttattccgcttcctcggttacatcgccgcagccgacgtaccatcgccaccatggcctccgcctccggctcccccaacccagtcgtgctaggaagcggcggaatctttgtctactacctgcgcggggag

SEQ ID NO: 101622 - DNA, 729 bp, Zea mays
  Clone ID: MRT4577_24190C.1
gcagcaacggaggaaagcacaatttgtcgaggcaagcctattcaactgtatacgcagtgcgatacaagctttcgtctacgtcgcacaggtcgaagagcgcaccgcaaagaatgaatacacatatctgtatgcactgccatgtatgtacacgatgaaatgcagcatcaccgtacctgcacgagcctacaagttcctaacaaaattgtcaatctaaggtaatttctttgtcaggtttcaagcaggcgactccgcgagcaccaaggtgtgccaccagccacatgatacgtttagcgggtggtaagcgtccacacgtacactgcaaggcacgttcctgtccattgagtcgccaaggccaagctggccatacttgttccatccccagcagaatacctcgccttcatctgttataatagcactatggcgagctccacaagaaacggatctggcgttcttattctctaggctggtagcatctaccaattttggaagagtctcagcctgatcagaaccagtgccaagctgcccaaactggtttcctccaaaggaataaacatcaccatctacggatgtacatacagtgtgccacagacccgcagcaacgtcttgcatcttggatcccaggatagacgatacacacgttggacttaaaacatcatctgtattcccttgtccacactgtccatacagcccccacccaaatgtaagaagagctcctgaatctgttactgc

SEQ ID NO: 101623 - DNA, 446 bp, Zea mays
  Clone ID: MRT4577_24191C.1
cctgggaggtggagccgttgcgatcgtaggtggcctgaacgccaagaaggttgagggaagcaaagtatcgatagccttgaccatcgccctctatggtctctaggctgttttctcattcgttggccttgatcagggccagtgcccgaaagctcactctcgtcaagatctatttcgggatgatctttgcacacctcatgttcagcttgggtgttgggatttacgctctgttccgcatcttgcgagatggccacgtcttcgccgataactgtgtggccgccaatgccactgagacgaacgctaccaaagttggctatgaaggattgcgggtcatcaagggtgagactgtcaccattaacactgtgatctgggtgcttgaaatctggagcgtgcgtcactgctagcgattacgctggtcagctcgcacatgagaatgcggatgaaggagt

SEQ ID NO: 101624 - DNA, 239 bp, Zea mays
  Clone ID: MRT4577_24192C.1
ccagcaccagcggcggcggtaacaacgtcgtcagcggcggcctcctcagctactactagctagcttgcttgctggtgtcgttgttgttgttttctttgaggtctgcgaacggagagattggtcggcacggcagtgcagctgtgccgcgcacttgagaatcagtgttctaacccaagctccagacctgatctaactattatgcaattcgtatttaaaaaaaaaaaaaaaaaaactcgagg

SEQ ID NO: 101625 - DNA, 360 bp, Zea mays
  Clone ID: MRT4577_24193C.1
gaccatacgagaggtcaggagcagacatagtgccggcaggctatgagcttgacgacctgatggtttatggacagtggctgaaggacgctggccaacattctgtaagagccgaggatctcgctcagctggtgttgaatgttctacagatggcgattggggaagctgagaggaacacagacgatctgctggaccagttgacagagctcgactatctgctccttgtgctccacttgatcacaaacctgctgctgaacagtctcattgagcaaatcagattgctgctcatggtaccagactgaccagtaactaccacaggaccgatgttcagaacaccagcggctgtcttacggactgtgcttc

SEQ ID NO: 101626 - DNA, 279 bp, Zea mays
  Clone ID: MRT4577_24194C.1
gcttcaaagcagcgtctgatgatctgatgatgctgaagaatgcaagccttgaagagatccagacaattcagcggttgaaagaagaaagagacaccgtgcttcatcaaaatcacgcacatgcatcgtgaatctggatgtgctttcggaggccgcaggaacccgcataggcgatggcaggtttctcccttgacgtttcgccgcgttttgctcgggctaataaggtcttattggtaggggcctcctggatgagccctcattcttcctcgtcccgcgcccggc

SEQ ID NO: 101627 - DNA, 323 bp, Zea mays
  Clone ID: MRT4577_24195C.1
ccgcgctcgtcctcggcgccgccgccgcagccgctacactgggttccgcgccactgttggagacttggagcacaacgatttcttcgtttggccactgttggagccaaacacgagagtagtcatgctgccaccgctctcgcaccttcagcgtcgccttctcgccgcagacccaaagttccttgctccgccccttttccgctcattctcccgcgccacctgaccggcagcacgcaagccgaccaccgccgtggctgtcctctgggacctggccgcttcccacccgccctctactctcccgctttacgacgccgtcgtgcgccttc

SEQ ID NO: 101628 - DNA, 296 bp, Zea mays
  Clone ID: MRT4577_24196C.1
acctatctgtgccctacttgcagatgcactctcacgactatctaatggacctacgcctaggtcgagctgctgttggccacgctactcgtgcgagactgtgctcttgacgcagctggtaaggcatggatgacctttgcttacagggctctaagccattgaaggagaggaatgtgggtcctataagaaggatgaactgggacttgcggctcatgattaacgcttggaggcgagggatttcaagcatttgggcaccggttctgggttaagagcaacgaagcctgcaccaaaagcttact

SEQ ID NO: 101629 - DNA, 472 bp, Zea mays
  unsure (1)..(472): unsure at all n locations
  Clone ID: MRT4577_24197C.1
agccaaatccaaacagcattcgccgtcggcttccaccctccccctcacgcgcgcgacctcgtcgtcgtcggctcggagatctcgcccgccggccatggacgccgtcgactccgtcgtggacccgctccgcgagttcgccaaggacagcgtccgcctcgtcaagcgctgccacaagcccgaccgcaaggagttcaccaaggtggcggcgcggacggcgatcgggttcgtcgtcatggggttcgtgggcttcttcgtcaagctcatcttcatccccatcaacaacatcatcgtcggctccggctaggtacgtccgcgtctccctcttgcctgcacggttcaggcttggatactgttgtctcgcggtttgatctgttggatctgcggcgcgcgcgcctgcccctgtcgattctgcggncgcgggnctgcgaaattgagttctgtggaccttgggactagtacgaacttgcttgtt

SEQ ID NO: 101630 - DNA, 604 bp, Zea mays
  unsure (1)..(604): unsure at all n locations
  Clone ID: MRT4577_24198C.1
gtacctcgagggcggncggncggggtttnaagggnngtgggaaggngaccttcctccttnactccttccccgncgcctcccggncgtcgncgnnatggtgaagtantcgnaggagncgggnaancctaccaagtnggntaagggcatgggnagggatctgagggnnnacttcaagaaaanaagggagacagnctttgctcttcgnaagttgtctttgnacaaggntaagcgataccttgaggatgttattgctnacaagnaggnaattcccttccggagatactgtggnggggttggtngnaccgggaaaggtaagtttcgncacttcaatgggnagggncggtggnctgttaaatnagncgggttnattctggatttgctgaagaatgttgagagtaangttgatgtgaaaagggttggtatgtggacaaccttctatgttttcccacatccaggtgaacaaagcccagaagcagaggctgccgcacctaccggtgatcacgggacggtatcaatcccgacatgtcctcaccttgccagattgagcatggaatctttgaaagagaaggaagaaggcatgtgaaaaaaaaggcgtgaaaacatt

SEQ ID NO: 101631 - DNA, 595 bp, Zea mays
  Clone ID: MRT4577_24199C.1
gctcgaggaggagatgatgctgagcgggcacggcggcgggaggcgcctgttcacggcgtcgcagggcaggagctggagcaccaggcgctcatcttcaaatacatggcctccggcgcgcccgtgccgcacgacctcgtcctgccgctccgcctcgccaccggcgtcgacaccgcgccctccctcgccttcccgccccagccttcgccgtcgctggcgtactggggctgctatggcgcgggggcgccgttcggccgcaaggcggaggacccggagcccgggcggtgccggcggacggacggcaagaagtggcgatgctccagggaggcccacggagactccaagtactgcgagaagcacatccaccgcgggaagagccgttcaagaaagcctgtggaagtgacctcccccgccgcctaccgcccgtccgcgttctccatctcgccgcctcgcgcggccgacgcgccgccgccgccgccgggcctcggccacccgcagcagcagcatctccgccacggcgctctctctccagcaggccgcgcccacgccgctggcgctctccagctccacctcgactcgagcctgcacgcggcgtcgc

SEQ ID NO: 101632 - DNA, 462 bp, Zea mays
  Clone ID: MRT4577_2419C.1
aaccaagcagaccccagcagaagaagcgaagtcgttttcggagcaggaggaagagcgagcagcaaggtgtcgtggcaggcgtacgtcgatgaccacctgctgtgcgacatcgaaggccagcacctcagcgccgccgccatcgtcggccacgactgcagcgtctggtcacagtccgagaacttgatcgagttaaagcctgaggaggttgctgacatgattaaggactttgacgaacctgttaactacaggccaacatggtccaaggggaagaggtatccagtacacagggatccttgtctggaccacaacaaccatgcgaaaggtgagagtttcgatctgggcaagtacatttgacagcactttgaaggcccatcgttggtcccataggatcctttaataaagcagttcgctgaagagctgcttgcatatactgatgcctttaacaaagtcttatactttttg

SEQ ID NO: 101633 - DNA, 2267 bp, Zea mays
  Clone ID: MRT4577_241C.1
tttgggcgggttttgcaccttacttatatattgaggatagttggaaatggcaccatcagttggcctctaggatctctttgtctatggcaaagtgtttgttgtttgcaaaatttttgaagtccatagcgcaagaagacacaatatctagtagcagtgagcaagatgtcgctgtgaaaatttcctgtgagcttgcacaaaagcattggcaaagtgctcttgaaggtctaggagataccattttggtaaatcaggaaacacagttctggcaggtggcatcagctatgcttgattatataatggggataccaaacgtccttgcttggggtaatgttcttaatgctacatgctctgcggtcaagcacttctgctcccatgcacctaggctatcttggaggctgcagacagataagtggttgtcattattagtttcaggtggaattgagggcttcaaaaacagtgagatctgtttgattgatcttttctgtacaatgttgaatcattctgaaccagagcagcgttttgttgctgtacaacagcttgggaggattattaactcaacaagttctactgaagctgatttgaaatatccaaactatgaccaaaatttcctcatatctgtttcaacagtaacatcccttttggtaactcatacatgggacagcgtagcagcattggctctccatgactcttctatgctattaaggaatcatgcaatggcattgcttactgaatatgtgccttttgttgataggaagcacctgcagtccttcctttcatccagtaacggtatcctgactggtttgggacaactttctggtgtaattgaagagggctattttacacgaatgtctttgctgttgttttctaaggcatgtctttattctaatcctgaagatatcgctttgatacctgaatgtgtttggcagaagttggaaaacatgcaaacatcaactggaggttttggatatatggagaaagatctctgcctagctctgtgccaactaaaaagtgaatcagatgctacaactgttgcaaaagttctttctggatgtaatagtcaaccagtcagccctgatttcaagagcatccgtgaatcaatcctccaggtgatgtcctctttgagttctattgaagcatactttgagttcttcgcagccagatctgcacaagaacatgaggaacttgaagaagccgagattgaattggagcttattgaaaaagagaagtcagttcctaactttgttgagcataccaatgatacgatggtgcttgccatgccatcatatgaccgtgatggtagtgaggttaataaacggctccagcaaatccgggaaaatattcggtccctggaaaggtctaggctgaaagaggaaattacagcgcgcagacaaaagaagctgcttctaagacatgcccgtgaaaagtacctagaagagacatgctccagggaaacggagcttatgcaagagctcgacagggaaagagctctcgagatggaacgtgaagtagaaaggcagcgtcaactggatattgagcgtgcaaagtctagggaactgcaattcaacattgatttggaaaaagagaaacaaactcagagagagcttcaacgcgaactggagcaagtcgagttggggcggtcatcaaggcgtgagttctctgccaatcccaacagccgctccagggagaggtaccgcgaaagggatggtggcggcagagcacagcaggaggcggggagcctgaggtcttcgagcagccgaggccaggaggggggctctgcccaggcgcccgcaccggccgggccgggccctaccgtcatgctcgccgggtcaaggacgttctcgggggccaaccttccaacgattctgcagcctcgcgagcgcgctgccgacgaggacagcgcttgggccgaggacgctagcagcaacggagatcctgaactggacggcgtgaggccgcatgggccgcgaggcagcaggtcatcctcctctaggcaggttgcggagaggagggagcgggatggcactgctgctggcacgggcaggagagaagggaaatgggagaggaagcagcacccgtgactattccctgcttgtgttgtgcctaagcctaacggaggcttcctcaatcgttgtaattgtactcgtatgggcattggatcacgtggctgcttagtcaacggtaccgtgcattgataaaaaggttggatcatcgtatgggaacactaccaatcagctgcctgctcagtcaacagcaccattaccatcaca

SEQ ID NO: 101634 - DNA, 390 bp, Zea mays
  Clone ID: MRT4577_24200C.1
atagcctggcgcgcgggccgaccttacagcgtgaagcgcatgcttctgtgcgcggcgcgcatcgcgccgagcgcggtcaacccgatcacagagtggccgagcctgacgcgacatactcctgaccacgtgcacttgtctgggcagcggctgcagcggaggcggaacggctcgtgcgcctcgtgcggcatggctggctcaggtggagagctcgcttgtggcatcgaacgaatctgtcgtgagaatagcagcgcggttgagacaagcaaaagctctatcgcggaggcggctgctccttaggccagggagaatggagtattttctggtgtacagtcaacaggatccggttaccttggaaattatctaggggcaatttataattggggtgcactt

SEQ ID NO: 101635 - DNA, 392 bp, Zea mays
  Clone ID: MRT4577_24201C.1
accccacaaagttccaactttgtaaattactatcggggccaaaaaacctttcccctacaaggtgtttttccaagacctaacgggggaaccgttcaataacaaataatttccctggcattccggactagagccttcatgccaggccctgggccggccccaagtatttttttttttgtggaacaactttatcaataatggacaagttttttggacatgttgcgtttttcaaaggccaaacacttgtcttccccgtggaaaacgggatttttcccaaatggttaatagtttcttaagaacgttaatctaacgaaggaattgtcaagattcttgttcattatcttccctgtttgctctgttagtgttttattgaactttttttttaaattgttttt

SEQ ID NO: 101636 - DNA, 489 bp, Zea mays
  Clone ID: MRT4577_24202C.1
cacaagactattctatgttatttcttaagatattcattaggaattgtaggttgtatgtgcagcttggatttccttaatgaagcttcagtgcggatgctcataggaagcagcagaaggataagcaagaaaagtcagagacggaggatgcggcacccaaaaacatggcagcctctagcaaccaggatcagaggcaaaccttgaagttcggattctctaaaatggctccttccaaggtggatatctcgaggataccattcaatttgtttgcatttcaggactttgctcgaaatgttggttccatgacctataaattgttgagatgttcgttgttgattggcaaatcttgcagtgctgttgaatttttgtggccacaagccactgctgcaagttcttgtcgaattagactacatatttctttccctagaacctccaatatttagtgttactgcagttttaacctgtaatattggttggtcaaaatatagagag

SEQ ID NO: 101637 - DNA, 702 bp, Zea mays
  Clone ID: MRT4577_24203C.1
cattgggtacctcgaggccggccgggatcacaatcactggatatcatgcgatgcaatgagaaagaaaatgcctcatctggtgcgagacgcacgcggggtcggcggggaccgaatgtacccgagaaatcctcctgggctgggaccccaagtacgaacacgatcaaactagctgcaccggccgaccagtcatacatacaacgcttcgatgccctcacctcaaaacttgaggcacacacccgacacacgccaaccccaccaccatcggccgcttctcccccaacgggaagaggtgtcacctacggcgacgcctccggatgcgtccgcgtctgaaggcgctacggacaccgcgccgttcaaggccgagttatcgcccctctcgcgacgcgtctacggacctccgctggacctcggacggcttacatatcggtgactccggagacggaaaaggtacggccttcggccaagaattcgtatgggactctgctaccacagctgactgagattgatgaccacgtcagaagagtagttctgagctagagacgtacacccaacacctccattacacattccgacatgagaatgaagattgtctagctaactattatgaaggaccggcattcaaagacaagcattccctaaaggatcgctcgaattttgttaactgcatccgggaagctcctgaatggcagtaagcttatcact

SEQ ID NO: 101638 - DNA, 574 bp, Zea mays
  Clone ID: MRT4577_24204C.1
gccgccgctcgcctgcacttctacgtgtgaaacgcgtccgcgcctatggcctgcccgtgcccagctgccccctctccacgcgagcctctctaggcgtcaagcgtgccattaagcaaccgtggcccccacccctcctcggctctctgcgtgagcacaagcacgtctctgtagcccatgttcaacggaagcgaaaggaaacaggtcacccatcacattcgtcatgtgcaattctctcatgccgtgcagcccattaattccactgaagaaaacatagaatgtgcatcataatgtcacagaaggcctaaaatgttatagtgtgcggccattgctcacgaggaggcagagtgccgtgttgccgaggtttgcactacagcttggtttctgatggagttgtaccagatttttttgttcaaactagcagttgacgcattgttggaactttagcagtctataaaggattttttttcttaaatgccactggaccacatacgattgttgatggtaaagaagttgtgaactttgcatcagcaaagtacctcggtttaattggcaacgaaaagattattgattcttg

SEQ ID NO: 101639 - DNA, 412 bp, Zea mays
  Clone ID: MRT4577_24205C.1
aagggcggcgagggaagggctccgcgtcgtgtcccttctcttcctcctcctcctcctcctctctccaacaccccatccatcagcgctgccctccgcattgctcttgatcccatccagtacatcgattctccccccaagatcaaaggccggaggaggaagaaagtttataattttggacctagccggttcccagccccaacccctgtcatctccactggcagagctcagccaattgcagtaccggccattcatctggaagagctgaaggaaattacaaaaaacttcagcagtgatgccctcattggcgagggctcgtatgccagagtctattttggtgtgctgaaagatgggacgaaatctgcagtgaagaagcttgactccagcaaacagcctgatcaagaattccttgtgc

SEQ ID NO: 101640 - DNA, 307 bp, Zea mays
  Clone ID: MRT4577_24206C.1
tcctcttttctttttttttttttttttttggtggtttttttaaatttttgggggtttaaacaacaactatcctggggcaaggcacaaaaacaaggacacagaaaggccacccaaaacaacccttttgcaggcaaaccaacaccaaaggggccagcttcccaagcaacaacccgcccatgcccgacaggacccggaaaatgcaccccaataacccccccctaaacagtcacgcccgggaaaaaaagaaccccctggcccccccccggaccccaaacccacacgccctaaataacgccatccatcaaaa

SEQ ID NO: 101641 - DNA, 1721 bp, Zea mays
  Clone ID: MRT4577_24207C.1
gcgattgggttcctggtccggccgggaagccaggccaggcaacccacaacacaaggagaaggggaagggcggcgagggaagggctccgcgtcgtgtcccttctcttcctcctcctcctcctcctctctccaacaccccatccatcagcgctgccctccgcattgctcttgatcccatccagtacatcgattctccccccaagatcaaaggccggagaaggaggaagaaaggttagggagtcggccatgggatgcttttcatgctgctgtgtggcagatgacgacaacgttggcaggaggaagaagcatgacgatccctatgttcctatccctgctcatgtttataattttggacctagccggttcccagccccaacccctgtcatctccactggcagagctcagccaattgcagtaccggccattcatctggaagagctgaaggaaattacaaaaaacttcagcagtgatgccctcattggcgagggctcgtatgccagagtctattttggtgtgctgaaagatgggacgaaatctgcagtgaagaagcttgactccagcaaacagcctgatcaagaattccttgtgcaggtttcagctgtctcaagattgaagcatgagaatgttgtccaactcgtcggatactgcgccgaagggagcacccgcgtccttgcttatgagtatgcaactaggggatcattgcatgatatcctccatggtaaaaagggtgtcaaaggagcccagccagggccagtcctgtcatggatgcagcgagctaggattgccgtatgtgctgctcggggtctcgagttcctccacgagaaggccgatcctcgagtggtccaccgcgacatcaagtcaagcaacatactgctctttgaccatgatgttgcgaagatcggggacttcgacatctcaaaccaggcccctgacatggctgcgcgcctccactctactcgcgttcttggcacctttggctaccatgcaccagaatatgccatgactggacagcttagcacgaagagtgatgtctacagctttggagttgtgctgctggagcttttaaccggtcgcaagccagttgaccacacactgccccgtggccagcagagccttgtgacatgggctacaccgaggcttagtgaagacaaggtgaggcaatgcgtcgatccaaggctcggagacgaataccctccaaaggctgtagccaagatggctgctgtggccgccctctgcgtgcaatacgagggtgaattccgtcccaacatgagcatcgtcgtcaaggctctgaaccccttgctgcacagccggtctggcaaccgccctactgcctcgtcggcctcccacgctgccgcagcagcagagcgatccggactgtgatttctcatcgctgcgacaactttgggttcacgaaaaaggaccgtcttgtggagcgttggtgttgctgtgtcgtgactgccaacgccttggcgcagagaagagctttgccatgcagctgtgtattgtaaattgttttgtaagcgatgcgcctcctggtttgtgtgccctgtcatcatcctattctattctagaaaatggtgtacgatggatcatggatgataccaactatttggtctcttttggaatgcgaaaatgcagcacttggcttcctatgtgtgtagatcaggtttgttgttctattgctacaaaccaggaatactacagtatgaatattacaactcc

SEQ ID NO: 101642 - DNA, 227 bp, Zea mays
  Clone ID: MRT4577_24208C.1
cggacggtccgcccacgcgtccgagcgcatcgagtggccggcgtacgacgcggtggacatcgccaacgggttcgagatccggcggtacacggacgccatgtggctcaccagcgcgcccagcgaggacatgtcctgcgtcgccgccaggcggagcggcttcctagagctggtcgactacatccagcgcaagaccgcgtagaagcagacgatcgacatgacggccccgg

SEQ ID NO: 101643 - DNA, 257 bp, Zea mays
  Clone ID: MRT4577_24209C.1
cctcacctgatatattgcatttccacagatgtcggatggaccgggtggtggaaagggtcgcagtagcatgaacattactgagtctcaaaggagaaattgtccaagcaaagaaagcacacttttcgataggcaccggagaacaagcatccaagattttaggagaacattgccttctgtcaaagaggaagtgtgccacaagagaaagataaaaacagaacatctaaaaaaaaccatattttagtagtaacctcgtgccg

SEQ ID NO: 101644 - DNA, 146 bp, Zea mays
  Clone ID: MRT4577_2420C.1
atattttttttttttttgcgacagcaaattcgtagactaatcacgacgctaaatatgaactattttttctctaaaatggaaaggtggtgatatcaaacatataacacaccgtccttactacaagaaggtttttttatccggggggg

SEQ ID NO: 101645 - DNA, 1244 bp, Zea mays
  Clone ID: MRT4577_24210C.1
cctccattgggtacctcgaggccggccgggattggccttccgcctccacctgtacacgcctccgccacccgaccaactactcaataaccctagctaaaccccacgccgccgcggcgacctcctccgccggcgggatggacagcctcaggggagccaagttgccgggcgtgccgaagggcgggagtgcgctcgtgaaggtggcgctgctcggcggcgcggggctctacgccgtcctcaacagcttctacaacgtcgagggcggacaccgcgccatcgtcttcaaccgcctcgaggggatcaaggacaaggtgtaccccgaaggaactcacctgatgatcccgtggatcgaaaggccgatcatctacgacgtccgcgcccgacccaacctcgtcgagagcacctccggaagccgcgacctccagatggtgagaattggtcttcgtgtccttactcgacccatgccagatcagctacctaaaatctacaggaacttgggggagaacttcaatgagagagttctgccttcaatcattcatgaaacactcaaagctgtggttgctcaatacaatgccagccagctgatcacccagagagaggctgtgagcagggagattaggaagattctgactgagagggccaacaacttcaatattgctctggatgatgtgtccatcacaagcctcagctttggaaaagagtttactcatgccattgaagccaagcaggttgctgcacaagaagctgagcgtgccaagttcattgttgagaaggctgagcaggacaagcgcagtgcagttatcagggcacagggtgaggctaagagcgctgagttgattggccaagccattgccaacaaccccgccttcctggctctgagacagattgaagctgccagggagatctcccacaccatggcggcctccagcaacaaggtgttccttgattccagggaccttttgcttggtcttcagcagctgaacgtgggggccaagcaaaagaagtgaagcggtcgtccccaggccatcgtggatgagagtagtttcaggcgatggttttatctgttacagaatgcgcgtgcgcgggaatgaacaaagtggcaccatgttgcagtctgtatgtactgacaagtttgtctatcgatctttgattctctgctcttgtaagtcgtgactgatgaatctgttcttgcaattgccttcctggaggcttgctctgatgcgtgtaacagccaaaaaaagcggcct

SEQ ID NO: 101646 - DNA, 159 bp, Zea mays
  unsure (1)..(159): unsure at all n locations
  Clone ID: MRT4577_24211C.1
ggcgggncgggtaatgcatattactataccaaaggcatatgtgtctctgatggttagttctaaatttttgtacgaaagggctgggttttagtgctcgctctgcgctattttttggcgtggtgtggtggatggatccagaatgccagtgtcgagggtgaa

SEQ ID NO: 101647 - DNA, 278 bp, Zea mays
  unsure (1)..(278): unsure at all n locations
  Clone ID: MRT4577_24212C.1
cccggtcacccaccgtcgctctcccccatccaattccgagacgggcggggagtcaaccaggtacatgtgctggtagcgaggctggcgtttgtgcttgcactgcctgccgctataattcgtgtggggcggtttttttcttttgtcgcctgcgtcctcctctgggggggggggggggtttcctctctnctcctccttggcttgctgtgtctgctccttctcggttctgtttccttctccggtttttcgttctctgtgtggcctcgttgccctttttggtc

SEQ ID NO: 101648 - DNA, 376 bp, Zea mays
  Clone ID: MRT4577_24213C.1
gggactgccaagatatagcagctagcagtaatgatacacattacaataccagaatggaaacaagtcatgcctaattcatgatggccctgtcaccaccaaccaaggaaagcaaggcacaggtttacaagacaccaagttgtggttgtgggcttgtggcaagacggaaacacaaatacatgcagctgggtgaaggcacccaaggtagacggacggctgcccaattccacgccatatggatccttaccgcttttttacaacagttgctttgtcgccaactgctttttggccattttggatccccttttttaatatcaacattaatgaaagcccctttttttaagtactttacatttgggcatttttaaaaatccactta

SEQ ID NO: 101649 - DNA, 574 bp, Zea mays
  Clone ID: MRT4577_24214C.1
ttgggaccctcgaggccggccgggactccgctaccatgggttgctagcttccaaccgcctctttgatgggagatggggactatgcgctgcaccctgagcccggcgccgacgacgtgggcgtctgctggcccggcgagctcgacgagcagctcgtaacggagctcctctgcgacgacagcctcctcctcggcgccctgcagcaggtccccgccgccgtcgactcggagccgcagtactgctcgcgtgacacaggcgcgtcgtcatctgctcccgcggcgtgcaccagcggcggcggcggcaccgtggccgagcaccaggagctgcttccgcagccggaggcggtgagcagggccctgtgctcggtgtacaccggcccaacgatccgggacatcgagaaagcgctgtcgacgtccaggccgccgtacccctggagcagccgccgctacagtccaatgcatctgttcggagcggcgggtcgggcaccggagaggcacacgacgaaggtgaggagctgtggcggcaagacgccgagcgacgggtacaggtgaaggaagtacgggcagaagtccatcaa

SEQ ID NO: 101650 - DNA, 247 bp, Zea mays
  Clone ID: MRT4577_24215C.1
cgagatagaacgaatgtgttcgataatacacttgacgccagactgggggtggtttttcggaagaaattttcagagctccggacgcttctttattgccacaatgctgcttaattgactcaatcctgaaatgatggggtggctaccttttacctagtggggattgccagattgatcctttactgatttcattcccgatgatcaaacttccttcgttgttcataacagggaagaggcccctaccgatcgc

SEQ ID NO: 101651 - DNA, 454 bp, Zea mays
  Clone ID: MRT4577_24216C.1
ctaacgcatacacccgcgtcccaccgaacatccaccggagagctcaactgtccggtacgtacactggattcactgtctccctacaggtacccaccgcagacttgcccactgcgtctcaccacccgccgactaaccccaggtgcagcctaaccgacactccccgctctcaaaggagagcctagggaagttggtatcgagtctcagactaagagggaggacagttagaggaaggagaatcacctcgtctagatcgtgttacgttttcttcacgtgcctttggtcgtatgaacgtctacattgcgtgaagtatgatagtaggagtctaagtcggccaggtccgtgtatcacacgctctttgcgaacacgacctgaagggacaagactacggtagagagtacggaggtctccttgagctccgtccgggctactcaggtcacttaactatgaaagtcaa

SEQ ID NO: 101652 - DNA, 875 bp, Zea mays
  unsure (1)..(875): unsure at all n locations
  Clone ID: MRT4577_24217C.1
ggtacccctccgaggtccggccgggnaaaacccgcccggtgttttgtagggcgggccccagccgcctcccctctcgttttctctgaccctttccttcccttcccttgttttgatggcgccaccgcgagccgccgccggcgtgtcaattcctgctgatcctgccgccgacagtccagaggcagagtcggagagcaagctgcggcaaggtgcagcagacgcgcggtggctcgaaaccctctccgagccggagctcgatgtgctggtgagcctgagggaagtggccgtcacgcgggcttccgatgccggccatcctggcctcgccgacaccgtcttccatctccgcgcgctgcgggctctcggggttgtgttgctggaagagttgaaagagcggctcaggcaaagctcagctgatgcaaacgtgttggacaggagtgcgttgctagatgatcctgaggccagccaagatcatcagatgccagcgccgaatggtatccacaagaaaaggaagaatcagacgcaggatgggtgggatggagacggtgcccaaagtccaaagagacgaaaaacgacctgaaaactctgaggacgactttacgaggccggtggttgatattgcagctgatccatcactggagaagccagcctcctcttctttgccatccagtcgtctcatcatgtactgtagcgtcagcccgccgtagcatgacaccggtttgatgaataggtttagcttcatcgattgatgatacggcatgccaaccttgatcctgttctgatgtgcagttggttcaaattggaatttttacactttacgatactacgcctcactaaaacatgcgtacggaggagtatctatggttcactcttttttttac

SEQ ID NO: 101653 - DNA, 422 bp, Zea mays
  Clone ID: MRT4577_24218C.1
agtatgcatctgtcagaaactttacaccttgcttcacttgccaagtagaatgtgaacttgtgtgtcttctatgtagtccgagatcaaagtaacatatgtgctgatttgcaaccccgactttgattttgttgaaatttaactagtggtttgctccttttgtagtttcactgctcaagtggcatcagttttatggaggtaatgtttccttgtttggcacttctatatacatttctgttgccatacttgtaccactttggtgtatacacacacacctgtgttttcataagattttatattttttcagcatgttgttagtcaatgttgcaaatatacgttcaatatgtaatcagtaagctgcctgactactcttccgggttcatgttcttttcaagaggaattttctggacatttcgttcctatta

SEQ ID NO: 101654 - DNA, 506 bp, Zea mays
  Clone ID: MRT4577_24219C.1
cttcccttgttttgatggcgccaccgcgagccgccgccggcgtgtcaattcctgctgatcctgccgccgccagtccagaggcagagtcggagagcaagctgcggcaaggtgcagcagacgcgcggtggctcgaaaccctctccgagccggagctcgatgtgctggtgagcctgagggaagtggccgtcacgcgggcttccgatgccggccatcctggcctcgccgacaccgtcttccatctccgcgcgctgcgggctctcggcgccaagagtgattgagattgttttgcgatgctgcaactgcaagagggagagttgctgaccaaatacttatgcatgctgtgattgagattgttttagaaacatacagctgtgaattttgcgttgctgaccaaatacttatgcatgctgtgcagggttgtgttgctggaagagttgaaagagcggctcatgcaaagctcagctgatgcaaacgtggtggacaggagtgcgttgctagatgatcct

SEQ ID NO: 101655 - DNA, 142 bp, Zea mays
  Clone ID: MRT4577_2421C.1
atagtttccgcgcgggggtggtggcaaaaacgaaatggacaaaggccatgtatatgccacacacgaaccgacccatcactacgagtggaggtgtgaaaactcggatttacacgccttattccaattggacaacactgaattc

SEQ ID NO: 101656 - DNA, 2286 bp, Zea mays
  Clone ID: MRT4577_24220C.1
atgacggcaagcatcacgcgtagtggagaagaaacagagaactcggcgttgtgtgtcacatacgaggagcatctggtgccacgttgccgagtctggctgactctggaggctcaccccctacagccgggttggtgttcccttgacttcgagaatattggattcagggcggacgacaccaccgaggctacagctatgaagaccctgacaactttctatggctaccatcccttggagatggtaatgcacccactgggactcttccctgctgagaagagggatgaccccatgtggtgcaaccgagtgagccacgtgaaggacgtgtgggccatgcatcccgaccaagttgggaggatcactgttcagtgcatgagcgcactataccgccttcaggccctgcaaagcgatgccatggaacacctcactaaccttgctcaaaccactaagctcaccctcgacagccgagaggacttcgtggacgacttgtcttcagaattggtggaaaaagacctacaggtggaacagttgagccagcgcatcgcaaccctagagcagcaggtggagatccgggataacaccattgatgtcctggagaaccagctctgtgatgtgcaggaggagcttgaggaagctaaagaccacgtggagatgcaccaccatgatatggaggcaaacgaggccaaaagcgagggagaggatgctcccaaggaattagaaccagcccctggtcccaatgcaactccctccgggatgccccttcacccgcattcagtgttgcctctaccacttagggttgatggatggcagctaggcagcgtcgcgggtagaacgagcaagttccccccacctcctccagctcccacggtgcaggagctgatggcccggcagaatgagattctgcggcagctattgcagcgccagacccaccctcagcagggacaccacattctagcagggattctggatcgcaagctaaatgagtttctggcattaactcagggaacccgcactgtgttacagtatgcccaggccttcaatgacctgtgccacttcattagccagaagttcaacgttaaatgccaacttcccttctatcatgcccaagggtctttcatgatagcaacacctgggggcaaaattgcaacaaaccaattaaatcaaaacgtgcctatatcactgggaagtaaaatcttcaaaaccacactcctgattttgggattagagggcatggacatcattctcggagctgactggatgactcaacaccgggtggtgttggatgtagctgccagagctatggaaatctgttctcctaccttcggagaccttacgttatatttgcccaaccaagaacccactcgatcatgtgcttttgctatgatagagctacccttgaacaaaattctagtggtctgtgagtatgcagatgtttttcctgatgagttgccaggaatgccgccagatcgggatattcaattcgccatcgaattgcaaccgggaacggcacctatttccaagaggccctaccggatgccacccgctgaattggcagaattgaagaaacagctacaagagttgttgaacaagggtttcatccgcccaagtacttcaccttggggatgtccagccttgttcgtaaagaagaaagatgaaagcttgagactatgcatagattaccgcccactcaatgcggtgactaccaaaaacaagtatcctttgcctcgtattgatgttctttttgatcaattggtcggagccaaagtgttctccaagatagaccttcgcttcggctatcatcagatcaagatacgagcaagtgatattccaaagaccgccttctcaaccagatacgaactatatgagtatttggtgatgtcgtttgggttaactaatgcgccaacatacttcatgtatctgatgaattcagtcttcatgcctgaactagacaagttcgtggtggttttcattgatgatatcttggtgtactcaaggaatgaagaagagcatgcagatcataagagcctcaagtacatctttacccaggctgatctcaacatgaggcagagaagatggctagaattgatcaaggactacgacttggaagtacactaccacctggggaaagccaatgtggtagctgatgccttgagtcggaagtcacaatgcaattgtatgatgatggattctcgcatcaataccctgtgcgacaagttgagcaagatgaagatcaaagtaattccttctggtaccttgtctcacatctccattgagccaaccttgcaagactag

SEQ ID NO: 101657 - DNA, 358 bp, Zea mays
  unsure (1)..(358): unsure at all n locations
  Clone ID: MRT4577_24221C.1
tcagggcctggtggaggcggngctggaggctttcaagaaggactacgcagaggagcagccgagacgcgcacgggccatcctggacggcaggatcgtctgcgacaacacgctggacgccaggctcagcgtctccttcaggcaaaagcttcctgagatcaggaagaaactcttcagctaccaagtatcctaatatcttttaattttttgctattctctgatcgattgctttctgaaataaatcggaagcggttcgtcataacttggaactcggttgtctctctgccaaaataatgcttaacaactggtcgtcgagtgatctgcttgctcctctctttttttccttggaggcatagtaagg

SEQ ID NO: 101658 - DNA, 769 bp, Zea mays
  unsure (1)..(769): unsure at all n locations
  Clone ID: MRT4577_24222C.1
ccggccgggacttacaatcatatcagactgnattctacgttagttctcgcatgtagagctgctacgtaccctgctttgtaactgatattgtccaactcattgcatttgccagctttagagattagtcgtcgacactctctcttgttttgttgcatctgcgaaaatgacgagcttcatttcaaacatcatctggaactctgtcgaggggttcgtggatgcgggaaagaaatcggcgggcgaatttggcggcaatgcgttgattaaagctggagatatgattgagaatagcggtaggagcataggaaccggcatagaaaaaaaggcaactagctatggcactgccatcacaggccagccctataagccttcagcaaaggccctgccctcgactgcccgtaagcccgcaatgaagcgctcgaattccacacctgtaaacgtcaaaccaccgacaagcggaatacccttgggcgcgaagaagtatcctggcggcaatcaaatacaaggagctgttggtggagccaagaagacggcgggaggagtcaacaaagccattggcggtgttactggcaccgcatccaaagcgactggaggtgtcgtgggccgagcaaatagcacaatcggcactctttcctccacggcaacaaaaggcccgggtagtgttgtaggaggcggtcggaaagccctcggcggagctactaagtctatccccccttttcagggtccaggtccgacatctgctgctccgaataatagcatccctaagccagct

SEQ ID NO: 101659 - DNA, 257 bp, Zea mays
  Clone ID: MRT4577_24223C.1
gggggccaccaacggcattttttccaaccgaattacggtttttggtctcagggggggacatgtcacaattggatgccaatagaaaaaaaagggggttattatatgggggaataaacccctgggggcataggagtttttattttatcataaacatttggtgggggaggggccaactgggcaaagttgaggggatccgcgaatttttgggggccgtaaaaaatgggcaccaccccccgtttatttggtgcctgcctagg

SEQ ID NO: 101660 - DNA, 824 bp, Zea mays
  Clone ID: MRT4577_24224C.1
gcgtacgcaggatcgtctgcgacaacacgctggacgccaggctcagcgtctccttcaggcaaaagcttcctgagtgtgcgactcgttatggctgtttgtttccttacagatctcatcctgcagcagtttgtgttgcgagcgtatttggcggagactcatgatgtccctgacttcctcttgcagatcaggaagaaactcttcagctaccaagtatcctaatatcttttaattttttgctattattatattctctgatcgattgctttctgaaataaatcggaagcggttcgtcataacttggaactcggttgtctctctgccaaaataatgcttaacaactggtcgtcgagtgatctgcttgctcctctctttttttccttggaggcatagtaaatctcctttgtcaagtgtactagcatgtagcacaaaaatgttctcttgtagccgaattttgaagctcatcgaaggctcgcgagcaggcaaggtgctctctatgaggagctatatttgcttctttacccttatgaaatatgggtgctatctgattcaaatggactgcttttgcacatttgctgaatgtttcaaatggactgctagcactatctgattcaaatggactacttgcacatttgctgaatgtttcaaatggactgcttgcacactgtctgcactggtcacaacagagcctgcaacgtcgagggaggatggtgttggtcgcgacgtcgagggaggcgtgatggctttaggctgcggcggcacggtggcctgggtgcggcggcggggcaaggaactcgaccaggagggaggagctaggaaaaacgcac

SEQ ID NO: 101661 - DNA, 238 bp, Zea mays
  Clone ID: MRT4577_24225C.1
gtccctttccctatcccccaggcgtccactcacctaacctcatctataaaatattctaacctacttccaaatcaatccacaaccctaggatctctccaatttgggggcagaactccaccaggttctcctgctagtccttcatgagcgtgaggccaccccgcatgacacccacgtttcgacaactaccagtcgttggaggaggaggctttttctccgacgtcctccgatcggaacctct

SEQ ID NO: 101662 - DNA, 541 bp, Zea mays
  unsure (1)..(541): unsure at all n locations
  Clone ID: MRT4577_24226C.1
gcgcaagctgcaggcttctgtcatcatacctgatatcattgggcaaaactccattccacattcagccagctgatgtcaccagctggcttcatctttgccatcctcctgcctatgaacatagcgctctacttcatcacgatcactgtcgaagcctttctacggccagttattcgcatacctgtgcaatgtccttgccatgggaatcggtatcaaagaggatactgagactctttgaccacccctttaaaaacagaaccgcttttaatggactgcgggcaggaccattcaccttcagggctgcagtcttctgttccgaaagattcatcatgaccctagcactaaaaccatcgatggcagaccagagaaagttccgatcggagctatcccaagcaagtgccgtcattatagccctatatgtctgatctggagatagtgcgtacttggactatggcgaggacaccaaaaacatcataacacttaatcttccgaacaattggccatnctgctacaggtaatgatggcctatgcatcacactggcat

SEQ ID NO: 101663 - DNA, 663 bp, Zea mays
  unsure (1)..(663): unsure at all n locations
  Clone ID: MRT4577_24227C.1
cgggctcgtgtattatggccatttagaggataataccgaagctatcgccataatgtgtgcttgcatcatcatcacatgggattgatgaattcataactgaggtacgtataaacaaaaactttaggcaccaagaaaagacacataaaatctatcttttataatcatttttttcttgattcatatatgtgtcttgctatgatcctatctacatccaaagcttgataaataaaggtaaactatggtgtctctgattggttattgctgggagagaggaagatcaattgggactgtgccacagtggtgaaagagtcctttgtgcttgcgacttggtgacgcctacctatcacgccaactgtaggagcactacaaagccaaagcgcacacactttggttgggacacgagagagacatatggccaacttttggccagtgtcatgcatgcacgctcgtcgtcagtctacgatacgcccggtggtcttgacgtttgttggtcacttgttctcaattgctatacatagttggaaataaggcaacacaacgattaggcttcgacgaccaagtgatcaagttctttgagttctaccaaaatgaagatcctgagcatctatttggtgaaggcaagtgtcctctgacctatttatgtnctattcacatgataactca

SEQ ID NO: 101664 - DNA, 302 bp, Zea mays
  Clone ID: MRT4577_24228C.1
gattcctggaattgcgtgccattctggagacagggcaaacacctacaatggacgtgacagctatattgagtgatgcgaatcgtgtagtatgtgcactgcgtagtgtctcatcaaagctcaaagattcatgtgatcatctcgaggagtagattgaatagccgaaggccgagaagaatgagctgctagtcgagctgcgcaggctgatagccgtgaaggagagcctggagcagcatatctagttcctgaatgcatcggcatgcctcgtactatgccaactagtgatgccatgctccgcgttagct

SEQ ID NO: 101665 - DNA, 229 bp, Zea mays
  unsure (1)..(229): unsure at all n locations
  Clone ID: MRT4577_24229C.1
cccccccccnattaacaaattttaccacnaaanaacggggggggccaggaggaacaaaagcaaacgaagcccccaaaccaaagcaacacttgcgnnannggnccctcccgaccagacgagcacaaaccgcacagccaactacgngcccaccctcaacgacacgggcccgggngaacccaaaaaaagaccatgggagcgacagcagcggcgacaccagcgaaggcagcac

SEQ ID NO: 101666 - DNA, 290 bp, Zea mays
  Clone ID: MRT4577_2422C.1
cccacccgtccggaaatttatttattaatctgtagacatactatgttaccacatatggatttagcttccttgggggttaccgggatgagcgaggcacctacaacctaaattattggatgcaatagaaaaggatctgatctttattgggaaagaggcctgtctgaaccaggcctcctaagagaagttcttcaacaaggtataataccattttaccacagtgatcgagtccctgtctaaccttttcaacaacaataacaacaaggcctgcctgaggcttccggacaaaagta

SEQ ID NO: 101667 - DNA, 261 bp, Zea mays
  Clone ID: MRT4577_24230C.1
cattttgttcagcttcgcctagtgtttgggatggcccaatggttcaaatccggctcagtgcctggctaccaaaatgggaacaaaggacagctaccccgatcaattgtgatgttgtgtgtttgtgggtatgttcaaaaaaaaaaaaaaaaaaaaaaaaaaaaaaaaaaaaaaaaaaccaaaaaaaaaaaaaaaaaaaaaaaaaaaaaaaaaaaaaaaaaaaaaaaaggtttgtccctgcccggggggccgttaaaaagggca

SEQ ID NO: 101668 - DNA, 271 bp, Zea mays
  Clone ID: MRT4577_24231C.1
tgaaagcgctcccctcaattgggcgggacgtaacctatcaccaccaccaccaactcggtcccggtaagctctgggttgtgccgtgtaaagaccgtgcattgcgtgggtgccgtaaccacccgcgcgcgcgcggtggaggtaagttgatgagcgcccgaggagcccccctaggggggcgatcgattttacccatgccaggaggcggttgccccttaggctttgagactagctatctactggtgttgggtgcattattcgctagctttcctcg

SEQ ID NO: 101669 - DNA, 295 bp, Zea mays
  Clone ID: MRT4577_24232C.1
cccacgcgtccgcccacgcgtccgcggacgcgtgggcgtccttctcttcccgacttcctcgcgttcattttttcaccccacccggcccccaacgccaaatttaacagcaaagggtcggaaccttctaaccgcacctagggtttggattggcgcccagcatggggttcgttgaccacgccttgttcattttcgacgaggacgacctcttcggcggcgccatggggggcccgcgcggggcgcccgcgaaggagatcgcctttgccgccgcgctgttctccttttgggcgctcggtac

SEQ ID NO: 101670 - DNA, 269 bp, Zea mays
  Clone ID: MRT4577_24233C.1
cgccgggccggggatctatacactggtcatccccatccgcacctctctccatctccctgctcctccgcctccttcttgatccagccaagccagggatcgccatgtcggactcggaggagcaccacttcgaatcgaaggccgacgccggagcgtccaagacctacccgagggagggggacaccgttcgtgagaacggattcatcatatgatggaggctacttaatggaataatgatcttcacacagaaactaacccaccagcccgccccg

SEQ ID NO: 101671 - DNA, 281 bp, Zea mays
  Clone ID: MRT4577_24234C.1
ggaaaacttactttggcaaactgggcattgccaatgcttggatggactttcggattgaggtgaccacggagaagatcatcctggggaacggggatgcactgagcacgttcagttggctagacaccgtcacggtcacacagacagggcttctgtgacaatcaaacggaaaaagaatatggtggtgtccttcgaagatgggattagctttgtgatcgtcctacaccaggtttggaagaaacatccggttcaccaggacttcctagggttctacgtggtggaca

SEQ ID NO: 101672 - DNA, 553 bp, Zea mays
  unsure (1)..(553): unsure at all n locations
  Clone ID: MRT4577_24235C.1
cccagcgtccgggtggtattggtaactgtgcctgtagctcgtgtcaagactgatgtcattaactgcttgtatggctgctacttttgggcctactggctttactactgaggttaagtccggtgagatgcacacatagaggctatccaataggcccttacccgtgacaatgctagattacaggcggagagagaggctgctctgaaggatctgaatcgtaggtatttggcctgcaactccaaagatgaccgtgccaatgaagctactagctttacctggcaggttataataatgaaccaccctgcccaaattggctatgggtataccccagttttggactgccacacctcagacattgctgtgaaatttgatgaactcgataccaaaattgataggcgattcctaaatggagctgtataaggagcccatatttatcaagaacggtgatgctgccatggcgaacatggctctcactaagtccattgtggtgaagacctctatttagaatgcttctcttggtcgatatgatgatcgngacatgaggcaaacggtggct

SEQ ID NO: 101673 - DNA, 248 bp, Zea mays
  Clone ID: MRT4577_24236C.1
atctctggtggcgacgactgggcggccgacgctgccaccgccctacgccaagtgaccatgtctttcgtattcgggatcttcgccggcgtcgagcacccgggcattggcggaaatttgatgagttagagcttattactggtctcatactcctatacggtgtcactggaactgtcaattccgcaagggctctgcatcttaagaattgttggatggtttgaggacccgaaggttgattcagcagccaaaca

SEQ ID NO: 101674 - DNA, 189 bp, Zea mays
  Clone ID: MRT4577_24237C.1
gaggatgtgtgtgggactgtgcgtgagttggaagggagggggtagcaatgtctttgcggaatggtgcacttttcaatccgatgctattcacaatatcctattctgtttggaaaatccttggattaagatctgcaaacggcactgtttgatttagattcaagatagcggacttctgcggactatgagggg

SEQ ID NO: 101675 - DNA, 507 bp, Zea mays
  Clone ID: MRT4577_24238C.1
gaactgacgaagtggcaagtggtcccagcgccgcggcgaccccaccccgggaaaacggcgacggccagccccgcgccggcgttgatgtcgccgctgtcacccgcacggcggctgtcggtcctctctctccttctcctcctactcatcctaaccgcggcgtcatctgcggcggcggaggaggaggagttcactggaggagctgctactgttgccgctcgccgatacgaaggcgaatgtcgagtgggaattaccggtcgtccgattcttcgacagctgcgaccgggcgaaagcgcgacatattttcaaatgcaatttcaccaattaccccaagggtgaggactttggcgagatcttcgacgtctttggcgacggcatcttcaacgacgacggcgactcctggcgccgacagcgcgccaagtctcagctcatcatggcgggtcgtcgcttccgcgccttctccgcgcggtacagccgacgacaagggtggagaggagacaacctgacttt

SEQ ID NO: 101676 - DNA, 600 bp, Zea mays
  Clone ID: MRT4577_24239C.1
ctcgaggccggccgggatccttgtctacgggcgcgagaacaggctccgcttgcacaaaacttgtagacacgtacaccgcatgaacgcatgatatcacgacgctatgggcatcgggctggatcgcaccccgaaatcatacccgaagagcaagaaaatgaaaatggctacggccctgctgagcatacacgaaccatagtacaccagcgaacagagtgcaaacacgatggcgctgatggagtatactgggagacaggatcaacgactcatggtacgacaccatatatatctgcgcatgcacagaaggatgacgtgctgtacaatctaccccttgtgcaacaacatggtgaacaaggctgaaatcatcgccgccaagcctgacatgaaagtctgttacgacgacgagaacgccaagcacaacctgcccgagtacgtcttgagcgaaacaaagaacgagagtatcgcgatgcgcggttctgaatctcatagaacgtaagccttaggacgaaatggacgcactcgcatgttatgcgtgtgtataaatatggcactgatgataggatagtaaccttcgaatactgagtatacacttccttttcagcg

SEQ ID NO: 101677 - DNA, 444 bp, Zea mays
  Clone ID: MRT4577_2423C.1
ggtccgattcccgggcctggccgcactctgctttgtccatactggcgcccgggcggcagccagctccaggaaccaaaatgaagctatcggtggcagtcctctgcgcgcttctggctgaccaggcggcggtgctcctcgtcaccgggccgacgtatgcatgccagcgagctggaggtatggtactacagcacgaaagcgagggcactggacaacgtggtgaagtggcacgcgatcatagcgctcaaagtccgccgtcgcaccggtgccggtctcgtccgccttatctttcatgactgcttcgggggggcagctatgggtctgaactcctggaccctttctacgacaacccttatactgagaatgaggcgcccgagaacacttgcctcgccccctattacctcctggaggaaatcaaagaccctttccagaagaggtgccccggcg

SEQ ID NO: 101678 - DNA, 815 bp, Zea mays
  Clone ID: MRT4577_24240C.1
cacatgaatcagcttattttctcggtttattaatttcacaggaataaacaggaaacttgtccggtgttccaaccaggcgaggattctcgaagccacttgtcactactcgcttctacaaacggatctaccacaacatatgtgttgcctatttcaggcttccgctgttacctagcagtgatgatatggtcactcttgccgagttcctcgctggtagatgtcgatgcaggtggcgaaacgctgctgcttgcgaagatgtctcccattgtcttggctgccgatgggaacccgccacaagtctcaaggatctcctgtttcatatggttaacagtgacaagatcgacagcctttttctcctggggctgggaaagaacaacatccatgaaaattgcccagctcgcgctgtccaccaatggccgcacacggtacaagcagctcttcctcaccatcgcctctgccgcctgctccagccggctggtgacgatcaccaggccacctctccctttgggcagtgcgaacgcgaggcgttctgataagacagacaggtcgtcggctctccgcatggcgttctgggggccaacgccaacaacgtcagagtaccagctatcgatgtgccacacgtcgtcgaacactatgaggaacctcttcccctcgagctgttcgtggacggcgatcgtcagctctgtcaggctatcgctgccgttcatggacaggatggcatcctcctcgtgtccaagagccatgagcatcccctgcaaaacttccttgcgtctgtctgctccagcagaggcggtgcgcgacatgcacatccatatcta

SEQ ID NO: 101679 - DNA, 1758 bp, Zea mays
  Clone ID: MRT4577_24241C.1
tggacaccttcaactacgcgcccatcgcgctcggcgtctgcctcggcctcatcatgctctggtggctgctcgacgcgcgcaagtggttcaagggccccgtcaggaacatcgacgaccacaacaacggcaaggtctgaacacctacgcacgcacgttttttttttttttttttttttttttttttttttttttttttttttttttttttttttttttttggacccaaccaactatactagattcggctcactttttaatcttcggctgagaaattagttttataatccgactacatttaataccccgaacgggggttcaaacattcgatgtgataggggctaaattttagcaggggcaaaccaaacacaccctaagatttccctctctcattgtagtacagtattatgcccccatggaccggtgaccacgcaaaggtctctctgtagagtgtacatccgtaacaatgatactccagtacaaagttgcaactaaagtattgtacgtatacatggctgtgtagtgcgtagctgtgtgtatatacttcaggagtactactaaggtgggggtagcaccgtgctgagcagtgagcacgcagacggctactgtgcgaggctgttgagcacctggagcagcacctccctgaagcggccgacgtcaacggtgatgtcctggccgtccatgagcgtctgcctgatgaacatgaaccccttcttgtgtagcgccgtcgggttggtgaagatcttgtgcccgctggggaacttgtccttgagcgtgctctcggcgacaccgatctcgtactggatgtacttgaggcccatggcctccgcggggtcgccgtagtcggcccgcgccatccactgcagcccgccccacggcacgatctgcaccagcgcggcgcccggcggcaggaacatcatgttggtgagccccgcgccgtgcacgcccaccatcgcgtcgcacgagttgatgagtcccccgacctgcgagatgtcgttggccacgtccgactcgttgacgacggcctcgaaccccacctcctccgcggcccggaccacggcgtcgaggttgaggagcaggcgagtgcggtggcgcgagatgaccagcagccggggcttcctccccgtgccgtcgccgaggcgcgtgggcgcgtcccggggcagcgagagcgcgcgccggaggaaccgcgtgaagtccggcgtggcgagcccgtccaggctgcggtcgcgctcgatgatgagctccttgtgcgcgcgcaggctgaccacggcgcgcgggaaacagtgcacctcccgcgccgcgcctgccctggccaggtccagcggcgcgtggcgcgacagcgcccggaggagcctgtcgtacttgaccagccaccagggcgccgcgttggccatcaccagctgcacgtcgccgcggtaccgccgcgccgtgttgtacagcggcacgagcacgtcggagaagtcgtggaagatgttgcccgtgtacccgccgatggagaacaccaccgccggcgcgccgtgcgtctccgtgcaccgcggcgcccccgccgcgtcgcccgtcgcgcgcaccgtgacctccgtgatgcgccccatgcacgtctcgtcgcccttccgcgggtaaggccggaccttgtgctcctcctgatcggaaccgctcgtcgccgggtcgacgacgacgacgaacgccgacacgttggcgtccatccggacatcgccggccaagtcgcagatgtcgctgcggaagtcggagaagtcgcacagc

SEQ ID NO: 101680 - DNA, 429 bp, Zea mays
  Clone ID: MRT4577_24242C.1
aagttgtgtattcattgttgttaggtttgtttttttttttttttttttttttttttttttttagaagaacaataatcacgctgaataagtgggccccacatcacaatcctgcacatgattttaccatcttattcttaaaattattcttggaacaattggatctatatcattaaaagatccaaactttagatatataccatgaaccccacatgtcattgactcatgtggacccacatgtaagtgagatagtaatggtatggatccaaagtggtgatcttttaatggtatggatccaaatttcccattattcttttatgaacattatcgcgatcaggtcctgcccatcccaccccaactgacccaccgccacagaagctcatcaagcatcggacggcctgtacccggccgggtgaaggtgcgcgtgggcca

SEQ ID NO: 101681 - DNA, 580 bp, Zea mays
  Clone ID: MRT4577_24243C.1
atttatatctttcaatgaccaacataagactccgagccattccgactccagggcattgctacgcagacacacaaaatactatcctactgctgtagtcagaaataaaacaacaacgacagcaaaacaagaggcataaactgcatagctgctgtgataatgcgggggtgcgccgtagcagggaacacaccgcatatgacttagctcaggcctcataggggcgttgcagcactgatggtggcttgcgtagggagatctggcagatgaactggccgggcttcaccgcggggtctacattgggcagcacccggcgggcgcagtggctggaagaactgcaccacccgccccagagagatgcctaggataggcagcgccaggatgatcccagggcagatccgggggacgaccccaaaggcacgaattggaaggcctggccgtgggccagcacggacttgtcctcctccatgaagcgctcgagccggaactagtccgggcgcacccacctttaggggtcgatggccaggaaccaggcattgacgaggatcttggactctgccgagatgtcgaacccggccagcttgcc

SEQ ID NO: 101682 - DNA, 229 bp, Zea mays
  unsure (1)..(229): unsure at all n locations
  Clone ID: MRT4577_24244C.1
gtggtatnatatctcccccaattcgccgccccctccgacctcgtcgtactcctctcgctccgttgaagtacgcctcttcatctgctcgccgcagttcgtccgttgtccatggcggatgcggaggcaactgatccaaaggcgtttctaaaggaacgttcaaaggctacgtgtgcgtctcagtgctatcaatatcacaaatgtgtctagaggattgagaatgacgagactg

SEQ ID NO: 101683 - DNA, 1160 bp, Zea mays
  Clone ID: MRT4577_24245C.1
ccggccggacgcccccgccccatccccgcataggtcgcgtctgcgccatcgccgcacgccatcacgtccgcagcccacatgctccaccctcgcccccctccccgccattctcggcgcaccgctcgccatccccataggccatcattgctagcgcgcccatgccccctgcccctgtcatcggcaccagaaaccgctcccctcgcacgccggccctagctggctagctcccaaatccgcccctccgcctcagatccctacggtgggatgcgagggaacgacaaccacgcggcctcccgtccttagagcctcaaatccgatgccccctccctaagccattccctcggccgcgacatcaacgaaaacgagcatggcccccctctacctcctccaccttgccgtttatggcctccgcactgccccaacgtcgacaccttcgtcctccccctctactcccagtgcaccgccgccgcgtatgcgctatcccacccgatggacgtgttgccgcctctgcagcacgccctgtcgctgtcgaccccacccagccatgcatttggagtttacaatgtggagacatgatttatccaccggacgacgaggttggtgcgcggatggcgagggaggacctccactgggcctactccacacctcttcctgtctaccgaggtcgagcacatggaggacctgctccgctgtcgggcactcctgagccagcgactacaaaatccactctggctctctacttcaccctccatattacaatatgtactttgtatatgtgagatgagacacccaagcagtcaaactaaacactattgtccaatcccctcttccaaattcattacaatcctattagcatgcaaagatttaatttgatgcaatgttttgatttgtactacgtttttactagctttgcagatgcttcagaaggttatggtcagtgacttttttcttttcagatttgttagaatagacacagaaatttagatttctctcctgtaatgttgttagcattggtcttaattttatttgttgttgttaggagaggatttgattatcatgatcagtacaagatatcaatcattaaatagcgaattcactctaatttctagccaccatttttctaagtaccatgttgctgctctctttccgctggatgaaca

SEQ ID NO: 101684 - DNA, 1253 bp, Zea mays
  Clone ID: MRT4577_24246C.1
ctcccgagcgctcatggctatttcttaaaattcggggttgtgtggccatttatcatcgactagaggctcataatcctcaccccatatatgtttccttgccatagatcacattcttggatttctggtggagaccattttttggttaaaaactcgtacgtgttagccttcggtattattgataatggtcgttcatggctattttcggcaaaatgggggttgtgtggccattgatcatcgaccagaggctcgttcacctcaccccacatatgtttccttgccataggtcacattcttggatttctggtggagaccatttcttggtcaaaaatccgtacgtgttagcctttggtatttttgaaaatggtcattcatggctattttcgacaaaaatgggggttgtgtggccattgatcttcgaccagaggctcatacacctcactacacatatgtttccttgccatagatcacattcttggatttatggtggagaccatttcttggtcaaaaatccgtaggtgttagccttcagtgtcattgaaaatggtcgttcatggctattttcgacaaaaagcctgttgtgtggccattgatcgtcgaccagaggctcatacacctcaccccacatatgtttccttgccatagatcacattcttggatttctggtggagaccatttcttggtcaaaagtccgtaggtgttagccttcggtattattgaaaatggtcgttcatggctattttcgacaaaaatgggggttgtgtggccattgatcatcgaccagacgctcatacacctcaccccacatatgtttccttgccatagatcacattcttggatttctggtggagaccatttcttggttaaaaactcgtacgtgttagccttcggtattattgaaaatggtcattcatggctattttcggcaaaatgggggttgtgtggccattgatcatcgaccagaggctcgtacacctcaccccacatatgtttccttgccatagatcacattcttggatttctggtggagaccatttcttggtcaaaaatccgtaggtgttagccttcggtattattgaaaatggtcgttcatggctattttcgacaaaaatgggggttgtgtggccattgatcatcgaccagaggctcgtacacctcaccccacatatgtttccttgccatagatcacattcttggatttctggtggagaccatttttggtcaaaaatccgtagtgttagcatttggtattattg

SEQ ID NO: 101685 - DNA, 343 bp, Zea mays
  Clone ID: MRT4577_24247C.1
atcacaaaacacttgagcatgttatatatatatgagtgagaaaaaatcatctggctgaactactaagggaaagttcaattaagggcgtgtttgttaaaaatgaaatgtgatatacaaatttgaatggggaagaaaaaaaagtcctatctaatctctttggaaacaaagcgccctgaaaaacacaaattaaaccacctcaactgatgtggctcagagaccaatagtgaatatacaaaccttaaaggctaaagcgaatgaggaatgcctgttttattgccgttcggtggtaactttgaacacgaatctttatcaaatacatcgctcgttaaacctggatatgggt

SEQ ID NO: 101686 - DNA, 179 bp, Zea mays
  Clone ID: MRT4577_24248C.1
ccccacgccttcagccacgcgtgcgaagacccgtgggctgcctacacacccgctctttcaatgtgttaccccacatccatgcctccctaaagagggatattgaccaaacccccgccttggtcatatcttatatacaacccaaccccggtatccgcacccacagaatatccccccccccc

SEQ ID NO: 101687 - DNA, 375 bp, Zea mays
  unsure (1)..(375): unsure at all n locations
  Clone ID: MRT4577_24249C.1
agcagtggtaacaacgcagagtacgcgggatcttatttgttttttgtccacttgcctaaacttttgtaatctttgatggcttggccttttcgaatatatccaagacaaaaaaaaaaggccctgcgatgagatttttgtcggatctatgctgatgagatattctatataaattactcctattgagttatataactatgtgaattccatgcttattaaatttcgtgcatacaaggggggattttagcatggttaatggggagtaaataaatgttttttatttgcatccatgctgagagttggctgattgagcatctaaaataagctatagaacttcgaagcctacttgaatggtcgtngatatagaaactagagatg

SEQ ID NO: 101688 - DNA, 371 bp, Zea mays
  Clone ID: MRT4577_2424C.1
tttttttttttttttttttttttttttttttttttttttttttttttttttttttttttttttttttttttttttttttttttttttaaaaaaaaaaaaaatggggggttaaaaatgggaacctttttttaaaaaaaacccttttttttttggggggggttgggctttttttaaacaacctggggtttgaaaaataaaaatttgggccaataaaaagtcacccccctagagaagatgtttgttttaaaaggatttggcgggggctacaatttctttggctgtggaaaaaccttatttggtgagggggggccgctcccaaaattggagggttggtgcatgggggaaaatttttggtaatggggggggggggg

SEQ ID NO: 101689 - DNA, 1867 bp, Zea mays
  Clone ID: MRT4577_24250C.1
attttattttccagtacctctcacactttaaccctccctaattcacagtttatccttgtctcaatacataatatcgtgatatattactccccgccatgtcgataatgttggcttcccctaaataacgaatgcccaccgtgtcgcacccattggcggcgcagacgttctttgaggcatgagccgcaatatgatgccctacaacctaggggcagaccagatattgataagtaaagaagcgccggttcccattgctgtcttcgagagagcattcagaaatggcggctcccacctctgatgccacctccggtggaggcgtagaaggaagaggagggcgcccgccgctgccgagcaggggcgcctgcaggccgaggttgactgacccggagccacagggcggactcgaagacgattcggacacggagggtgacggcggcgcggacggcgacagtgaatcctcgcagagcgacggcggcggcaccgacgagtttatgctagtgaaattagcagagatacggaaggaggttcagtgccctatctgcttaggcattatccggaagacaaggacagttatggaatgtttgcaccggttctgtagagactgcatcgacaaatctatgcgactaggaaataacgaatgcccagcgtgtcgcacccattgtgcaagcagacgttctttgagggatgatcccaattatgatgcactgattgcagccctgtatccagatattgataagtacgaggaagaggaatttgctttcagtgagcaggagaggattcggaataaaaagatacaagaaaccattgaggaaacattcagaagacagtctgacgcaattggtaagaaacgttccatggcaaaagcaactgcaaccgcctttgcaaggaagtacaggagaacacgggggagagttagaaccattccccctgatattgcccctactggctcttctgaggaggaaagtggagaaggaaattccaaagagacaatcagagagcaatcttctgctgatgatcattctccagatttaagacagaaaagatgcaggaagaggtctggaccacaaggatcacctgctggaaccattggcagtatcgactacagctttgaggagaatgatgaattagttggtggaaaagaaattttagccacctctccgttgcagggagaaatgcttgcttgggggaaaaatggtgcacggagccaaaatcgacatggcagtgttggttcaaatggcaggactggaaggagtgggcgcattgcaaaattggttgattacctccatactgctgatgaaatggataaagagtttcagttgtttcttcttctccttcctgtcgatggacaaaccatacctaacttggaaaagccttatctaagctgtcgaccaaccttgtccattaaacatcttgcacagttcgttgctcttcagttgtcttgtgaagtcgaagaacttgagatgtacataaggatggaccgccaccgtgtaagtgttggctcgaggccttccagtacaggtgaggcaaaatcacgtccatttgatgacttggaaagactgaacgaagaaaaacttgtttcggagcttcatccttcatttgtctctagcaacggtgatatggagttacgatatgctttgagaactcgggagtagatcagtttttatcctcagctatcaatttatgaagtcatactgtccttgtgtaaaaaaaatgttcgatgtgaacaatgttgacgctgtttttctcattggtcatgctaagttaatttaccatctttgtaatatacataatgaactgattagcaaatgacctcagtaggtgaacccagttgtatgctatgtactgttcatttatgcgagtcgatggcagg

SEQ ID NO: 101690 - DNA, 372 bp, Zea mays
  unsure (1)..(372): unsure at all n locations
  Clone ID: MRT4577_24251C.1
ttggttgttgggactaaaaaacacattttgtgaaaaaataataattatccttttcgcactgtggttacctcctccagnncttcctcgtgnaagggcaagggcaacttaccaacagcatagnacatnaccacagnctacatattatctcttnacannnactttatnccattttttttgggggggggggggnacaattcacccatcantcccncntcccnnnactgaaaaataaaaaaggccttttatgactccnaccgcgccggttagctccagctccagcgtcggccccggcgctgtctatcccacattttgnatcccccttttttttgnggttnnctttggggggggtgtcccttttnttccctttttttt

SEQ ID NO: 101691 - DNA, 585 bp, Zea mays
  unsure (1)..(585): unsure at all n locations
  Clone ID: MRT4577_24252C.1
gccggccgggctgggagcagaagaagctaaaagcccgaagcgcaacgcgcgagcgaatacaacagcgcaacgcagcgccatggaagacgacgacttcaccttccccaccgttgccggcgcgcggggcccgacggcgccgctcggccgccccgacgacgaagacccggtgccgcacctgctccagcttcccccgcctcccagtcccaccctcgcggggacgacctcccctctgtggccgttcgcgggctccactcccaagacgacgacgacgtcggccgcgctgccgtcgtccccgcccgtgacagaggaggacgacgaggacaggatggacctgctgtgggagagcacgctcaccaccaggcccgtcgcgacagcgccggcgccggcgccggagtcagctgggagcgccatcggcccccacgcggggccgccgccaaagcggcgcgcggccgccgactagtagcgcgccgcggcgctggncgacgcggagaggatggacaggctgtgggagagcttcaacgaggacctcgtcgtcctgcgggggcacgtccgcgaccgaggccgccgctccaagtccgccgccga

SEQ ID NO: 101692 - DNA, 692 bp, Zea mays
  unsure (1)..(692): unsure at all n locations
  Clone ID: MRT4577_24253C.1
gtttacagatcatcattttttcctggcatcgttcgttcgatcctcttccacccctgatccatccattccggccatggactccaacgccaacggcgggcgcagcacgatggtaggggagatggagagcagcttggagcgggtcaggcggcagctctcctccacctccacccgccatatcctccagggtcctctcttgaagcgatccgatacactaaggaaatggaatgagcggtgggttatacttgatccagctactggaaagatggaatacaaggttcgtagaagtgatacaactgtgaggggaataattgtgttcgattcaacaagcaccgccactttgtcacctaccaactttcatggactgccaaaatatgaaggatgttgtgtatatattgggactccacaaaaaaaggagtactttctttgtgcagaaactcccagcgctgcaagagcatgggtatctactttacatgcaactcaattggtcctacaggctcataaacaggcggtgganttcattgggtggaaatggttctgcaaaactgggaacagttgctactgtttgtggctgtggccaatgcaactacgattgaagcatccaaagaggtagaagcagcgatgaagatctccctgcgggcagctttaggctcaactacaaataaacttagtaaaggtcaattagatgatctcac

SEQ ID NO: 101693 - DNA, 227 bp, Zea mays
  unsure (1)..(227): unsure at all n locations
  Clone ID: MRT4577_24254C.1
tagtactaggcaccacacctnagtactcagcgagcggaggattggggtgccctgttcttatacttcttgctcaacaatgatgattaatctctgactctcatgcccagtattatcctgtggactttgcacaggcngcattgattagaacgtaggcacacgatgttacaacttatgagaatggagtcgactcccaacatagtcggccattacacattcacagtcaaatt

SEQ ID NO: 101694 - DNA, 390 bp, Zea mays
  Clone ID: MRT4577_24255C.1
attcggctcgaggaagggctcacgatcgtggttagcaagaccttcaatgtcatcgtggaaacaatgatgattcacatcaggaggaaccctgctgagtcaagcctttacgcgccgatttcactgggggatacgaatacggtcatgatcacggacatttaactccggtgggctgtatttcttgcccaggacactggcctgaaaggtcttggggacgttgctaatgcaatgggtgctgacgcaaaggttgtactccgcgcactaaaatctgataacgtggacctggtcttggccacgctcacaggtgctgacctgtaggaagagaacaggctcttgccagagacaaacgagaatgggagctaaactgaataagtctatgactcgatctgcttg

SEQ ID NO: 101695 - DNA, 723 bp, Zea mays
  Clone ID: MRT4577_24256C.1
acctcgccgggagtttctcgccggagcgagcaccgtcttcctcccgcgcgcagaggcgacccaacgcgacggagcaggatgccggacaggacgggcgccgccgtgcttgacgacctgcccgacgacatcatcgtcggcaagatcctcatcctgcttccgcccaaggacatcgggcgctgccgcatggtccgcacgtcctggcgcagcgccacctccacgccggaattcatggtcgagcaccgccgccggcagccgtcgctcacaatcatcgacgggaaggggcagcgagccagtttcgtcaccctccgtgacgctgctgccgccggagccaccagccagcagctctggcccttcctctcccggtgccgtaaatcctgctgcaagattcgcctccatgcctccagcgatggcttcctcatcgtctcgcggggagaccggttctacatctgcaacccgaccacccgcaagcacgctcacctgccatttcctcgccctcctctgccgcgctcctcctgcatcaatgacatctacattcacggcctctaccaccacaaatcaaccggcaaatacaggctgctcttgtccaacattcacaagaaagaagccacattgtacgtcctcaccctagaaagagccaacgagtcgaggagcatccaaatcgtcatgccaacactgccttcgccttccctggaacaaacgtgttggttactctatgcgctatgc

SEQ ID NO: 101696 - DNA, 500 bp, Zea mays
  Clone ID: MRT4577_24257C.1
gcgcgcaattggtatatatgttacttttttcttttcaagaaacaacaataataatagtatacaagctaggcaaaaaaaagtgcaggtagtacgtgatcccatgtacaattaagtacacacatgaatgaatcatgcagatgaagtgcatatcgtcgagagtgatggtgaaataatctctggctctgggccggcttgacttgacgcgattcccgctgctgctactagctagcttagtagtacaggcagctgaccctcacctaactccaatccccccgatcagttgaccttgttgcacttgagcctgacctccccgggcggcccggtgagcacctcgatgctgcccatcttcaccatggcggggcaccgcgccctgagccgcgcccccagcgtggcgttcatcgccgggtccagctgcgggtacagcctggcgggcgctaaggacgagcagtgggagcgcccgatggagtgcgcccccgacagcgtcaccaggtcgtcggcgc

SEQ ID NO: 101697 - DNA, 247 bp, Zea mays
  unsure (1)..(247): unsure at all n locations
  Clone ID: MRT4577_24258C.1
tcatccaatccagatcagcaaagcggcagcgcgtttagaggatcgtcgaacatagatcatgaagatggtcataaaactcgtcgcgtgggtggctctgtagcctctcatcgcctgctgcaacaaatatgccctgaccctacaatgctctctatggttctaacgccataattcgacagtctctccaaccagatacttaaatgagcttcatacggggaagtagtggggccaacatanaanaacaatactc

SEQ ID NO: 101698 - DNA, 716 bp, Zea mays
  Clone ID: MRT4577_24259C.1
ctcgaggccggccggtggcggtgctctcccgtctctatcctatccaccacggaatagccacgcgagatagataggctactcagtgccactcgatcagtagtggtagcagctggcggctggcctgggacgacgatgagcgccaagaccagagctggggccgcccatgtacgccggcagctcgtcgcggccgtggcggtgacggtggcatgcttctactcctcggaggcgacgcagctgcaggtggggtactacaacggcagctgcccggccgccgagagcctcatcgagaccatcgtccacgccgccgtccgcaaggacgccggcaacgggccgggcctgatccggctcttcttccacgactgcttcgtcaggggatgcgacgcgtcggtgctgctggacgacccgacgggcagcccggggaacaggacggtggagaagacgtccccgcccaacttccctagcctgcgcgggttcagcgtgatcagccgcgcgaagcgcgtggtggagcggcggtgccccgggacggtgtcgtgcgcggacatcgtggcgttcgcggcgcgcgacgcggcgcgcatcatgggcggcatccggttcgcgatgccgtcggggcggctggacgggcgcgtgtcgaacgcgtcggaggccacggccaacctgccgccggcgtccttcacctgacgcagctcctgggccgcttcgcgtccaagaacctgagc

SEQ ID NO: 101699 - DNA, 177 bp, Zea mays
  Clone ID: MRT4577_2425C.1
acctaacctaactagcaccgtcgctcctcctttttccacatacgttcacattcacgagggagggtgctccccttaaatccggccggtcctatcctcttcaccgtgcgcgcgcgtacattactagcgtttggacgtctccctcttgatcccctagtacccacacgactcgtgaaggaa

SEQ ID NO: 101700 - DNA, 1603 bp, Zea mays
  Clone ID: MRT4577_24260C.1
gagcaagctactagctgctggctgcttccttctgtcagtgtacagtagccggcttgcgagctgtgggccggccggtggcggtgctctcccgtctctatcctatccatcatagaatagaatagatagatagataggctactcagtgccactcgatcagtagtggtagcagctggcggctggcctgggacgacgatgagcgccaagaccagagctggggccgcccatgtacgccggcagctcgtcgcggccgtggcggtgacggtggcatgcttctactcctcggaggcgacgcagctgcaggtggggtactacaacggcagctgcccggccgccgagagcctcatcgagaccatcgtccacgccgccgtccgcaaggacgccggcaacgggccgggcctgatccggctcttcttccacgactgcttcgtcagggtacgtaggattattcgatgcccagccccagcccaatcggacaatgcaataatgcaactgagctccttgacagggatgcgacgcgtcggtgctgctggacgacccgacgggcagcccggggaacaggacggtggagaagacgtccccgcccaacttccctagcctgcgcgggttcagcgtgatcagccgcgcgaagcgcgtggtggagcggcggtgccccgggacggtgtcgtgcgcggacatcgtggcgttcgcggcgcgcgacgcggcgcgcatcatgggcggcatccggttcgcgatgccgtcggggcggctggacgggcgcgtgtcgaacgcgtcggaggccacggccaacctgccgccggcgtccttcaacctgacgcagctcctgggccgcttcgcgtccaagaacctgagcgccgacgacctggtgacgctgtcgggggcgcactccatcgggcgctcccactgctcgtccttcgcgcccgccaggctgtacccgcagctggacccggcgatgaacgccacgctgggggcgcggctcagggcgcggtgccccgccggcggcggcgggcggcgcgaccgcgtcgtcgacctcgacttcgccacgccgctgcagctggacaaccagtactaccgcaacgtggtgacgcacgaggccgtgttctcgtcggaccaggcgctcgcggggcgcaacgacacggccgcgctcgtggcgctgtacgccgccaaccgcacgctctggtcgcagcgattcgccgccgccatggtgaagatgggcagcatcgaggtgctcaccgggccgcccggggaggtcaggctcaagtgcaacaaggtcaactgatcggggggattggagttaggtgagggtcagctgcctgtactactaagctagctagtagcagcagcgggaatcgcgtcaagtcaagccggcccagagccagagattatttcaccatcactctcgacgatatgcacttcatctgcatgattcattcatgtgtgtacttaattgtacatgggatcacgtactacctgcacttttttttgcctagcttgtatactattattattgttgtttcttgaaaagaaaaaagtaacatatataccaattgcgcgcatgactgtaagtatgtatgaggcatacaattaagagatgatgattactgag

SEQ ID NO: 101701 - DNA, 411 bp, Zea mays
  Clone ID: MRT4577_24261C.1
aggagaaaaaacaatttaggggtttctacatatttacccggggggaaaaaaaacccccccttttggacaaacatgggtgattttaggggacaacgccaaattattattttggcttggctttggaatggaacgggaaacaaaagaaacccaaggtttttggaggattaaataattcacgggcggacacccttttcgaaccgaaagaaaatgaagtggcttagaataacccttgggcttaattggcggggacaaaattgggggggttggcccaagccctgtttgtgactgggtaaaccattgggttaaggggggtttttaggggggccttggcggggacaaatggctgggccaaaaaacctcaatttggaaaaaggggggggggggcgttttggggttctttaccttgggctt

SEQ ID NO: 101702 - DNA, 307 bp, Zea mays
  Clone ID: MRT4577_24262C.1
acaacaaggctgccggcgtcgcaacggcggaggagatcaggaagaaaagccactcgggcggtttgcggtgttggggggacctccatttacatccaccccacacgataaaaaaaaggcgtcaccatttgttgcaggactgcaggagtggttgtctagttaagaccaaggacaacgagagccccctggtgaccggttgcccccccggttaggaatctccacacgggacgaccggaacgtgcctgtcccttgacccccatatttcgcccgctttcttcggccccacttgacccccgcccacatgtcctca

SEQ ID NO: 101703 - DNA, 337 bp, Zea mays
  Clone ID: MRT4577_24263C.1
cccacgcgtccgaggaggaggagtatcatttgcatgctgctccaatgatcggcatgctacttattgcttgtaaccggggctagatcaatataacaatcacttcaataagtctaatgctccaaacaattttattcttgacaaactttttgaatttctttataagaatcattagtaccttatatactaagcatattattttatttaaaatttattcaaatttttctctttccttaaactcctattaatattttttgtccctaactactgtttataatactacatctctttttctatgatatttttacattatatatttattttctatatttatatattt

SEQ ID NO: 101704 - DNA, 450 bp, Zea mays
  Clone ID: MRT4577_24264C.1
atcctaatcttatttaaaaaagaaagggcctggtctacagtcttcagacaggcaaaacgctaacatctctccaacatcgtagctgggatattatatactacaagtacctttctcccggaaactggcgatgttttacgccttgaagaggggctgctaaccaagcttgtgccactccatccctatccttatcactctgtggaaaaaccgctctagcggaaacttgccgtaactgggcgtgttcttgacgctgtactcccagatactacgagggcagcaacagcttgctctccgagggatagcacctgtcaatcttgccgtactcggggagttcctgcagacccagaaacaggttggccagtccatcgagcccccagataacggcggccattgaactgtctgggcaccttgcaagaacctgggctcgcgcccatgcagccctaataaaatctc

SEQ ID NO: 101705 - DNA, 257 bp, Zea mays
  Clone ID: MRT4577_24265C.1
ggccgccgtgtgctggcgattcgccctatggcgaggtcgcgacatcgcaggcccaagcgttttttttttttttgttctttttttacaaaacatcctttttccctactattattcctttccatgtcaacggttcattcgggtaattgctcacacgtggcacccaggacgatgggtgacactgcgagcattgtcctggatgaacgcagtgaactggctaaggggtagtttgtagggggataggttgctttgttactaca

SEQ ID NO: 101706 - DNA, 255 bp, Zea mays
  Clone ID: MRT4577_24266C.1
tttggtcgccgtctgcccagatttgtattgttcttctcctggatctacgcaccgaattcttggtgccccgggcactgcagctcttcccttcccctggacgcgcgaaatacttcataggatgaaatcgccaaaatggcaagaataagtcacagaggacgtgagctacctaattaccaaattctatgcacctattgactattgcttggatataacctattcaaagatccctacaatatcaacccgaaccctacgact

SEQ ID NO: 101707 - DNA, 400 bp, Zea mays
  Clone ID: MRT4577_24267C.1
acaagcttttttttttgttgttttgtgttagaacgagctattctttttttttttttttttttttttttgtttttttgttttttttttttaggggaaatgatttgaaaattgtattgttccgggggcaataagggaaattggtgggggggggcaattccacccaaggggaagggtggcccaattttaattaaaaactggggggcttgcaccttccgggggaatctttgaaaagtcaaattacatgggggtggggggggtttttatttaaaggggccccgttccccttttggggggcgtattagaattaactgggcgctggttaaaaagttttagggtggaaaaaccctggcctttaccaacctaatggcttatggggaaaacccggtttccccaagggggg

SEQ ID NO: 101708 - DNA, 310 bp, Zea mays
  Clone ID: MRT4577_24268C.1
ggcggacggcgcgcaaccacgcctgccatcaacgccgcgcctccactggagccatcctcgccccaaatcccaacgcccttccccgaatcctcgccgcagtcgacgctgatgttcaggctcttcatccgcgcgtagaaaggatggcggcagcggcagacctactcggcgtcagttgcggtaagtctctcctccggctccagcgaaacctcgtaggttgaggggatttcttcttctacccggggcagcgtgccttttcatttaatttgtggtcgggcgaactggatctgaggtttcctggatttagattttg

SEQ ID NO: 101709 - DNA, 388 bp, Zea mays
  Clone ID: MRT4577_24269C.1
gccggccgggtcgggagatctcaccttcccccgcgtgctccggttgcttttggccaccgatacgctacgccggcgctccaaagttccagatcaggagaagctggagttccaaatcgtagtccgtgtgaacaagttgaatctcataaatcttatcaagtcatctaataaaaaaacgtttcattttccccaaaaaatagtgcatctgatctttccattagtatatagtgttgtatttagacgttcatatagttccctactgcatttaactcatccataagctagatgcatctatgaatgtatttataaattgctgctactaatttttttccattgcataaatataaagatgctttcttcgtactaaaaaaaaaaaaaaaaaaggccccta

SEQ ID NO: 101710 - DNA, 397 bp, Zea mays
  Clone ID: MRT4577_2426C.1
ggggccgcacaaatcaccgtggatgagctcgagctgctgttgtgcgcggtatagggcttggcaagggaaggacgcctcctttgcttcgtggccacacaagtgtcacacagctgtttaacgtgaccgatcagtggaagctcacaccaccatcttctctttccacaacttttgcagatcctcgaaatggagatagctgaacagctcatgccagcgctaggcttcatcatctcgacgtgtggcgaggtagagtggtcgaaccacctctagctctaggtggagtacatagagacggttgaggccttggctggccttggcgagtagactcccgcgtcggtcccaaattcagagaatttcacggtcgatctccacccttgagccaccattgtccaattttttt

SEQ ID NO: 101711 - DNA, 300 bp, Zea mays
  Clone ID: MRT4577_24270C.1
tctgcttacgagcgttttcatcttctggcagccaaccacggcgggagggcacgtctgtctaggggtcacatccccggcacgcggtggcggctgtggccactgccccggtggcgcggttcccccggcctgtgcgcgggcgtgtccctgcggctgcggccaagcggtcggccccgacccctgcggtacgcgtaagcggctccccagcgcgcgcgggcgcggctccatgagctcgtcacaagccgtcagccccccggccccttggcatgtcggggtgccagtggcccatatgcccagcgcggc

SEQ ID NO: 101712 - DNA, 372 bp, Zea mays
  Clone ID: MRT4577_24271C.1
aacttcggcacgaggaaaaccctagccttggagggtggaggcgcgtgagcccgacacccagaccgaacaaagcacggggtcgtgaccgccggcgatggcgcccatctccggagcggcggtggcgccatcttccgctgcgtgccggctgcggctgcacaggcacatactgctgcggccctagaacctccgactccgagcgcaccacttcatcggcgacctctcccgctcctccatctcctcgagctccgccgcgtccaggacccatacgctgggctccatgccggacaactgtggacgggtccacgctgatgagaaggacaagctcaagcactgggagcgcgtctcagaatggctctagcacccatggagctt

SEQ ID NO: 101713 - DNA, 492 bp, Zea mays
  Clone ID: MRT4577_24272C.1
ctctatacggccgccctggggggggggttgtgtttttaaaatttttttttgggttttttttttttttttttttttttttttttggagggaggcaaaattgtatgtgtgtctatttacagggaccgctctcaccccaaaaccgggggtgtcccttgcttaaatcattggtgggggggggggggctaactaaaactctcaacaaattctccttgtgacccccgattggacaaaaaaagccctccatgtatgggtcaagggcccaactgggcccaatcccagtcactaactcacatgtgtcccgactactacagaggcaaatgggttccattggcaggaccagggcctccaaaaagggcaaatatttgcgggggcagccctccaaagtgcaaaacttcacataacggggggctctccctcctcctgctgctgctgctctatgctgcccataatctcatgcacagcggcggcgatatcctcaacaaaccccatgtt

SEQ ID NO: 101714 - DNA, 654 bp, Zea mays
  Clone ID: MRT4577_24273C.1
atgaaagatgatatacggggattgggaggagggttacgagaagttgtcagcattgttcaatgcaatgaaagcaaaaaaactcagtgcgtcgagaccttcaagcattgtcgtcccgtgctctctattggtggtacttttctgcttgggaagtacaagggcacactgttggtagccatttcatgtgatgcggacaacacattggttcctttggtatttgctttggtggaggggaggttagtgtcatatctgatagacatcagggtattcttagcgcagtgcaagagcggattcctggttatggaccacatatggtgcactcgtcacctagcagaaaatttgcttcggaaggatcgtacgaaggataatttccttctatttgaggaggcttgtagcgtggtttcatttcatgagaggtacacacatggaaaggcaatgcagacacgaggatggcgtttctacttgttggaccctcactatgacgagcaccacagtggacaactcaccacagaggggaggacccatgaccaattcgaggagatattgtatgatgataggtacactcctcaccttcagagggttggcatgttcgcggcaggttgcccacggtcaaccctgcgacgctcacgactttggttgacaggtagcgaccgatga

SEQ ID NO: 101715 - DNA, 601 bp, Zea mays
  unsure (1)..(601): unsure at all n locations
  Clone ID: MRT4577_24274C.1
cggtccggactcccggtcgcccacgcgtcgtcgccctggctcaccactcgggaagccacgccccttttactggcactggatcagcttctggtgcacaccgcacaacgcttggcggcgccctcacgccgctcggcacttgcccctgtcatcacctcggcctttgccgtacccgtacttcgtgggtgcaactttgatggctgtgtnaacctccagccatgtaccatcggcccttatccgttccaagaacacctagaagaagtgatgtttgaagaaggagttacttagtgcctgttgatctagtggtggagtttatctaactacttaccagagtgaaaattttgggattttctcctgcntaagatcacttagacacttaccttggattggagtatacaacagtcactgcaagatagtaggacaacacttctggtatatctccagcagccttactagtgcaaaacgtcatatattttcaacaaagcaagcagaggagggcgttcagcaagcagaggagggcggtggtgcttacagcagcagcaagcaaaggagggcggcgctcagagcagcagcaggcagagagggcggcagcgctcagagcagc

SEQ ID NO: 101716 - DNA, 1238 bp, Zea mays
  Clone ID: MRT4577_24275C.1
ccggccgggatccggtgatccggccgggattggaagcatctccggcaagagacaagatgcacgtgaacctaaatggtagccgtttgcatgtgcatgcgatctgcacgatctgtaacaaccgttagcaagtctcacgcccctgtaatttcttgtctcattactacatataggctgtaacaccggaagggaatacgctattcttgctaatcttcaagcaggagagaaaaaagcaaaataagctgagcatccatcaatggcggatgctggcaacgaggccgagggtctgacgctgttgggcctgcacgtgagccccttcgcgttgcgcgtgcgcatggcgctgagcctcaagggcctgagctacgagtacatcgagcaggacctgttccacaagggcgagctcctcctcagctcaaaccccgtgcacaagaaggtgcccgtgctcatccaccacggcaagcccatctgcgagtccctcgccgtcgtggagtacgtcgatgaggtctggcccggcgccgccgccaccatcctccccgccgacccccacggtcgcgccaccgctcgcttctgggccgcctacatcgacggcaagctgtttccggcgtggacagggatcatgaaggcggcgacggaggaagcgagggcggataagctgagggagacgcacgccgcggtcctcaacctggagaaggccttcgccgagatcagctctagctccagcaacgacggcgcggccttcttcggcggcgactccgtcgggtacctggacctcgcgctcgggtgctccctgccgtggttcggggcgctgcgcgccatgctcggcgtcgagatcatcgacgccgcccaggctccgctcctggtggcgtgggccgagcgatttggggagaccccggtggccaaggaggtgctgccgcagccggacgaggctgtggcctacgccaagaagattcaggcctactgggcttctgctaagaactgatgagcaccgaatcctgtcatgatgaaattgaagcagcaatacttgtataacactccaatcatggtgaataaaggcctctaaactgttggttaataaaaaaaaaaaaaaggacgatgtgaaagaagaacggggaaacgaggaaatagggtagaattggtgtaggatgtatctacaagataagagcgtatagaagtctcaacgactccgctcgctctcgagatccacaccacaattccaactccagccccggccggcctcgagg

SEQ ID NO: 101717 - DNA, 361 bp, Zea mays
  Clone ID: MRT4577_24276C.1
gacccactcttacgtccacgcgttctcccactcatcctctcaatttatcattccactcttctcttatcgtctctcggttctatttaaaaagtggtattaccatataacaaaaacacaataatcaacaaaaaataaacctaattactacaataataaaaaaaaaaaaaaaaaaaaaaaaaaaaaaaaaaaaaaaaaaccccccctttaaaaaaacccactttataaaacattcaaacttacctacatattccttccaaattaaacccaaatttaaattaccccccaatttaattaaaattcccaactttttaaaacctcttaacttccaaaactcattcttttcccaacaaaatcccctttc

SEQ ID NO: 101718 - DNA, 277 bp, Zea mays
  Clone ID: MRT4577_24277C.1
ccgggtcaatacaataccctagactgattcgtaatacgtgaatgccacctcaaagatcttctacagtatgatcgaggttatcttcagcgtcggtctgtttacatagtcgaaagagtagggaacgtcgcgtctacataacttatgcggtctagcacacaacggcatttctcgatctggcttataaggtcaggtgccagctgagattgaccctgctctcagttactcagattgaaagtgaaatgagacgtgtcctgtagcagagcattatgctcaaggg

SEQ ID NO: 101719 - DNA, 266 bp, Zea mays
  unsure (1)..(266): unsure at all n locations
  Clone ID: MRT4577_24278C.1
ggtctggactgtgaatcagaaagaaacacgctggacaagacgcattacctcaatctcaatgttccaaaccctaaaacgaaatcgcttgggagaatatgctgaagccctagctctgaccctcattcaccagtacaacaacaaagcgggactggtgcttttggtgagccggtttgtgaggggggggtgcagtangccttcggtgtgcttttggtcttgggcggggcgggtgattttgtggatgttgcggtgtttttgtggttgtggtg

SEQ ID NO: 101720 - DNA, 186 bp, Zea mays
  Clone ID: MRT4577_24279C.1
gaccgctctacaggtgtcccgtaatggactgggagccctagcacaccgtacacactatttaggttaactctgctttaagatgagtatagggagagacatgctctactataatgggggtggtctgaccgactaggacgacacccataaaaaaaagtacaagggaaaggaaagaatagcagatatcaa

SEQ ID NO: 101721 - DNA, 995 bp, Zea mays
  unsure (1)..(995): unsure at all n locations
  Clone ID: MRT4577_2427C.1
ccggccgggaacacagagggagcctgcagaagcgggcaaggaggcgagcagcaactcagcagaagcacaccactccggccggttcgtcgtccgtccctagctagctaggcttggttctgcctgcgcactcgcagataattaagctggtgcgtctcgcggcgtggtggatcggaggagaggtgggacaggcaggcacccatggcggggctacagaggtcggcgaccacgttcagaaggtccgggtcctcgggcctggtctgggacgagcggttcctgaccgaggccgaggccgaggcgaaggcgaaggccggcggtggcgccgccgccgccgaggacccccagccggagctccggcactccaggagcgtcgggagcatcggcatgctgctccgtggtggagacagcgacgacggcaataagaaggcgaaggaggtggagaaggcgcgcggcgggcagcagcagcgggtgttccggaccaaggacgtggcccccgacatggacccgccctcgccgagggtgtccggctgcatcctctgcgccatcctgggcgggggctctggcggcggcaaggcacgccgccggtccaagcccaagcccaagcccaagcctaagcctaagcccaggaaggatgtagcgacgacggcggcgtaggcgcgtagcagcacgtacgtacgtcgcgttgtctttccgctgtaaaaaaacaagtttgggggtcatggttgtgtgagagtgcacatgtttatacatactggcaggggcgaagccagacaacaaagtcattggggtcagctccattaatcatcatctaaatacattagttaagaatatatttgtacaggaattgacatgttttataggggtcagttgaccccaataactacaagtagctccgcccctgcatactggtagcggtaggcagcgtcatatgagcttgctactcgatgtaatgtatgtacaccatttttagtcaggttagtttcctctctttaaanaaa

SEQ ID NO: 101722 - DNA, 294 bp, Zea mays
  Clone ID: MRT4577_24280C.1
cgctgccaaattataagcatcgcagaagcataagagatatatcaatacaaaatgaatcatactagtatgtgttgggaccatgcttcgtcgctgaaggtcctacggaaagaaacagcttcggctgaagctgctcgtacgtgatgctgaaggtaccattcatgaagcttcggtattatagcatatccgaagatgaagggtcgaactgacttaaagatagaatgaccttttagtccataagggtctgagtcattgttgtaaacttttatgaggggcatgattgtaattcctcacgca

SEQ ID NO: 101723 - DNA, 1443 bp, Zea mays
  Clone ID: MRT4577_24281C.1
cgccggcctccgcctcaggggggggctcctcgcagttggtggtcggaggtggggaccccgggccgtcgaggacggactgaacaagtatgccgtcatatttgacgccggcagctctgggagccggtgcacgtgtattgcttcgagaaaacctggtctaatgcccatagggggggaggggagctgttcaaacaggatatgataaattgcacacgtagcaaccactacctgcttattcaaacagaaaaaaccaggcctgagtgctgcaaagggtccacaggaggctgctgaatcacttatttctcttttagaggaagctgagaaagtagttccagcagagttgcgtgaacaaacacctgtgagggttggggccactgcaggtctcagagcattagggactcaaaggtctgaagaaattttgcaagcggttagggaacttctccatgacagttctttcaaatctcagccaaattgggtcactgttctagatggatctcaggaaggcgcattccagtgggttaccatcaattatcttttgggaaaattgggaaagccatactcaaacacagttggagttgttgatttaggaggtggctccgtccaatttgcattatggtttgctggcggctagaggggagatcttaaaagctggcgaaggcagtgattacagcgactgtatgttggaggggcatcttgggaaatacaattacggtggtaatacatttgaagcatcaggctcaccttctggtgctagttattccaagtgcagggctcttgcagttagagctcttaaagttgatgagccagcatgcacacacatgaaatgcacatttggtggtgtgtggaatggtggtggtggagatggacaaaagaatctttttgtggcctcctttttcttcgatagggctgccgaggctggttttgtggacccaaaagcagcagttgctaaggttaaaccttcagactttgaagaaactgcacgccgggtttgtaaattgaacttgaaggatgcacatgcaacctaccctgatgtctcagaggagaacattccctacctttgcatagatcttgtctaccagtacacattacttgtcgatggatttggcgttgatccttatcaagacattaccttggtaaagaaagtgccttatggtgattcgtatgttgaagcagcatggccccttggtagtgccattgagatcgcatcttcatcatagaaacagcacggcagtaatttttttttctttttttatataatatatataaaaatcttccatcactatagtttttggcttagtttactgatctgaagtagtgagcttacatcctgggtttgatgctaaggttttgccttgattcaccatttgttctcaattttccattctatttgtgtaggttcctacacattaacaacgtacacatggagtatagattgtagttctgtgc

SEQ ID NO: 101724 - DNA, 557 bp, Zea mays
  Clone ID: MRT4577_24282C.1
gggtacccgggcccccccctcgagtttttttttttttttttttttttttttttttttttttttttttttttttttttttttaaaaaaaacaggctttaaaacaaataaaaaaccgggacttacgtcctttcccccaggccaagggaaagaaaaaaaagccataatttccagttttttttttttttttttttttggggggaaaaaaaccaaccctcccaaactttttccccttttttttggggaggggttttaatttttttttttcggggggcaaaacaaaggggaccgacccccccccccgggggggggggggcccccccatccccttgtttaaccagctccttggggggaggctaccagggcccaaacagttaatattggcaaccggggcgggggggggatttttttttggaaaaacccctggggccaaattccggcgcccggggggaccccctattttaaaaggggccccccccgggggggacccccagctttggtccccttaagggggggtaaatggccccctgggggaaaacagggcaaaagcggttcccggg

SEQ ID NO: 101725 - DNA, 2143 bp, Zea mays
  Clone ID: MRT4577_24283C.1
ttgggaccctcgaggccggccctcgaggccggccgccatccggccggatacacacaaacgcgcccgcacccgccaacgccaccaccagtgacaagtcaagtccaccaggccgggccgcgaatctctgcgtccccttcgccaaccatggcctccttcttcgccgacgacggcgccgatgacctcccacgcaccacttcccaccccttcgactccgatgacttcggcgccgccgcggccgacggcgccggcgccgacggatacggcgggtacgcctctttcgccgaggggggcgtcgaggaggtggacgaggagatcaccgtcgagtccgatggggtcccgatccgccacgtctccggggggtactcgccctcgccgttctcccccgagctcgagcccaacggcggcgacggcccgatcctaccgccgcccaccgagatggggcgggacgagggaatcctcctccgcgagtggcggagaaaaaatgctatggaacttgagaaaaaagaacagaaggagagggagctacgtgcccaaataattgctgaagccgaagaattcaagaaagccttttttgagaagaggatacagaactgtgcgtcaaacatggtgaacaacagagagagggagaagatttttgtagccagccaggagaaattccacgccggcgcagacaagcagtactggaaatcgatttcggatctcatcccacatgaaatagccaccatcgagaagcgggggaagaaagacaaggacaagaagccatccatcacagttgtccagggccccaagcctggcaagcccaccgacctctcccggatgcgccatatcttggtgaagctgaagcatgccccaccgccacatatgttgcagcctccaccagcacctgctgctaaagagggcgcaaaggatggctccaaagaaggtggaaaggatggtggtgccaaagacggcgcggcagccccagcaaacgacgccaagcagcctgcagagggccaagaaaccagcaccgccaatggcccctcggaggccgagaaagagcagcctgcggcgtcggagtgaccggaaaggaaagcgtagcattacagaaacacaagaggcttgactgtcagtagatggaaacgtgtttttgtttctgatgatttcgcagacccgtttatcccgtactgatcttctgtagagatctgcatcaggatgcccttcgtatgagcgcagaacattcataatttagtatcaccacagtagtcgtatctttgctgtaaataaaaaaaaaaaaaaaggagctacgtgcccaaataattgctggagcacaagaattcaagaaagctttttttgtgaagaggatacagaactgtgcgtcaaacatggtcaacaacagagaaagggagaagattttgtagccagccaggagcgccggcgcagacaagcagtactggaaatcgatctcggatctcatcccacatgaaatagccaccattgtgaaacggggaaagaaagacaaggacaagaaaccatccgtcacagttattcagggccccaagcctggcaagcccaccgacctctcccggatgcgccatatcttagtgaagctgaagcacgctccaccgtcacatatgttgcaacctccaccagcacctgctgctaaagagggcgcaaaggatggctccaaagaaggtggaaaggatggtggtgccaaagacggcgcggcagccccagcaaacgacgccaagcagcctgcagagagccaagaaaccagcaccgccaatggcccctcggaggccgagaaagagcagcctgcggcgtcggagtgaccggaaaggaaagcgtagcattacagaaacacaagaggcttgactgtcagtagatggaaacgtgtttttgtttctgatgatttcgcagacccgtttatcccgtactgatcttctgtagagatctgcatcaggatgtcttggtatgagcacagaacattcataatttagtatcaccacagtagtcgtatctttgctgttttcacccctgtccagttgtgtcgtcactgagatgcctgtgatctcatacaagttgaggtctgaaactgttacgatgatatggtactgccctaataataatctgaagctgtgcaacaaacagcaatcttgcattgctc

SEQ ID NO: 101726 - DNA, 1313 bp, Zea mays
  Clone ID: MRT4577_24284C.1
ttgggtccctcgaggccggccggaggaactctcaacacgcccgccaacgccaccaccagtccaccaggccgggccgcgaatctctgcgtccccttcgcccaccatggcctccttcttcgccgacgacggcgccgatgacctcccacgcaccacttcccaccccttcgactccgatgacttcggcgccgccgcggccgacgggtacggcgggtacgcctctttcgccgaggggggcgtcgaggaggtggacgaggagatcaccgtcgagtccgatggggtcccgatccgccacgtctccggggggtactcgccctcgccgttctcccccgagctcgagcccaacggcggcgacggcccgatcctaccgccgcccaccgagatggggcgggacgagggaatcctcctccgcgagtggcggagaaaaaatgctatggaacttgagaaaaaagaacagaaggagagggagctacgtgcccaaataattgctgaagccgaagaattcaagaaagccttttttgagaagaggatacagaactgtgcgtcaaacatggtgaacaacagagagagggagaagatttttgtagccagccaggagaaattccacgccggcgcggacaagcagtactggaaatcgatctcggatctcatcccgcatgaaatagccaccattgagaagcggggaaagaaagacaaggacaagaagccatccgtcacagttattcagggccccaagcctggcaagcctaccgacctctcccggatgcgccatatcttagtgaagctgaagcacgctccaccgtcacatatgttgcaacctccaccagcacctgctgctaaagagggcgcaaaggatggtggtgccaaagacggcgcggcagccccagcaaacgacgccaagcagcctgcagagagccaagaaaccagcaccgccaatggcccctcggaggccgagaaagagcagcctgcagcgtcggagtgaccggaaaggaaagcgtagcattacagaaacacaagaggcttgactgtcagtagatggaaacgtgtttttgtttctgatgatttcgcagacccgtttatcccgttactgatcttttgtagagatctgcatcaggatgtcttggtatgagcacagaacattcataatttagtatcaccacagtagtcgtatctttgctgttttcacccctgtccagttgtgtcgtcactgagatgcctgtgatctcatacaagttgaggtctgaaactgttacgatgatatggtactgccctaataataatctgaagctgtgcaacaaacagcaatcttgcattgc

SEQ ID NO: 101727 - DNA, 470 bp, Zea mays
  Clone ID: MRT4577_24285C.1
tttacgcgtccgcacgaccaatcgcacctcgaccacaacaaccaatcgccccacgcccggttcaacgcccaattgctccacgaccagccccacaaccgatcgcacctcgtccagctccacgaccaatcgccccacgaccacaacaaccacttgctccacgtccacgaccacaacaaccaatccaaccaatcccgactcgtcaagaaagcgaacaagacgaaggtgaatacgatgacggtgccagcaacatcgaagaccaaactgttcaaacttcgaccagtcaattgcaaaacgtgtacgctgccccattcgcagccgcttctcgtaccaagttcgttgtgattccattgggcaaccgtcgtccaaacaacttgaacgaattgttgcgtgccggtgcaactcaatccggcgtcgaattgaacgaccaacaaatccaaaacttgatgcgcatgtcgactcgcgttcaataa

SEQ ID NO: 101728 - DNA, 880 bp, Zea mays
  Clone ID: MRT4577_24286C.1
ccggccgggaggagcaaggagaagaaagcaaagtgcagagcacgagcagcagcaccagtccaccaggccggcgccgcccaaaatctccgcgtccccccaaccatggcctccttctttgcggacgacggcgccgacgacctcccgcgcgccacctcccaccccttcgactccgacgacttcggcgccgccgcagccgacgacgctagcgccggcgggtacgcctccttcgccgacggtggcgtcgaggaggtggacgaggagatcaccgtagagtcctacggcgtcccgatccgccacgtctccgggggatactcgccctcgccattctcccccgacctcgagcccaacggcagcgacggcccgaccctgccgccgcccaccgagatggggcgggaggagggaatcctcctccgcgagtggcggaggaaaaatgctatggaacttgagaaaaaagaacagaaggagaaggagctacgtgcccaaataattgctgaagcagaagaattcaagaaagctttttttgagaagaggatacagaactgtgcgtcgaatatggtcaacaacagagaaagggagaagatttttgtagccagccaggagaaattccacgccaacgcagacaagcagtactggaaatcgatctcggatctcatcccacatgaaatagccaccattgagaagcggggaaagaaagacaaggataagaagccatccgtcacagttattcagggccccaagcctggcaagcccaccgacctctccggatgcgccatatcttggtggagctgaagcacgctccgccgcacatatgtgcagcctcaccaccagcacctgctgctaaagagggcacaaaggatgcagcaccgtggcggagggcaga

SEQ ID NO: 101729 - DNA, 1415 bp, Zea mays
  Clone ID: MRT4577_24287C.1
aattcggcacgaggcgccaacgccaccaccagtgacaagtcaagtccaccaggccgggccgcgaatctctgcgtccccttcgccaaccatggcctccttcttcgccgacgacggcaccgatgacctcccacgcaccacttcccaccccttcgactccgatgacttcggcgccgccgcggccgacgtcgccgccgccgacggatacggcgggtacgcctctttcgccgaggggggtgtcgaggaggtggacgaggagatcaccgtcgagtccgatggggtcccgatccgccacgtctccggggggtactcgccctcgccgttctcccccgagctcgagcccaacggcggcgacggcccgatcctaccgccgcccaccgagatggggcgggacgagggaatcctcctccgcgagtggcggagaaaaaaatgctatggaacttgagaaaaaagaacagaaggagagggagctacgtgcccaaataattgctgaagccgaagaattcaagaaagccttttttgagaagaggatacagaactgtgcgtcaaacatggtgaacaacagagagagggagaagatttttgtagccagccaggagaaattccacgccggcgcagacaagcagtactggaaatcgatttcagatctcatcccacatgaaatagccaccatcgagaagcggggggaagaaagacaaggacaagaagccatccatcacagttgtccagggccccaaacctggcaagcccaccgacctgtcccggatgcgccatatcttggtgaagctgaagcatgctccgccgccacatatgttgcagcctccaccaccagcacctgctgctaaagagggcacaaaggatggcagcgccaaaggtggtggaaaggacggcgccaaagaaggcggcgcggcagccccagcaaacggcgccaagcagcctgctgagagccaagaaaccaccgccaatggcccctcggaggcggagaaagagcagcctgcagcctcggagtgaccggaaagggtgtctttattaagccatacacaagagccttaactgtcagtagatggaaaagcgtgttttatttcagataatttccagactcgtctttcccgcgctgctgatctttttgtagaggagatctgcatccggatgtctttacatcatagcgcagaacattcatgattgtatcaccacagcagttgtatgtttactgctttcccccttgcccaagtgttgccttcactgagatgctgcctgtgatatcaagttcagacctgaaactgttactgagagttcgactgaataatactcctatgatatgtcaccgcgctaataaaaaaaaaaaaaaaatttgcggcccgacaattgaagctgtgcaacaagcaacaattttgcattaaaaaaaaaaaaaaaaaaaa

SEQ ID NO: 101730 - DNA, 364 bp, Zea mays
  Clone ID: MRT4577_24288C.1
gaaaaaacagaacgacccacgcgtacgccgacgcatcctcatatatctcccctcactttttttgacagcctgtccacacactaaggacctctggttttcatacacaacgctgtccgtctctttttcattctaaccgtgctataatccttatgcacacctaacacgacaacaaccaacaacgaagaaactgcagcagactctacatgcgcttatagaatcaacccaggaaccttcgacatctgcaaactcggatcgaacactgacgcttagacgtactatacaaagacattccatgacaccttgacgttaaacaacgaatcgatcgcaacccccactgttattatccctacagccgactacctac

SEQ ID NO: 101731 - DNA, 1756 bp, Zea mays
  Clone ID: MRT4577_24289C.1
gcttgcgccaggagtagcgcaccgacccagcgctggtcgccctccgcgatgaggtccatgccggctccaaggccctgccatgggcgatcgtcgacgatctgctacagtacagcgggcggctgtatgttccgccggcctccccactccttcaggaactgctgttggcggtccatgatgcgggacatgagggcgtccaacacaccttgcatcggatcaggcgcaatttccattttcctaacatgaaacggattgtgcaggactttgtacgagtgtgctccacatgccagcgctataaatcagagcacctccaccctgtcggcctcctcctacctctaccagtgccacgggggtctggacggacgtggcactggacttcgtcgaggcgctttttaaagtgcgtggcaagtctgtcatcttgactgtggtggacaggttcaacaaatactgccacttcctccccttggcgcacccgtactccgccgtgagcatggctcaagctttcttcaccgacatcgttcgccttcacggcgtgccgcagtccatggtgtcggaccgtgactcggtcttaacctccaggtttttgcgcgagctgatgcgggtaaggcttggcgcttaaagatacccttccctagaccccgcacagtgtgggaagtctacgacactaggtggagtacatgctgcgatggtgggatccctgcatcctactccagttgccacactgccatttctcgctccacactctgctgtggtacctttctgtgaaggggtctacaaatacgccacagcttgggacgctttgagaaaagatgctgcagtattaactcaagatgtaacacttttggcagaagatgctgcacagaaaagcgggatcaccatcgaacaagtcagggataggttacggtcagtgttgtctttgactgatgtcactcgatttccagtcccaaagaacccacaggcggtcatctttgttggtgcaacggacgatggttatattcccagacattcagtgatggagctccagaaggccgggccggggtcaccatgtatcaatttgaatgctacatcttctgattgtctgacatgcatgtcaatcagctaggcaatttggcagttcgctcgcccgcggcgcctccagcccgcccgcccgttctgtgtcgaaccatgccgcagcaaggaaaaaagcaaagcaaatcaaagcacaacgagaggggggagaaagagagagagagagagccatggggcagtgttcgtcctcccagcacccagaagcagagcagcagaagcagcagaagcaggctgcctgtgttgacatccagaaaaggcaggagcagctgcggaagaaggcggctgcgcacatgaaccagccataccaggcatctagcaatgacgagctggtcctcctggtgtcgctggattcaatcaccaagattgggtgaattgttcatctgcggataatcatctctagcttgctgctgaccattacggtgaacacccacctcgtctctcctaaaatgaaggatgaagttgacaggccctctttctctttgcttgtgtcatcaatatgtaaacactcactagctaataaagctaaaaataagactgcctccatttgtcgatttacgaaattttatcacttaaacctgtctgtgtatttcagcaaatgttttttgtaaaccgtccatgtatatgttgagaaaataatcacggagaccgccctttcgtatcaaaaaaaaaaaaaaaaaaggcccctagggcc

SEQ ID NO: 101732 - DNA, 2090 bp, Zea mays
  Clone ID: MRT4577_2428C.1
cttgtgttctcgtaggctatgccctccccgatggctcgcgtcctgcaccgccgtctcctcctcctcgtcgggccgtctgccagaccgtcgtcaccttagccgtggtcgcttctctccttcgcccagctgccgcagtgcgcccatttgttttggttctctccggtgaggacttcctcaaggatccggccgcgcacccgtcccttccctctgccgactccgacgacgacgaagggtgggacgacttcgccgacgaggcaccggccgccgacccgctgctctctccgtcctcctgggcccccctcctcgacccaaccatctctctcccctctggcgatgagacggactcgccggccgacgcgctcttcgtcgcgggcacccgcgcgatgctatccgcagcgtccgatggagacgacgcggcgttcgccacggctggcgcgcagatcgaggccgcggcagaggcggggcacccgggcgcgcagtctgcgctcgcgttccttactggcgccgggtcgacgcgtctggcatcccggtcgctcgcgttcctgctgcacaagttcgccgccgacgcaggagatctccagtcaaagatggacctcgcgtactcctacttccgccaggagaggtggagaagaaaaacctgacaaaagcaaaggaacttttcgaacttgcagccgagaataaggaagctgggggacattataaccttggtgtgttgtatcttaagggtattggtgtgaagagggatgtaattagagcatgcaatctcttgcttcatgcagttaatgctgggcaaccaaaagctatttatcagttggcgaaactgttccagaaaggcattggtcttaagaggaacctccatatggcaacaatgttgtacaagtctgttgctgagaggggaccctggagttcattgtccagatgggctttggaatcttatttgaaaggcgatgtagggaaagcattgctcttgtattccagaatggccgatcttggatatgaggttgcacagagcaatgctgcctggattcttgataggtatggtgatcaaagtatttgcatgggagaatctagtttttgtacagatatggaaagacatcttcgtgcgcatgctttgtggtggcaagcatccgagcagggtaatgagcatgctgcattgttgattggcgatgcctactactatggtcggggcgtagcaagggactatgaacgtgcagcagaggcatatatgcatgctcggtcacagtctaatgctcaggctatttttaaccttgggtacatgcatgagcatggtcatggacttccccttgatttgcacttagcaaaaagatattatgatcaagccgttgaggtggattcagcagctaagctccctgtcatgcttgcactaacaagtttgtggctaaggaagaactacgcagacagttttttggttcgctttatcgattcacttccagaaatatatcctgttgttaacaaatgggtggaagatgttctcctggatgaagggaatgcaacaattttgactctctttgcttgccttgtaactgtcctctacttgcgagagcgtcaaaggcgtcaagtggcagcagccaacccccaacaacctgatgatgtggtcatgtaaatgtctgttttcatgacatgtgcagccctgttgcttgagggaattggagatgtaaaatggtagctccttcacatgactcatgtacactaaattgagtaggagacatgaaaaccggtggaaactcagacaatgtttcctgcctggtgaatattcacctttccaagacttgggagctatgcttgtaaaggacaacatttcttggaaactggctgcttagaaatattgtttagaaatatcacagatgtttaaaagtagacttttccccccttgtgcatttgcacggccatcgaatttcgacaagcacacactgatagcatatctggaagaggcaactttgcaattggtagtttaggggtcagattaactttccatcagcatttaaacacactgcatagttttcgctggatgttttaattgaaaatgggcggtgcaaaactgcatattgggagaaaaaaaaaaaaaaaaa

SEQ ID NO: 101733 - DNA, 712 bp, Zea mays
  Clone ID: MRT4577_24290C.1
tgggaccctcgaggccggccgggccgggaaggaaaaagaaagcaaatcaaagacaacgagaggggggagaaagagagagagagagagccatggggcagtgttcgtcctcccagcacccagaagcagagcagcagaagcagcagaagcaggctgcctgtgttgacatccagaaaaggtttcttcaaactagtgtcttcctggcatatatatatagtcgagcgactcaaaccatgcatggtgggtaaggttttcttcttcttcttcttccaagctgcaggcaggagcagctgcggaagaaggcggctgcgcacatgaaccagccataccaggcatctagcaatgacgagctggtcctcctggtgtcgctggattcaatcaccaagattgggtgaattgttcatctgcggataatcatctctagcttgctgctgaccattacggtgaacacccacctcgtctctcctaaaatgaaggatgaagttgacaggccctctttctctttgcttgtgtcatcaatatgtaaacactcactagctaataaagctaaaaataagactgcctccatttgtcgatttacgaaattttatcacttaaacctgtctgtgtatttcagcaaatgttttttgtaaaccgtccatgtatatgttgagaaaataatcacggagaccgccctttcgtatcgaaaaaaaaaaaaaaaaaggcccctagggcc

SEQ ID NO: 101734 - DNA, 2644 bp, Zea mays
  Clone ID: MRT4577_24291C.1
cggcgggcgggacttgagcggagagcgaaagcgaaaccggcgccgtctctccccaccctcgcggtcgtcgcccaccgtttttattacatcttcttcttggtttcagctgcgcacagggaatccgtgaagctcctgtgccagacacagagagagcaaaccgtgcagcggtgcaggccagcgcgatccagctcccatcagtgggcgcgcccgccgtctcttgcgaccctgtcttcttggtttcttggcggggtcgtcctgctcgtgtcgcgctgcccacaacccgcgttctgtcgcggcatccgccgtggatcttggcccgggttgtccctatatcacgcagaaaaaagggccatcccccccccccccccccttcgccctcgggttcgttactgagtgtgccggagtggtattcgtgttccgccgggtgccgaggtggcctcgcggtcttctgccgtctcatcgtcgcctgctccccgtcgcgttcatcccgaggcatatcttggtcttgtaattgtataaaaagaaggtttggggaatcaggtttatctaaccagtggacatggtatcagttaatcttgggttagttcattatgtactggaccacatatatggaacacttcttcatcgcaccaaactaggaacaccatttttctcaaaaggatggggaggtaccaaacttgatttgctagagaagatggtgaagcagttgtttcccgaggcacgttgccaaaactggccaccaactgctgtgcagccaatgtggaaaacagtatgggagacaaacaattcttgtctgcgagaaggagttttcaggactacatgtgatgagcgactaatcgatgcattgccacctgagagtcacaatgcaagagttgcttttcttacccctaaaaatgttacacctgagaagatgtcatgtgtggtccatcttgcaggcactggtgatcacacatttgagcgcaggcttcggctgggtgggcctcttcttaagaacaatattgcaactatggttcttgagagcccctattatggacagcgacgtcctagcatgcagcgtggtgcaaagctccagtgtgttagtgatctgttacttctagggaaagccacaattgatgaagctcgcagtctcctgtactggctgcagaatgaggctggttacggcaagatgggcatatgtgggctcagcatgggtggagtacatgctgcgatggtgggatccctgcatcctactccagttgccacactgccatttctcgctccacactctgctgtggtacctttctgtgaaggggtctacaaatacgccacagcttgggacgctttgagaaaagatgctgcagtattaactcaagatgtaacacttttggcagaagatgctgcacagaaaagcgggatcaccatcgaacaagtcagggataggttacggtcagtgttgtctttgactgatgtcactcgatttccagtcccaaagaacccacaggcggtcatctttgttggtgcaacggacgatggttatattcccagacattcagtgatggagctccagaaggcatggccaggctcagaggtccggtgggtaacaggtggccatgtctcctctttcttcctccacaacgatgcattccgcaaggccatcgtcgacgcccttgatagattgtaacaccagaaggtgagagagaggccatccttgtgatggcactttatgttgtgtgacatttctgaacttggggttgcggcatgagctgaaccctctgtaactgccaacctaactgctcttagtgacgctgagattggaggtagggtggctgtacatgacaattgtagaatgtagcaccccattatttggcaattgttttgcaaaaaaaaaaaaaaaaaaaagcaaatcaaagcacaacgtgaaggtgagaaagagagagagagagagagagagagctatggggcagtgttcgtcctcccagcacccagaagcagagcagcagaagcagcagcaggcggctgcctgtgttgacatccagaaaaggtttcttcaaactactgtcttcctggcatatatatatagtcgtcgagcgactcaaaccatgcatggtgggtaaggttttcttcttcttcttcttccaagctgcaggcaggagcagctgcggaagaaggcggctgcgcacatgaaccagccataccaggcatctagcaatgacgagctggtcctcctggtgtcgctggattcaatcaccaagattgggtgaattgttcatctgcggataatcatctctagcttgctgtgggtgctagagtattaatcttttttgatttccaactacataatcagtattggactttataacaacgtcatcttaatttgcccctttacaggctgaccattacggtgaacacccacctcgtctctcctaaaatgaaggatgaagttgacaggccctctttctctttgcttgtgtcatcaatatgtaaacactcactagctaataaagctaaaaataagactgcctccatttgtcgatttacgaaattttatcacttaaacctgtctgtgtatttcagcaaatgttttttgtaaaccgtccatgtatatgttgagaaaataatcacggagaccgccctttcgtaccaaaaaaaaaaaaaaagcggccct

SEQ ID NO: 101735 - DNA, 1332 bp, Zea mays
  Clone ID: MRT4577_24292C.1
gccactagctaggcttgctcttgtattattgttccccggcccccgtaccgtacgtgccagcaaataagtttcatttctagaaggaagaatagcggggcgtcgtccagtgtcactgccacctgcacctgcgaggaagaaagcaagcaagcgccactctcctctcactgctctagctatttatacccccgtgccttgcgtctccttcctctagagtcctccaccccaccttccctacctatctatcctacagcggctagtctactcaactctgctctgctcgcgcggcgatcgaggcaccgtcgtcgccaccatcagcggctagcaccgatcgagccaccggccgatcagatcggccggcccaacgaccatgctggcctcgctgcggtacctggccggcacggcggggccgagcggcttcggctcgcggacgaccgccgaggaggccgcggccggcgacctgcgccacgtcaccgccatcatcacgggcgccacgtcggggatcggcgcggagacggcgcgggtgctggccgggcgcggcgcgcggctggtgctgccggcgcggagcctcaaggccgccgaggaggcccgcgcgcgggtgcgcgccgagtgcccgggcgccgacgtcgccgtgctgccgctcgacctcagctcgctcgcctccgtgcgccgcttcgtcgcgcggttcctcgacctcgggctccccctcaacctcctcgtgtacgtgtgtctgtccaactttcttgctttctttcttcatcctgctgctgctgcatccatcagtgagcagtccacctgccaaggcagcagcagcaacaactgcggctaacttacatggactgacacatggttcacgtgcgtgcgtacgtacgtgcagcaacaacgccggcaagtacgccgaccgtttcgccgtgtcggaggacggcgtggagatgaccttcgccaccaactacctgggccacttcctgctcaccaggctgctgctggacaagatggcggacacggcgcgggccacgggcgtccagggccgcatcgtcaacgtctcctccaccatccacagctggttccccggcgacggcgacgccctcggctacctcgaccgcgtcacacggaggaagataccgtatgatccgacgagggcgtacgcgctgtccaagctcgccaacgtcctgcacaccagagcgctcgccgaccggctcagcgagatgggcgccaacgtcacggccaactgcgtccaccccggcatcgtccggacccgtctcatccgcgaccgcgacggcctcatcaccaacacagtgttcttcctggcgtccaagctcctcaagacgattcctc

SEQ ID NO: 101736 - DNA, 148 bp, Zea mays
  Clone ID: MRT4577_24293C.1
agcactagtctgcaaagttctgtaattaacagtctttgaacctaggccggcgtgatgatgtcacagatatggcagggaccagctaaacgccaggatgccctgctctgagagacctatacttgtgcggctatgttcctcattacacacg

SEQ ID NO: 101737 - DNA, 469 bp, Zea mays
  Clone ID: MRT4577_24294C.1
tcgaggccggccgggacgcttccaacgtcctctgtttgagagatgactagtcacctcccggacctctgctgatagagcggaacaaagagattaacatctcgtaggcgctaccgcctccaatgaatgtctgcggaaatggatgcgaccgagaaggccccggcgtcgtagaaaccctaaaaggcgatgtttcaagaccatcttcatctcctgataccgaggatacgaagcatccactgactcgatatgtggagagccttcttatggccgctactctagactctcgtcttgctgaagagcctgacagaccaagatcattgaggggcccgaggcaataccactatgagctcgacatctgaagaaattccaccgatcctcgtgcccatagccatatgtatatccgtcaagcagccgcctgtcgctgctgcggctacatgtgctccaataagaagctacatcatatgccatgcga

SEQ ID NO: 101738 - DNA, 326 bp, Zea mays
  Clone ID: MRT4577_24295C.1
ccggccgggaacccccagtctcagatcacaccaccaccatggggagcataccggcggcggcggcggggccgggcacggagctggaggacctgccggaggacgcgctgctgagcatcctaatcctactagtgtcgctcgtctgcctctctgtccctacttgtcccgtggccccctccttttcttggaggcaccgaccgctgcccatgatccgccgactgctcagatctcccaactagctgccttttttatcctggacgccggcgtgggtgcccatttcgttgcgtctagggttgttacttccccgcgcttcgcgatcgcccaaccat

SEQ ID NO: 101739 - DNA, 421 bp, Zea mays
  Clone ID: MRT4577_24296C.1
gggaccctcgaggccggccggggtccttctctccgcctccgtctccgtccccgctctcgtccacgaccactcctcgctgtcaccactcctgtcacctcttcccgcgccgacgcagccgacatggaccccgtcgccgcatggggtataaccccggtcgaggctagctccacgcggagatctacgacctcctggagcgcgataaccggggacggcgtctcggtatcgagctcatcgcctccgagaacttaccctccttccacggcatggaggcgctcggctccgcgttcactaacaagtactccgagggcaggcccggcgcccgctactacggcggcaacgaccgcatcgaccagatcgagaccctctgccggccaccgcgagctcgctgccttccacctcgacgccgcgtcctggggcccca

SEQ ID NO: 101740 - DNA, 542 bp, Zea mays
  Clone ID: MRT4577_24297C.1
tttctttttcttttctttttcttttttcttttttttttctttttttaggccccacccccccaaaaaaggggaaaaaaaaactggggttggaaaaaaactcagggcccgggacaggtgattccacccttggttttttgttaggaaaaaaagggattaaaccccctccctaaattggaaggccaaaccgtcccctcaaaaaaagggttccaggggtggggttaaaaactacaaaaaaaaacccctttgggtttttttaaaagggggggggaaaggtaaattttgccctttccaaagacccctaaaaaaaaaccggggggggggttccctagggcctactccgggggggttttttaccccagggtggaagcatccttttaaccgggggctggggggggccccccaaaattgacctggggcttgaaaattgggcattgcccctgtgggcccacccatgggtcgatgccttttacgggaaactgcaaaacactggggcaaggcggggggggtttttaaaaaagaaaacccaccattgatttgtgttt

SEQ ID NO: 101741 - DNA, 240 bp, Zea mays
  Clone ID: MRT4577_24298C.1
gcaagaactcctggagctacagggacagggagccatcattcctgcctgggaatcctggaagacttcctgcaggagtcagcgttcaatcttgaccttgaagatgggaaggatgttctttttacgtaccaattcttttgtcttttgatattaaaaagaagtacatgttcattgtagagaatttggaaactgtagaagagaatcaagaagaagaataaaaatcagctgttgtaatcacctagc

SEQ ID NO: 101742 - DNA, 365 bp, Zea mays
  Clone ID: MRT4577_24299C.1
ctcacgcgttcgtccacgcgtccgaccacgcgtacggaaaacacacggtggctaggggggctagatggaagaacgctgggcctaaaatccggtggccctaagaatagcgtgagaggatgaacgtgtaaaggagggaatcgtattgcgggaccaactccgggggtcagcgcgctggcaaacgtgaacgagaaggggggcgcctccaaggaccttaacgcgaacagcatgtacatcttggaaggtgggctacgggctattgagtataaacaattccaaggcatcaaggacaagggatatccatgggggactgactatataaggatatggatataactaacaagtatttatgttgatcgaactctacc

SEQ ID NO: 101743 - DNA, 673 bp, Zea mays
  Clone ID: MRT4577_2429C.1
cattgggtacctcgaggccggccgggatccgtctgctcataggacttgatacatacgccacgtgacgcgccgacgctcctgtcctgcacttttctaccacctgaatgtgcaagctcgcaggatcgacaatagcacgatgcgctttcttcctgcccgcctgcctgcctagctgcctgttgtcgatgctcacgaagcctcccgccccagtgccgccctgccctctacggtgtctgcccccaaaaaaacccagcgcacgacataaaagaagccgccaaaaacccccgccaaggagaccacgcatgccactgatgggatcactcgataccttcaacccggagatggtgctagctgcgatgatccaacatgcatagaaccatgaactcttaagctatggtggctgaaagatgccgacatctggtagctctggttcatagcctacatacctgttgtgtaatgcgtcccttcgagaaactgacacatcccggattgtggccatcactcactgtgtgtctcacatatctccacaggcatatgaccaggcgtgagtgcagctggctgccggtggaatcgatcgacccttgtgcctgcatgtataagatgtctcctcaggagaccgagctgcatctagatgatattgctaacgtcacggcatgtgctgcagatctcagccact

SEQ ID NO: 101744 - DNA, 240 bp, Zea mays
  Clone ID: MRT4577_242C.1
gatacaccagaactgggggaattttttttagcaaagactctgcaaaactcgaagcctttgggccttccttccgaagaggacacctgtgctcatagaagggaggtagtgggtgacgctcgcatgacccataaagaacggataaataggtgcccacacgggcgacgcgagcttcgaacacttctcctagagtcaacagccacacaggagctgcctctgctataacattgggacggacgaatt

SEQ ID NO: 101745 - DNA, 657 bp, Zea mays
  unsure (1)..(657): unsure at all n locations
  Clone ID: MRT4577_24300C.1
gccggccgttttccaaatcggacgcactcctcgcgtcgttcgccgccgccgcaccacttcctctctcgcgctaccgctcgctctcctgctctgcttgggcctaccactgtaccgtcgtctccctcgcttctcaccagcgccccatgcctcgccgctgctcgcagcgctgaggtcgaagatcccacagtcatggatggcgcagcgatgtcgctgacttcgtacgagggggctctacggcgcgacaccgactgcgaccaaattctcgcctcgcctcacacccaccggacgcttcttggcctcttccactctgtcgtccttgcagccgcggcggcggactccgacagctccacaaagtcatccgaagctcattcattcagcaatagcgacgttaagactgttcttggttctggaacacaatatgctaatggatttgcagtggcagatattgaacgatcatctctaatcctatgcggtaaagcatttgctgattcagctatagtgaaaggtgcaattactgctatgatagccctgatactgtctgcaagaggaggcctcccggntccaggatggattctgagctttggnggntctattggattattggttgccccagtgganaatcatgatgtcctgcgtagaaatccacattgctctatt

SEQ ID NO: 101746 - DNA, 536 bp, Zea mays
  unsure (1)..(536): unsure at all n locations
  Clone ID: MRT4577_24301C.1
ccgcccacgccgtccggnaacttcctaacaatgaattgcttctccanaaacacttcatggctgtaatttcgtctgtttggagatcaaatgtcaccgtgatacctcctgttttacgaacacttactctagtgcattacatgtgttttctcctgtgaagaaacctggtggatcatgtgagaactggcccatggtaaactttagaccaagcttcaatctagttaggaaagcccttgcagatgttcaggctaagtctacactaatggtgattccacctccgtcaaggaatcaggaatacccatgcaattatttagaattagagttagatttnttgaaagatcaacatgcttatgatgaagacatcccatttgtagtaaatgtgtncatacaggaaccagaaccatttaaacagacgccagagccagtggaacaatngttgttgtttgnacttttttgtagacagggtgagaaccgacttaggatagnattagaaggttgttatgatggtgaaagtttttattggggattatnaggttttt

SEQ ID NO: 101747 - DNA, 334 bp, Zea mays
  Clone ID: MRT4577_24302C.1
gcggcttgtgcgagcaagaggggaaaacccataacctgagcaccccccggcctggtcgccgactgccgacggagtagagagatggcggtggaggaggaggactaggtctactttgggggtgtttcctacgaggccatggaggagatgatttgggacgcctgtggttactacggtacaatggacttacgaaaggggactaatgatcaagctgtaaaaggcaagagatactgtttcgttgctcttaatctccatgcgctgatgagcaagcaattgcggtcatggacggcgagaaattaacaaactgtattgctcgagcaaatgaagtgtgatacaa

SEQ ID NO: 101748 - DNA, 447 bp, Zea mays
  Clone ID: MRT4577_24303C.1
cgacattcaggatgtggtgacaaaattggcaggcgatgctgcccatggagatggggacaccggttgccaggatggcgtgacgaaggtggcatacggcgcaacccatggagatggggacgttggttgccaggacggtgtgacgaaggtgacatgcggcgcggtccatggagatggggacgccggttgccaggatgacgccgcgaaattggcagcagaagccatgggatcagatcgaaacccaagctagccgataccagctactagaattatctttgcttctgagagaatacatgtctgtttttcatcacaactactagaattcaagaaaatcatcttgctatagattggtgtctattatgtacatggcactgaagttgcaactattcacaaactgcacagatgctgaaatttctcttcttggttggtttatttttctggacatgtttt

SEQ ID NO: 101749 - DNA, 467 bp, Zea mays
  unsure (1)..(467): unsure at all n locations
  Clone ID: MRT4577_24304C.1
tccgcattcccggtcgccccgctccgnccacgcgtccggtttgccacgctcatcaatagccatggtgaacctacgcctactacaacaacaacaacagttgcaacagttgtgccggagcgtgggcggcgcggggcttgaacgacactggtgcgccacccattgctttggcaaagtactgctgcgggggcacactttgcacagttctgccgcgctcagtcactagtcatggagaaccctatcgcctactacaacaggacatttgtttttctatggcgctcgtatgggcgatgcacctcatacctgcagagctggcgttgcagatcactagttgcacaacatgaccagctcttattaagctatcgtggcaaaccatgctgcctacttgttgcaactacttccattttctcaatgcctgtggcggattctgctgcgtagctactacttcgatgaaagcaactgtttccact

SEQ ID NO: 101750 - DNA, 266 bp, Zea mays
  Clone ID: MRT4577_24305C.1
ggccgacgtgcccgcctctgacgctacatgatcacagactgtatcctcgcactcgcatgccctggcggtgcggcactctttgtactgtagatgatgcgaccggctgctgactgctttgggtagaccggaggacgactgagagcataagataggggaacctaagatgggattggaataaaacgctggtagcgtgaaataatacacttgtgaagtaggacagcaggtggatggtaccacactcctgatgactctcctgatgagactgg

SEQ ID NO: 101751 - DNA, 243 bp, Zea mays
  Clone ID: MRT4577_24306C.1
gatcctgatctaaaccgggaaatcaatacacacgacaccttgttttacgtgccagactatgtcgccctcagggagaagtacaatgtccacgggcacgcggggaagcactccgggcaaagcatccatagtcttgtccaggtatgagaggagccactcgtatcatggttgaccacaagcacccttttttcgtgtacacgcccaaacatttatcaacacattatgtaagaccaaactctataaaac

SEQ ID NO: 101752 - DNA, 228 bp, Zea mays
  Clone ID: MRT4577_24307C.1
ggtaagtatgacatctttacctgtagatgtcacgcactgcttagcctattttgtttgtattcttgctcgctcgctggagtatttttttttttcaaacatcagcgttagaatgatgattttccattttcgacaggactcgctgctgactccagagtctccattttatctagacggacagggtggtttgctccaatatgtagagaagacgctgaaagagaacatgcacac

SEQ ID NO: 101753 - DNA, 1269 bp, Zea mays
  Clone ID: MRT4577_24308C.1
cattgggtacctcgaggccggccgggaacaaactggaccactaaaggccgtggcattggtttggcacaacaaagtaatcctccgaagaaggcttcactgaagcctctacattgggtgaaagtcacgagagcaatgcaagggagtctctgggctgatgcccagaaacaagggaatcaggctaggtctcctgatatcgatttatccgaactggagagcttgttctccactgcagttgtaaccagcacaagtgaaaagggggcaacaagacgtggttcagctattaacaagccagaaattgttcacctggttgacatgcgacgagcaaacaattgtgagataatgcttacgaaaattaaaatgcctctacctgatatgattaatgcaattttggctctggacacttctgttcttgataacgaccaagtggagaatctcattaagttttgccctacaaaggaagagatcgagatgttgaagggttataatggcaacaaagaaatgcttgggaaatgtgaacagttcttcctggagctgatgaaagttccacgtgtagaggccaagctaagagtttttgctttcagaattactttctcaacacaggtagatgaactaagaactaacctaaccaccataaacgatgcaacgaaggaggtcaaagaatctctgaagttacggcagataatgaagaccattctcacattggggaatgcattaaatcaagggacagcacgaggatctgctgttggcttcagattagacagtctccttaagttgtcggatactcgatctagaaacaataaaatgacgctgatgcattatttatgcaagcttcttgctgagaaaatgcccgaacttcttgattttgacaaagacctaatttatctggaagcagcttccaagatccaactgaaattgcttgcggaagaaatgcaagcaataaacaaagatcttgagaaggtggagcaggagctagctgcttcagaaagtgatggtgcgatttcagttggctttcgtaaggcattgaaaagctttcttgatgcagcagaagctgaggttaggtccctcatttccttatacgctgaagtgggaaggaacgctgattcgctagctcagtattttggtgaggatcctgcacgctgcccgtttgaacaagtgacatcaattttagttattttcgtgaatatgttcaaaaaatcacgtgatgaaaatgctcgaaacgctgaggctgagaaaaagaaactataaaaaaaaaaaaaaaaaaggccccta

SEQ ID NO: 101754 - DNA, 1082 bp, Zea mays
  Clone ID: MRT4577_24309C.1
ttttcgcgtgggctgtgataggtcaggtgtctgcagatacaagagttgatatgaacatggcatcacatacctcagctccgattcacggggatagaagggttgatgcggatatagcaccaaatgcgccagccttagtccatggtgataccatgacatctaatacaactgccctgattcacagggacagaagagttgagataaaaatgccgatgactcaccttattcatggagagggaagacttgacatgaacatgacatctcctcacttgatacagagggaaagaagagtggacatggacatgaacatggcatcacctcacctgatacaggggggcagaagaattgatatgaacttgtcatcaccccacttcatacacggtgacagaagagttgatatgaatctggcatctccgcatttgatacatggggacagaagggttgatatgaacatggcatcccctcacctgatacagggcgatgccagagtggatatgaatatggtatcgacttctcagaatgggatgcacactttcgatttggtggatataaacctggagagtggctctatgccgatggccgcaacagattttatgcaaatgcacccacacccagcagtttaccatcccaaacagcttgttatgagagatcaggtgatagatgcaaataagagaccaaatatggaatctgacacttattttatgggaggcagtatgcatgtggggtagtttgtctacttctgtgttcctttatgttcggaattcagagaggcatccttcctttacatcgacatgtaatcatgcatgttcttagagctggcagtacaactaaacagctaggccttagtattgcagatcaaacttgactgttggtagttctattgtaaccttttacctttttagcagttgtagcaagctggatgcccattatcttgtgcatagtgaataacctatcttaccatctagttagaactttggaaatgagatggctttagatgcaagattctgctgacatttctggtttcttttgttgactgataatatacatttgctgcatgcctatcttgcaacctattccttatggtt

SEQ ID NO: 101755 - DNA, 901 bp, Zea mays
  Clone ID: MRT4577_2430C.1
gccggccgggtcggggagttgtcttaggcatgccttccccgatggctcgcatcttccaccgccatctcctcctcgccgtcgtcaccttagccgtggccgcttctctccttcgcccagctgccgcagtgcgcccatttgttttggttctctccggtgaggacttcctcaaggatccggccgcgcacccgtcccttccctctgccgactccgacgacgacgatgggtgggacgacttcgccgacgattcaccggccgccgacccgctactctctccgtcctcctgggcccccctcctcgacccaaccatctctctcccctctggcgatgagacggactcgccggccgacgcgctcttcgtcgcgggcgcccgcgcgatgctatccgcagcgtctgatggagacgacgtggcgttcaccacggctgccgcgcagatcgaggcctcggcagaggcggggcacccgggcgcgcagtctgcgctcgcgttccttaccggcgcagggatgacgcgtccggcatcccggtcgctcgcgttcctgctgcacaagttcgccgccgacgcaggagatctccagtcaaagatggccctcgcgtactcctacttccgccaggagatgtatgaagaagctgttatactatacgctgaacttgcagaagctgccctaacaagctccttgatatcaaaggagccaccagtgattgaaccaatccgtcttcacagtgggactgaagaaaataaagagggcttgaggaagtcccgaggtgaggacgatgaagatttccaatcacagagtatcaggcacagcgaggcaacgctgccaacatgtacaaattagggcttctgtattatattggactacgtgggctccgccgtgattatggaaaagcatttcattggttttct

SEQ ID NO: 101756 - DNA, 825 bp, Zea mays
  Clone ID: MRT4577_24310C.1
gcacgagtgaccgccggaacaccctaggcaatggagcccaaatccaccacccctcccccgccccccgtgatgggcgcgcccatcgcgtatcctcccccgcccggcgccgcgtaccccgccgggccgtacgtgcacgcgccggcggccgcgctctaccctcctcctcccctgccgccggcgcccccctcctcgcagcagggcgccgcggcggcgcaccagcagcagctattctgggcggagcaataccgcgagatcgaggccaccaccgacttcaagaaccacaacctgccgctcgcccgcatcaagaagatcatgaaggccgacgaggacgtgcgcatgatcgccgccgaggcgcccgtcgtcttctcccgcgcctgcgagatgttcatcctcgagctcacccaccgcggctgggcacacgccgaggagaacaagcgccgcacgctgcagaagtccgacatcgccgccgccgtcgcgcgcaccgaggtcttcgacttcctcgtcgacatcgtgccgcgggacgaggccaaggacgccgactccgccgccatgggagcagccgggatcccgcaccccgccgccggcctgcccgccgccgatcccatgggctactactacgtccagccgcagtaacgaatttgcttccttatcatggtttcgcttccatgcagcctttgcgggtttttagtaaactattattattactgagagtgccctgttgttacccattgctctgttgttgccacccaataactcgatgacctgatgattgatgtgcccgttccgtaacaagtgtaaaaaaaaaaaaaaagggcggaaaagaaa

SEQ ID NO: 101757 - DNA, 176 bp, Zea mays
  unsure (1)..(176): unsure at all n locations
  Clone ID: MRT4577_24311C.1
ctntctctgaaaagtgctgacagatattgatagactttctaagttccatatgactcatgcagcggggcaggacataccttgtgggcgaccggtatcttgatcagttgtagtcattcagtaccatctaatctgctacatatgcacaaaccaagcggcaatgttctcagccaagaaca

SEQ ID NO: 101758 - DNA, 210 bp, Zea mays
  Clone ID: MRT4577_24312C.1
tcgggttcagggaggcaaaccctaccgggccgggacgtttgacgccgacggggggaggttgataatccaagtggaactgcaacacgcctttcaccaagggaaattctttgcgggcattggcaagaaacttaaggggtctgattgatctgcacatacccctcttggaaatattatatttacagacttgcaatgcccggcaatatgatgggc

SEQ ID NO: 101759 - DNA, 294 bp, Zea mays
  Clone ID: MRT4577_24313C.1
accgctgacgcgtggggccccccttttttttttttttttattttatggcaaaaccattcatcaaagcacaggtcaaaaacaaaacaagctctccatacaatacacctatcaaaaacactactttccctatttacaaatacttccgttttgtcccttaccccaagaccaaaatctaccatattctaatgaataaaaaagtctttgattaatttccctactattttcaccttttttcttgttaaaaagaaaatgtctccaattatacgctctaagcttcccccatttccttcaaca

SEQ ID NO: 101760 - DNA, 251 bp, Zea mays
  Clone ID: MRT4577_24314C.1
ttctatattttaagccggggtatttggcctcctacagaactttgaccaggaccaaaccaatcggctgcaaatgcatgggtacaacggaatttcaacaccttgctggaaaagccatcaccctcttttttctttttcgctggaccattacaaggggctagtgcacattttaaccaataaatccttgcagacaaagaagtggtaaaaaaggggaacttagaacattgcattatttgttcgctgggaactgaatt

SEQ ID NO: 101761 - DNA, 173 bp, Zea mays
  Clone ID: MRT4577_24315C.1
ctggtgctgattatgtcttttaatcctgtgtttgccggccaaaactttatcgacaggcgggtaattaaaagggcggacgcgataattatattttcttataatgctatgaacccctgtattgaggtttacacttttctttgtcctaaatatgcctacaatgttatttaagcttt

SEQ ID NO: 101762 - DNA, 726 bp, Zea mays
  Clone ID: MRT4577_24316C.1
cactagtaccttatgcccaccgacttcatcgtcttcctcggaacgccgccgccgaagtgcgcctcgaggaattccagaggaaggaggagccaagtgttgatcggagatgaatgcccctgaccgctatgaacgcttcgtcgtgcctgagggcacaaagaaggtgtcatttgagaaggatacaaagatcatgaatgctgcatctttcactattgaacgtgaggaccacaccatcggcaacatcctccgcatgcagctgcacagggacccaaatgttcacttcgctggctataagctccctcacccccttcagtacaagatcattgtcaggatccatactgcaagccagtcctccccaacgcaggcatatacccaggcaatcaatgatctagacaaggagcttgagaacctgaagcaagcttttgaggatgagaagacccgattcgaggaaaggatgaagcagggctactaggtcaagggtgttggatgctgatgtgaaatctcccttgctactagttatatctgatgtctgaactgcggtagaaaaaaaaatagacaaggcctgtcgatgatcctctgaactcgtcgaacctcttcatgtgcggattgcgtatgattacacggctgttaaacatgtgttggcacttgatacgcctgctggttgaattgctcgctcttacaggttcgatagaaggtacggacccagcttcagcgagacttctcgtactg

SEQ ID NO: 101763 - DNA, 537 bp, Zea mays
  unsure (1)..(537): unsure at all n locations
  Clone ID: MRT4577_24317C.1
aaaatgcaccaatgagcaacggccacggccattgagacatgaagttatgcgtagccttacaccaacattatgggcacctattaaggaaaaacggcactctagcacatgtgagcgccaacgatttctggtagccagctatgcgtgggtaggattgttcggagcggctataaaaggaggcctttccacgctatgctggccagcggcgctttagcttgctacttaggcgctcaaagaccgctaaaccatctaaccacacggtccacaggggcgctcccctaacttgagagaaaccaacgcgccctgggtaccattatggtaggggggctactgtggagcgcactgcactatttgggctccggcagggattttgtacttcttctcgtaggccttctgagcagcaagagactgctttctgaggagatcctcctcgatgttgtttacagcatgcaagggcggcttctaccattcgttgatctgcatgtcagacancttggacaaatgcttttgaggaagtacctactcgagagccttgaactg

SEQ ID NO: 101764 - DNA, 172 bp, Zea mays
  Clone ID: MRT4577_24318C.1
atgcattgctgaccgtgactcacgttagatagactaacacctacaaactatatggcgggcacgtcttaaggatggacacagaagctgaaaaacatgatgcataggctaagagcgtcgatagacagataagcgcagaagcacaccgcccgcatatagaggaggtgaggcactc

SEQ ID NO: 101765 - DNA, 815 bp, Zea mays
  Clone ID: MRT4577_24319C.1
gactaaaggaaaatacccaaaaccggagcccctcctgaccctgagcgagagcagctcagctccttcgcctccatcgctcaaagcttcgagctctcctccatctcccctgcgaatctccgggctcgtccgccgctggatcgatcgggtgcagagttccatgaaagaggcgcggttttgggaggccgttgtaaccgaagccgagccccgtggtgtcccgagacgggtctcgctggcggcgggggcttcgtattcttcttctccctccggctgctctatcttgttttagttcacgggttggaactggtagggagtttacgagatatggccaggttttgctgcttcggcgccggttgctccgagttgacagggcatgcatcagccacctctggtaaagggaaaggctgtcagggccaagtcaaggttagctacgggtttagccttgtaagaggaaagacaaaccatccgatggaggattttcatgtcgcagaacttgctgaagtgaaaggaaacgagcttggtctttttgctatttatgatggtcatttaggcgatactgttcctgcatacctacagaaaaatttgtttcctaatattttgaacgaggaagagttttggacacatccggacagagcaatcacaaaggcttatgaaaagacggacaaggctattctgtcacatactccagatttgggacaaggtggctccactgctgtaactgccatccttataaacggcagtaagctgtgggtagctaatgttggggattcgcgagctgttcttctgaaggaggtgagggcatacagatgtcaattgac

SEQ ID NO: 101766 - DNA, 460 bp, Zea mays
  Clone ID: MRT4577_2431C.1
gaggccgaatataattcaaatccgggggggggcccgaataccggggcggggggggggggggggtttcaaccctcttagatggatcaaaggggaaaacgggcagataatatttggcccatttaccccccttttaaacacgatgaccaggggttaagaagggaaacaagacccaactggggggggtccagttcaaaaggggaaagaaccaggggttacccagttttttactcaattccactgggcaaaaaggcccccctggtttcctggcaactgccgtttaaacagggggtcgggtttcagcatgcagtttaccccatagcccatactgctttttgaatcgaccccgggtagctgaagcaaaccgggaatgaaaacatcatagttcgcagcatgggtacccgaagcaaacaaacttctggagagcaaccaaaacaaccagttttcccacaaacacaatttt

SEQ ID NO: 101767 - DNA, 1078 bp, Zea mays
  Clone ID: MRT4577_24320C.1
cagacaaccctatactggtacaacacacacacacacacatgcataatggttggtacatggtaaaactatagcaagctaaggtcgatcgctcgtctatagctagaccactatcaccagtaccacctccatggtttcttgactgatagatagacggacgagaatgaagaagctagctagctactagatatatcatcagtagagtgttcagttgttgatgatggcctcctccttgcccctggtcaccactgggctgcgccatcctccgcctccgcagcagtcgccgagggtggtcctgcagagcgaggacccgaccgagtggtgcgcgtgggcgcaccaagggcaccgactgtgggtggccatgccggacttcttctgggtgtacacgtacaagtggaccggtgcccgttccggggcaaccacgtgtggacgacgtgcccgtacgcgcactggggggagcgcgcgcgccgccgcgaccccagccgctacgcgtacgccgccgcgacgtgcccggactacgccgactccaagcgccggaaccgcctggccgggtccagcgcgccgcccacctgcgcgcgcggcctccgctgcggcttcgcgcacggcgtcttcgagacgtggctgcaccccaccaggttccgcacccgcatgtgcgaggccggcgccgggtgcagccgccgggtctgcttcttcgcgcactgcctcgcgcagcgcaggcgcgaggacgacctggtcctgccgctcgtcgtcttccccgccatcaccatgccgcccccgctaccgctaccgctgccgctgccgccgctggccttcgttgtcccgaacaacccgctgccgcccgtaccacccgccctcccctgcccccgctcggtctcggtcgtcgcccatcaggttgatcgcgtcacgcaggccatgcagcagggccgcagcgtgcgcctgcttacgcgcgccgatgccgatgccgcttcgtcgtcgtcgtcgtatttttcctgctcccgtgcccctgctagtaatgctgatggggccactgcaccaggcgacgacgaggataccgacaatcgtggcattgtcaccggctgct

SEQ ID NO: 101768 - DNA, 338 bp, Zea mays
  Clone ID: MRT4577_24321C.1
atgggcaaaaaaacattgatttgttgctcaaccaggtcccagtatgcacgggacgaaatgccctcaaaattcttggaaaatccaagccaaggcaacaaaaggggctactcctcgggggggagggtctaccttcccgttgggccacaacttttttaaaccttgaacccccgggtgatcttcctggcacgagccattcaaaacttccttgccttggaccacacatttgggttggggaggggtcagcggccccccaggagccccgccgaagggcctaaccgcctgaaggggatttttggggcccctgaagaggaccgggttctccccaagtggaacccgga

SEQ ID NO: 101769 - DNA, 181 bp, Zea mays
  Clone ID: MRT4577_24322C.1
accaaaagagaaagaaaggtcgacagggcacttcttgcctggtgcgtatagaccaatgtgccttaaacaaaaaggtccatatgtctccgagacaactctaaccccgccgccttctatatccacacagtgcagcacctgataaaaaggtgcatgacgttcgggatgagcatgtaggagtgca

SEQ ID NO: 101770 - DNA, 223 bp, Zea mays
  Clone ID: MRT4577_24323C.1
aattcggctcgagctcgattgtatctacacctagcacgctattgctttttacgagcacacaacagctgacgcgccctgtgcgaactacgcttcaggacacacccaaccaaacaacaactacacaaccaaccactacttcctctacatctttgtctatctctctttatagctcattaacaatgtatctctggaaacagcaccatctagacgagaacatatgcta

SEQ ID NO: 101771 - DNA, 543 bp, Zea mays
  Clone ID: MRT4577_24324C.1
gatgcacacgcatccaaattccaaagcttagatgttcgtttcaaaaggatttttttaatgttcgtttcaaaaggaaaaaatccttagacgtttcaaaagaatctaggtttttacaatggattcaaggttgcaaaatgcagtcgagtttgctgggttctgatgatcccaaagctgttcgggaatcagaaggctgggctgagaatgttgaggagggagactctggtgttgacgagggctctgaacaccttctcgccgctgctctccacgtccgcgatgcaccgtcctagattgtccagccgctcaaacgccgccttccgctctcgctcctccgggtccgcggcggcctccatctggggccccacggcagacgtggcggcgtgctgcctcttggccgatcgacgcttcgcacgcgacatccaccgcatgaggtcggcgacccaccagatccgcggcatggaggacgaggaggacctggtggtggtcacgaccgcgtgcctcggggtgcgggacggggcgctgaacctcgtggaggaggacatccag

SEQ ID NO: 101772 - DNA, 869 bp, Zea mays
  unsure (1)..(869): unsure at all n locations
  Clone ID: MRT4577_24325C.1
cctcgaggccggccgggactgctaattcggcacctggccagcctccgcctggaggtccatccccgacctcgacgcttcccggccaaacgccgacgcccctcaccctcggcgcagcgccgcagcgtcgcggtgctccatacccatccccctccatggccggcgcctgcatcccccggcatcgcggtgctggatcccctccctctctcgcgttacgctagagttcgagaaggggaaaagcgacgtagggttcggcaacgacacctctgtgtcccctcctccctcgcgcactcattttccttcgtctcgttgctactcagaggtttgacacactctccaatctacgtttcctagctgctagggcttttatttttgcatgcctcttcttactctccgaattcctcttggtcgcctggcaaagtgcgttccatccgagcggtgatgtgagatgtgtcccccctattcttcatcggtttgcttgcaatgattgagatagatgtgctcattcgccttgcagaaaatgaaaaataaagatatctttgtgcccagattcagagatggtttgactacctaatcatatatgcatggtacaacagccataaaactgaattttatttggctagaacctgaaatggcggaaactctcaggaatcatgtgcaaaccgtctaaagctgactgttggatggggttggcgaaggtgtgcttgaataaggatcacctgaaggcgtggagtccctggctgctgggtgntgtgtgtcctggtgggcgacagtttgaatccccctgcagcagtggcggctggtatatgtactagtataagcatgcagaccacaattggaaattgggatgatcatgtgatcattttccttgg

SEQ ID NO: 101773 - DNA, 447 bp, Zea mays
  Clone ID: MRT4577_24326C.1
aaagacaaacaccaacagcaatcatgagttgttaaatatcaggggaggacggacacacagcaaaacggttctattatgcaggcaacacttacaaaacatgctgaaaggacaacttgcatcatttccagagtggtccaatcaaatcatgacccatattcaggatgaataaccactactgaagtgacgaaggctaacaaggtgcccaaggtggaatacctgtcttcatatggatgctgatgattggtacgcacaagcacttaaaatgttgagtgtaaaatacgagaatatggtagctatcttgttgcacgatttcggtctggactaggaaagtagcaacattgttacgctgatcaccttgctgaagaatgacctgatctagctatggatcctggactacactaccaattgggtagaactctttagtgagagccttgaggatctggttgt

SEQ ID NO: 101774 - DNA, 812 bp, Zea mays
  unsure (1)..(812): unsure at all n locations
  Clone ID: MRT4577_24327C.1
ggngaaaagcgcgtagggttcggcgacgacacctgtgtgtcccctcctccctcgcgcactcattttccttcgtctcgttgctactcagagcttggtcgcctggcaaagtgcgttccatccgagcggtgatgtgagatgtgtcccccctattcttcatcggtttgcttgcaatgattgagatagatgtgctcattcgccttgcagaaaatgaaaaataaagatatctttgtgcccagattcagagatggtttgactacctaatcatatatgcatggtacaacagccataaaactgaattttatttggctagaacctgaaatggcggaaactctcaggaatcatggtgcaaccgtgcatggatcacttgtctaaactagttacatcattttgattaagaataaggattacctgatggttgtctcctattttctgttgtagtgcaaaccgtctaaagctgactgttggatggggttggcgaaggtgtgcttgaataaggatcacctgaaggcgtggagtccctggctgctggttgttgtgtgtcctggcgggcgacagtttgaatcccctgcaggcagtggcggctgtaatatgtactagtataagcatgcagacaacaattggaaattgtatgattcatgtgatcattttccttgtatcttttctattgttggttatatatcagattttagaagattcttgtgatccttttccttgtattcttttcaaaaaaaaaaaaaaaaaaaaaannnnnnnnnnnnnnnnnnnnnnnnnnnnnnnnnnnnnnnnnnnnnnnnnnnnnnnnnnnnnnnnnn

SEQ ID NO: 101775 - DNA, 551 bp, Zea mays
  Clone ID: MRT4577_24328C.1
acatgaatcttctaaaatctgatatataaccaacaatagaaaagaatacaagggaaaaggatcacaagaatcttctaaaatctgatatataaccaacaatagaaaagaatacaaggaaaaggatcacaagaatcttctaaaatctgatatataaccaacaatagaaaagatacaaggaaaatgatcacatgaatcatacaatttccaattggtgtctgcatgcttatactagtacatattacagccgccactgcctgcaggggattcaaactgtcgcccgccaggacacacaacaaccagcagccagggactccacgccttcaggtgatccttattcaagcacaccttcgccaaccccatccaacagtcagctttagacggtttgcactacaacagaaaataggagacaaccatcaggtaatccttattcttaatctaaactagttacatcattttgattaagaataaggattacctgatggttgtccttattcttaatcaaaatggtgcaaccgtgcatggatcacttgtctaaactagttacatcattt

SEQ ID NO: 101776 - DNA, 670 bp, Zea mays
  Clone ID: MRT4577_24329C.1
ctcccaaagatgaggcgcacttcgcgacgcaggtgatcgcctgcagagacggatcgggctctttcccgaggagccggatcaacgacgggtactgcgactgcggcgatggaaccgatgagccaggtgtctgtctccatctctcctggatttgtccgaacttgaccggaaactgggagttgaactgtggaatatctggacgatttcaccaattgctgcgagatctggttccggtggcaataaattaacaatgcactagggattagaattttattgactcgtgctgctagagttttccgagttcaggaaacggagaactatgtgacctttgctttagagctactaatctactatgttagggttaggttaactcatatggacagagaactgttaagcagagcctaaactactgaccagctgtacccgtacgcacatgactatgcccatttagccaaatgaaaacagggatataccggaattgatgtgcagtatgttgttgcagccttcatatctgtgaaatcattgctgcctcgccctatgaaaacttctgaaatgtgggcatttcttttatggggtgctaacatctctgtattaggaatactccatcataattctggttttcacattatttgttttatggaggcacttccagcttgtccagaaggcaagtttt

SEQ ID NO: 101777 - DNA, 1461 bp, Zea mays
  Clone ID: MRT4577_2432C.1
ctagaagctgcccgctcgacatgccccacctgccagcatcccatgtgcagtcccaactcccaactccctgccgtgcaacgggggtgagatcttgtgttctcgtaggctatgccttccccgatggctcgcgtcctgcgccgccgtctcctcctcctcgccgccgtctccttcgccgtggccgcttctctccttcgtcgtggccgcttctctccttcgcccagctgctgcagtgcgcccgtttgttttggttctctccggtgaggacttcctcaaggattcggccgcgcacccgtccctcccctctgccgactccaccgacgacgacgggtgggacgacttcgccgacgattcaccagccgccgacccgctcctctccccgtcctcctgggtccctcttcttgacccaacaagccctcccctttctggcgatgagacggactcgtcggccgacgcgctcttcgtcgcgggcgcccgcgcgatgctctccgcagcgtccgatggggacgacgcggcgttcgccacggctgccgcgcagatcgaggccgcggcagaggcggggcacccgggcgcgcagtccgcgctcgcgttcctcaccggcgccgggatgacgcgcccggcatcccgatcgctcgcattcctgttgcacaagttcgccgccgacgcgggagatcttcagtcaaagatggccctcgcgtactcctacttccgccaggagatgtatgaagaagctgttatactatacgctgaacttgcagaagctgccctaactagctccttgatatcaaaggagccaccagtgattgaaccaatccgtcttcacagtgggactgatagaaaataaagaggccttgaggaagtcccgaggcgaggacgatgaagattttcaaatcacggagtaccaggcacagcgaggcaatgctgctaacatgtacaaattagggcttctgtattactatggcccacgtgggctccgccgtgattatggaaaagcttttcattggttttctaaggctgttgagaaaggcgagacacgagcattggaacttctgggtgagatctatgctagaggtgctggagtggaaaggaactatactgaagcatacaagtggttggcacttgctgcaaagcagcaacattactcagcttacaatggattgggttatctatatgttaaaggctatggggtggagaagaaaaacctgacaaaagcaaaggaactttttgaacttgcagccgagaataaggaagctgggggacattataaccttggtgtgttgtatcttaagggtattggtgtgaagagggatgtaattagagcatgcaatctcttgcttcatgcagttaatgctgggcaaccaaaagctatttatcaggtggcgaaactgttccagaaaggcattggtcttaagaggaacctccatatggcaacaatgttgtacaagtctgttgctgagaggagac

SEQ ID NO: 101778 - DNA, 403 bp, Zea mays
  Clone ID: MRT4577_24330C.1
ctttccctacagtgcctgccgtccccgccctggtccgcaatcatgttcacaacctatgataacaaggcagctggcgccttgcacatagccgctaagaggggctcgcgtaggaacatgcacctccagcggcgcgagactatggccctccaccgtcacagcaccattgtgtgacaactccgccaacacgcgaatgaagaccttaaccacgcggctagggaactccacaaccggattggccaccatacgggcagctaacaaagccgtctctgacgagacacgggcacggtcctccacgatgggtcaatcaaggactgtcgaccatgttaacacagatacacggaccaacgccgacgtgccagaaaatgccacagtcgcactggcacaggccaccactactgagcca

SEQ ID NO: 101779 - DNA, 296 bp, Zea mays
  Clone ID: MRT4577_24331C.1
ggcaaagaaacactggtgagttctgcactctgcttatctccacacataagtgcggggattgggggcttcacagtccacacacacacactttcagctagctagcactgtaccaatgggcgccggcgaggtccaggtacagactgccgttcccgacgaggaggctgaccagttggccgccgactccgcctacgataccccgaacgaggagacctatgctcctgcggtggagaccgaagtcgtcgtctctaagtaagccagagccgacggatgccgatactgaaactgaaaccaatgag

SEQ ID NO: 101780 - DNA, 760 bp, Zea mays
  Clone ID: MRT4577_24332C.1
gccggccggtccggggttattccatcaccagttcaccgtcgtcttcctcaactcttcctctcctctctcttctgcaccatctggtgtgcgtgcgcgttactcgccgcgtggatcgaagaaagaggcgcacgggagcgagctacgcgaagcaaggccatggcgaagggcgggctggccaagcttcggtgcatgatcaagaggtggcactcgtccagccgcatcgcccgcgcgccgccgtctcccggccccggcgaggatgaccgctgcgccgcgcgcggcgcgtcgttccacggcgcggacgaggtgcccgagggcctgcacccggtgtacgtcggcaagtcgcgccgccggtacctcgtcgccgaggagctggtgggccacccgctgttccagaccctcgtcgaccgcatcggcggcggcaccggggcagcggcggcgagtaccgtcgtcggctgcgaggtcgtgctgttcgagcacctgctgtggatgctggagaacgcggacccgccgccggagtccctcgacgagctcgtcgagtactacgcgtgctgagacagagtcatagagcctggccccgcgccgccagctcggccgtgacgcagcgcggcccgacggtggtggaagtggaatggaaggtagcttagcacggagggctgctgtatcatttcgttcggcattcttgtgtgtatgtagggtagggcagatttgtgaataatggcaaatgcggcgggctacacccccccattgaatcgcttcccta

SEQ ID NO: 101781 - DNA, 345 bp, Zea mays
  Clone ID: MRT4577_24333C.1
tcgtcttcgtccgtagatcagagagtttggaaataatatagagtgacccattgccttcagccagactgacacaacaaggatgtgcgacgattttatgactttcacaaccactggaccagctttagccctagacactcacagggccttgacggtgctggacgaacaactagacgagaagcttttcctccgcgtgctgggggaggcacagccacaccggtgccggtggccgggccacgtgcctctgcgcgcccgcggcccaagccgggactttaacgacccgcgttagggcacggactcccacacccactgggaccggcccccgcacccgtcctggctggggccccc

SEQ ID NO: 101782 - DNA, 412 bp, Zea mays
  Clone ID: MRT4577_24334C.1
ttttttttttttttttttttttttttttttttttttttttggttggtttccttcttccccccttgggaaagggaggcggcggcgcccgcttgggaaaggggtggcgacggggtgcgatcggggaagggaacccgggggggcgtgcaggggtacccgacgccctttgggcgttttcgtcaggaggaggggttttcattaaccacctcgctccaaacacgctttggttggctgcccctccggtttggccttgtgcaaatggacccaagcaggtccaatttggctgggggctcgaatccatcacaatttgctaatgttgaatcttggaactttgatgggtgttattacaacatcatgggtgatgagaatttacaacataatgcaaatgtgcatgagggtcaagggctgcccttaa

SEQ ID NO: 101783 - DNA, 2519 bp, Zea mays
  Clone ID: MRT4577_24335C.1
tcactggacgcggcccttatccgccggtgatcggatcggctacccggggcacaccatctcttctttcttctcggcgtcctcgcagtttcgcgtttacccaaaatacccctaccttaaaccctccgcctccgccgccatgcgccgcctcctccaaaccctccgcccgctccaagccctacccctcaaccccgctcccggtatccccacccctctccgcctcctctctaccgcctcgtcggccgcgtcctcggactctgactccgccgcttcccccgccgtggccccgccccccgctgccgatgccgactttgacagcgccgactacgacctcccgacccctggtcccgccccctccagaaaaatcaacaaccccgccgccgcgctgaggaaggtccggttcgacccctccctccgcgcgcgcgccgacgaggcgctctttggtaaggggctgggcgcggcagccgttgatgaggaggatgaggaccgctcacgggacgtggcgctcgcgctgctcgatgcggcgctggaggcgcctgacgaggatgaagaggatctcggggaggtcagggaagaagaccagatgtcgctttccgttggcattgtcggcgcgcccaatgccggcaagtcctcgctcacaaataccatggttgggacaaaagtggctgcagtctcccgcaagacaaatactacgactcatgaaattttgggggtgctaacaaaagggaacacacagatatgcttttttgacaccccagggctcatgttagggcaccatgcatttcctgactgggatgtcagtattcttgtggagattgtctggagctcactgagcctctatgatttaccagtagtcatgttagatgtcaataggcatcttaatctgtcagattcacgaattataaagttaattaaacgtttgggtacgttggtgagccaaaactacagacgtatattgtggaggaataaggttgacttggaggaatataagaagaacctacttaaagtgcaaaagaatatagggaccttcctaggatatgaaaggtacttcatggtatctgggctaaaaggcaagggagtgaaagaccttgtacagtatttgatggagcaggcagtaagaagaccttgggatgaggagccaactgtaatgactgaagaggtaatgaaaaccataacgttggaggttgtgcgcgagaagatgctgcatcacatccaccaagaaatcccctatgtaattgagcatcgtctgatgggctggaaggagctaaaagatggttctcttagggtggagcagcacttcattgcacctaagcaaagccagcgtcagattcttgttggtaaaaatggttctaagatagggagaatcggtattgaagctaatgaagagctaaggtccatattcaagagagatgtccatctaattctccaagttagagttgcgaaaaagagaagtgcctgaacagacagattttagtgcctgtatagaccgcaactgatctgagaactgcagtgcagtgttgtcacaatgtattcaggagacatggttggtaagtggtgcttgggcgcatcagttcgggtgactgctttgacagaactttggatctatgatcaaatggaggtgccgagctataacctagcgtgtggagccttgatttctgaataaaagatataccgggagcaatccacacgccagtggtgacaaggaaacggcttgctgaatagcgagctgctcgtgtgctggcgaatctggggtctgtgatactgatatgcagatacgaatgcgctggacaccgttttgcctactctctgattcgaaaagtagtccctctccttctcaggtctcagcctgtattttctataggttctttagacagtgttgtaacgacaggatgatcgagcatgtcggcgttgaagtttgctgctgatcttccgcggtgttttgaacagcggaaatttaaggatgaaatccggtggaaaatttacacgatggaaaatttccccgggacgtgcgcgtgctgtactgctgatacagaaatgctccctatatctatatttatcatcgtctattatcatcaattgaattaaaactaaagatctaaaggaggtgccgagctataacctagcgtgtggagccttgatttctgaataaaagatataccgggagcaatccacacgccatggtgctcatctgctggcgaatctggggtctgtgatacttatatagatacgtctatgctggaccccgttttgcctactcttctctgattcgaaaagtagtccctctccttctcaggtctcagcctgtattttctataggttctttagacagtgttgtaacgacaggatgatcgagcatgtcggcgttgaagtttgctgctgatcttcctcggtgttttgaacagcggaaatttaaggatgaaatccggtggaaaatttacccgatggaaaatttccccgggaaaaaaaaaaaaaaaaaccaaaaaaaaaaaaaaaagaaagggcggccgaagaaaagtgagctc

SEQ ID NO: 101784 - DNA, 265 bp, Zea mays
  Clone ID: MRT4577_24336C.1
accgcactctacaccgtaacacctctcatctaaccaccgcagccctactaacaaagaaagacgcttatcacgatgtccagtgcacctatactcgttcaacaccaccttttccaacaacatttgcaccatcacaatacacctattatcacttatccttaagagctactcacttcacactactttcaccacccactttccataatcaactgactgtttctaactctactgcatacctacaacatcgaccacaaacacttaatccact

SEQ ID NO: 101785 - DNA, 304 bp, Zea mays
  Clone ID: MRT4577_24337C.1
gccaattccacatttccaagaaataaagacgcgggaaatgcgcatatatagaattgtgaatcatttttttgccttattagagcctatccctgaagccaaaggataatgagaattggaattctctaggggaattccaatgccacattttcaagaaatgaggcggcaaaaatgtccatatatgaatcggaatcatttgctttcttatcaggcctagccacaatcccaacggaatgagatcgtaattgttgggggtacttcaattttacattaacaatgacgaatggagcaacaaattttatatatg

SEQ ID NO: 101786 - DNA, 1305 bp, Zea mays
  Clone ID: MRT4577_24338C.1
ctagttgtctccaccggagtaggagcctccagcgaagacatccttcaggtccccctcgggtgactgatacccgaggtcccgttcagctgcggccacctcgccgtcgtccaccttttctttgccaggtcggtgacggggtggggagacatctttggaagactgctcgcaccgctcactgacgcgtttcgtgaggtcaatgatctcacgacactccgcggcgatgtggcgaccgttggggtgcacagagcatgagccgctgatacccctctgcggtcgtgggcgtttgttgcggtcgccctggcccccggtcgcggctgcgaccactagagcggtggaccgcagcttctggtagttgtggtccttcttctttttcttctttccgtcccgggggacggctcccaagcctcccgactgggtagctctggtttgtggggttgagtgccatgcacggccctcggtgactctggcgcatttatcggccagagagaaaagtgtggggacagtttccacgtcatgtgtggccaacttctccagcattttttcatcacgtactcccttggtgaagcaggagataaatttccagaaagtctcccagggctcctgcctcaccgcatggaggtgggcctccacatcgtgctgctggtaagcactggcgaagtttgcaacaaaccgcgcgcagagctcttcccaggagtagactgaccccggggcgaggttcatgagccaggtccgggcaggtccagacaaggcaacatgaaaatacgttgccatcacagcagtgtttccacctgctgccgtaatggcgatgacatacacctgcaggaactccgacgggttcgatgttctgtcgtacttttccggcaggtgcggccggaacttgggtggccgcgcggagatgatccacaagagcggcgcagcccacaccagccaaggagacacccgtttgggaccgggtgcccattggcgtcccttactgagggcgagcgcacagatgccgacgcctcgtgttggcgccgggatgaccgcatcctcgacctggtcgaggtagaatgtgccataccgagtagtcggtcgacgtcgtcccgcaattgcttcatggcccctagtgaggccgtggagcttggagggtgtcacaacaactccctggctgctgacaatgcccccggagtcgccctcgatggactccaggacgtttgtacagccgtgtgctgctgtgcggcgtgcacaacagcagtgcctggcacagggtggttgggaacctgcggtgtggaagaaacagcttccccctctgccgcgaaatctacc

SEQ ID NO: 101787 - DNA, 396 bp, Zea mays
  unsure (1)..(396): unsure at all n locations
  Clone ID: MRT4577_24339C.1
tttcttttcttttatatctttttttgcgtctgtttattattatatttcgtttatccttttcattatattcttcctttttctcttcttccttctatctttttcctcatcctctatgtcatcatcctcatcatccccacccttttctgcatcctcttcttccttctttatctcggcctcatcaaaagcatccttttctgcctccttatacttaccccaggtctcctctgcaaaactctttgccaactcatgatcatcattgatgatgatgttgtcaaacatactgccctatttaacctgccacatctcaatgccaacttacttcaagctgtctaaggcgtaaatgtanggaaatccttaaaatctaagttgtcaatcataagtgccttccatttaccc

SEQ ID NO: 101788 - DNA, 3064 bp, Zea mays
  Clone ID: MRT4577_2433C.1
tccggccgggacccgcggcccaggccctggtggacccggggcgccagtcccagtccagtccctcactgtggactcctcgcgtgccccgccgcccttaaatcccccggcagcagcgtgctgcctcgtgtctcacccctccggacgaaatctgacccgggccacactccgctgctccgccatggcgatccgctccaaggcctggatctcgctgttgctcgcgctggccgtcgcgctctccgcccgggcggaggaggagcccgccgccgcggcggagggcgaggccgtgctcaccctcgacgtcgacagcttcgacgaggccgtcgccaagcaccccttcatggtcgtcgagttctacgccccctggtgtgggcactgcaagaaacttgctccagagtatgagaatgcggccaaggcacttagcaagcatgacccaccgattgttctcgctaaggttgatgctaacgaggagaagaacaggccgcttgctaccaagtacgagatccaagggttcccaaccatcaagatcttcagggaccaggggaagaacattcaggaatacaagggccctagggaggctgatggcattgtcgattacttgaagaagcaggttggccctgcgtccaaggagatcaagtcaccggaagatgcgacggccccttatcgatgacaagaagatctacattgttggtatcttcgctgaattcagcggcaccgaatttacaaacttcatggaggtcgcagagaagctgaggtctgactacgactttggccacactttgcatgccaaccacctcccacgtggtgatgcagcagtggaacggccattggtcaggctgctgaagccatttgatgagcttgttgttgacagcaaggattttgatgtcgctgcactgatgaagtttattgatgctagcaccatccctagagttgtcacttttgacaagaaccctgacaaccacccatacctcatgaaattcttccaaagctcagcccccaaggctatgctgtttttgaacttctccaccggaccttttgattctttcaagtctgcctactctgctgccgcggaggaattcaaggacaaggaaatcaagttccttattggtgacatcgaagccagccagggtgccttccagtactttggcctgaaagaggaccagacaccccttatcctcatccaggatggtgactccaagaagttcttgaaggttcacgttgaggctgaccagatcgtcgcttggttgaaggagtactttgacggcaaattgacgccgttcaggaagtctgagcctattcctgaggtcaacaatgagcctgttaaggtggttgtcgctgacaacgtccacgacttcgtcttcaaatctggcaaaaatgtccttattgaattctatgccccctggtgcggacactgcaagaagctggcgcccatcttggacgaggcagccaccactctccagagcgacgaggaagtcgtgattgctaagatggacgcgactgccaatgacgttcccagtgagtttgacgtccaaggctacccgaccttgtacttcgtgaccccgagcgggaaggtgacatcctacgacagcggcaggacggcggacgacatcgtcgacttcatcaagaagagcaaggagaccgcagccgccgccgccaccaccacccaggtgccaccggaccttttgattctttcaagtctgcctactctgctgccgcggaggaattcaaggacaaggaaatcaagttccttattggtgacatcgaagccagccagggtgccttccagtactttggcctgaaagaggaccagacaccccttatcctcatccaggatggtgactccaagaagttcttgaaggttcacgttgaggctgaccagatcgtctcttggttgaaggagtactttgtaagtgctggttgacttcaatacactcttgcgagtacttgttcggtttaattagtactattgtagagctcattgacctgttatatttgtaggacggcaaattgacgccgttcaggaagtctgagcctattcctgaggtcaacaatgagcctgttaaggtggttgtcgctgacaacgtccacgacttcgtcttcaaatctggcaaaaatggtatgtggcctgattattctgttatttttcatcaaacaataagaattatttatgggaggcaaaatttcaacagaattgtgtttagcatgtagttcttgtcttcgtctcagggatggaagtctttttttccctttaatagattgaaatagtcttgatatgtataactctgttgcagtccttattgaattctatgccccctggtgcggacactgcaagaagctggcgcccatcttggacgaggcagccaccactctccagagcgacgaggaagtcgtgattgctaagatggtctgtttcttccccacgagtcttggtcactatgcagtatgcacccaccacccccttttacaaaacactaacaccacttcgttcccaggacgcgactgccaatgacgttcccagtgagtttgacgtccaaggctacccgaccttgtacttcgtgaccccgagcgggaaggtgacatcctacgacagcggcaggacggcggacgacatcgtcgacttcatcaagaagagcaaggagaccgcaggggccgccaccaccaccaccacccaggggccaccggcatccgagaaggcagccgccgccgagcccgtcaaggacgagctgtgagcatccaaggtgtggacggctgtggctgcgtaagcatgggaggaaaacctggcgctaacgtgcctccaacgcctagtttttgcgggaccagagggagagagagagagggacggagttagagagagaggggatctgcgacgtgttttgctctgcggcggcatgtctgtgtatcccattgaggttatgtacacaattacaccgcggtcggtgggtgtctttttagttaattatcacaagtgacagtagaaaggaacagattgtgatgaggttgaatggatgaataaatcgctagtccgccccgcctcgttggatgcgtcaatgaaacaggcgcttttgtg

SEQ ID NO: 101789 - DNA, 183 bp, Zea mays
  Clone ID: MRT4577_24340C.1
ctctagagcggccgccctaccatttttattatcctcatctctctccttaggccagcgccattttaaaggttttggcggcatcaagcctccgaatacatttcttgcccctaaagaccacaagcccagggaccaaacatgaagcatttgggactatatgtccggctataagcccgcatggagaga

SEQ ID NO: 101790 - DNA, 271 bp, Zea mays
  Clone ID: MRT4577_24341C.1
cgaccgcctgcgcagggtcagccaccagggctacagcactgaggccgagttcgaggagcccagggtgattgacctgtgggacctggcgcagtccgccaacctcacggacaaggagctggaggcgttccgggaggagctcaagcacttcgaagccaaaatcgaggagcacaaccactaccagaagcagctggagattgcgcacgagaagctgaggcacgcagagagcgtgggcgacggcgagcgtgtgagccgcagccgcgagaagcacgcc

SEQ ID NO: 101791 - DNA, 759 bp, Zea mays
  Clone ID: MRT4577_24342C.1
atgggcatccgatcccaaacgggtgtccccttggctggtgtgagctgcgccgctcttgcggatcatctccgcgcggcatcatggccacccaagttccgaccgcacctgccggaaaagtacgatggaacatcgaacccgtcggagttcctgcaggtgtacgtcaccgccatcacggcagcaggtggaaacaccattgtgatggcgacatattttcatgtagccttgtctggacctgcccggacctggctcatgaacctcaccccggggtcagtctactcctgggaggagctctgcgcgcggttcgttgcgaacttcgctagtgattaccagcagcacggtgtggaggcccacctccatgcggtgaggcaggagcccggggagactctccggaaattcatctcccgcttcaccaaggtgcgaggtaccatacctcgcatttctgatgcttccatcatcacggccttccgacagggagtacatgatgaaaaaatgttggagaagttggccacatatgatgtggaaactgtccccacactcttcgctctggccgataaatgcgccagagctgccgagggccgtgcatggcactcaaccccacaaaccggagctacccagtcgagaggctcgagagccgtcccccgggacgaaaagaagaaaaagaagaaggactgcgactaccagaagccatggtccaccgctctagtggtcgcagccgcgaccgggggccagggcgaccgcaacaaacgcccacggccgtag

SEQ ID NO: 101792 - DNA, 283 bp, Zea mays
  Clone ID: MRT4577_24343C.1
ggggacgccttcttcggcgcactgggaggccaggacgacgccaccgccgagggggacgagcaggaaatgcgggaggcgttcaaggtcttcgacgtcgatggcgacggcttcatctccgccgctgagctgcaagaggtgctcaagaagctcgggcttcccgaggccagcaacatgggcaacgtccgggagatgatctgcaacgtcgaccgggacagggacgggcgggttgactttaacgaggtcaagtgcatgatgcaagggatcaccggctggggcgcctgac

SEQ ID NO: 101793 - DNA, 473 bp, Zea mays
  Clone ID: MRT4577_24344C.1
aaaccaaaatccagctaaattccattcgaaggcccccgcccaaaaaaaaaggggaacaaatgggggggcccccacatttggccggggggggggaaggaacaaaaaaattttgcagggccaagtttttgggcggggggaaacaaacttgccgggaaccccaaaggtaatttttttttaaaaaaaaaaaaaaaaaacctaccctatccccccttaagtttgcggaaagggggcccccgaaatatttaaaagaggggcccaaccccccgggttctgtttcctgggaaaaaaaaaaaaaccaccgggggggaacccccccccaaaaggaaccgcaaataaaagggaacccttgcaaccgggaacaaattaaaaggcgttttaggtgtataaaaaaaagggaacatgccttaaagggcataattttaaaaatgcccataaaaagggggccgggaaagttcctttttaagggctggtaa

SEQ ID NO: 101794 - DNA, 660 bp, Zea mays
  Clone ID: MRT4577_24345C.1
ttttttttttttttttcctttagaacattctttttgggggggatcgacatctactcctcgagccacccttgccatcactcagcaaatcaagtaaatccctttgttgaaccgccgcgccattctaatgaaacgcacgagaaatgatagacgttgccaagtttacctggaccggcaagatcccatgtcgagggatttggccagcttagtagccgtagttggcaagggcctttgcggtctcctccttgacagaagcgttcttcttcgcatcagccagttgtcgggcagcgatcttcttgcgctcgtagaaagcagcgcccttggcctttcttcgctcctccaatcgagcaacgacgtcctcgtacttccagccaacctcgctggacagacgaccgacagtgcagaacttgcggccgggctggagtcggagaacacggagagcctggggaacgacgaccttcttggtcttgtcgtagggaggggggacaccttcgaagaccttgaggcgctcgagagcagcagcaccacgggcggtcttgtgggggatcatgccacggacagccttgtagaagattcgggagggagcgcggaagtggaagggaccaccgcgggtggggttgtaacgggtgatctttcggaggtgggcgtggtacttgagcttcg

SEQ ID NO: 101795 - DNA, 714 bp, Zea mays
  Clone ID: MRT4577_24346C.1
ctacgagggaacaaccggtattgtagcagctgtagggtccgttcgtttctgcaggattggaccaagaattgttcctgttgatcaaaacttatacaaattagagaagcaatctgggtcggaacagttccggtcttctattccctaaccgaacgggtccgtagtcggtttactgaaatgctactgcattcgataattttaactcctccggatccataatattcctacagactacagtggtatttgggcaatcatttccgtgttagccgcaagcattgctgtcaggccacagtaccaagtttctgctagttcctcttcatttgaattttgaaacctctacactttagttttcatgccttatttgttttggggctacttagggaaccaatcttgcctcagcattgatattgtaaacataatttctccttgatagcaccttataactgcttcatacattcatggaattgaataattaacaatgatgttgatttctgttctgtaacatggccatgtatcataagtcggtcatagtaaaattcacactttattattcaatacccagcctgaaaggaaaaaaagagagaagagaatgtactgttaaggagatgaaaatatacagcaggtcactttgtgcttttatattatttgcactgaactgtatatactggtgatgctatcactgcatgcctagttttgtatagattgtattagctaata

SEQ ID NO: 101796 - DNA, 369 bp, Zea mays
  unsure (1)..(369): unsure at all n locations
  Clone ID: MRT4577_24347C.1
cttattagaaaactgggcaccggagcccaaacgtgcccatggccccaagcaacacacatcctattttttttatgaccaagatgcctctgcggtttaaattttacacctgtcgccaataaatggtggtcaagtccactgaaatctcaaatgcggggggatcagttttttccattcaggatccccgcttggagaaaaccccaagatccacccacaacatctggggaagattaaccaaaattgatgcccggggctggaggtgactcgctcccttagtagattggacaagnagccctcctcatgttttggttccaggaatcactccatgtttctcgaccaccaccaggaggtttttctccccaaatgccccac

SEQ ID NO: 101797 - DNA, 340 bp, Zea mays
  Clone ID: MRT4577_24348C.1
ttttatttttttattatattttttttttttttactctttgttttcttttctttttatattttcttgaccgttttccttgtaggctgtacctatcttttcccttatagttgagttcgtattatgagcttgggcgttaatccatgggccataagcatgctctccgtgggtagaaagtggggatgcccgctcacaatccccacacgaacatcacgcaggccggaaagacataagattgtcaaagaccgtggggctgcactaagtgaggggaagctaaactcacaattaaattgcggtggcggctcacgtgcccgcttttccagtgcgggaaaaccttgtgcgg

SEQ ID NO: 101798 - DNA, 165 bp, Zea mays
  Clone ID: MRT4577_24349C.1
ttgtttttttactgaaagaatctattatatatgtccatcataatatgtaatgtatgtacaacgctagaacgactactagccacacgagtagatagatcttcgcaacactacgcacaatgcaaggcaaactcattaccaccagattgcttgatctgaacaatacat

SEQ ID NO: 101799 - DNA, 210 bp, Zea mays
  Clone ID: MRT4577_2434C.1
agaagactaacagccatataagccttgaagatataagagctgcccaaggttgatacctaggattgaagtacttcatgattgcgcttgcccaaaccatcaactagtgaccgaacatggtcttcaaactggccttacatatatcctagaaaagatattggggtacctggttcattgagtggtggggttgcgaccaaaacaaggtgatctaag

SEQ ID NO: 101800 - DNA, 769 bp, Zea mays
  Clone ID: MRT4577_24350C.1
agatatgaaagaatcatatgcttattttcccctttgcgaagcattacctcattaccttagctcactatctcatagtgttggatttttgtcaccagctatggtgacatgcaaataacagaagatgaaaagaaaaaaatgtacttgtggcgcaggtattaaacatatttgttatattgttatataattcggtaaactgattaccccgtaagaaaaaaaatgtaaaatgtacttgtggtgcaggtactaaacgcatttgttatataattcggtaaactgattaccccgtataagtttcatatacaatttggtaaactgattaccccgtatcagttttatatctgtacaagttaccactcaagatgcaagtgctgatcttatttgttccttttcagttattttacctctatctgccggaagctcaaaatcatgaggggctctgatgctgttggaatagctccaagaaccatagagcagacaggtcagaacaaataagcttggtctttgcctgcacccacgcaagaaatctgagctagctggaaggccatgttgaaggcttaaatagttgctcggaattatcaaaagtcgtcaaatgttagtgtagtttccacgtgttcttgagacgtgtgtatttgtatgtctgtgatgtgatccgtcagatctgttcttgtgcccttcaaaggccaaatcagggagctctctgcttcctgtgtatgcttgctttttccagtattcccctgttattctactatgaaatcatccatcgtgccac

SEQ ID NO: 101801 - DNA, 528 bp, Zea mays
  Clone ID: MRT4577_24351C.1
acttaaaaactcaactggctggtttattccagatatacattgcttatggcgactaaatgtaggacaaacgaaaaggtcgattaggtgacgcatcttaacaacacaaaaagggagcgagacttgcagtacaagggcacaggatgagctcacatcgagcatgccaacagctaaacggaatcatacggtgcacgatgacggaccacagtaccatgacctaaccccctggtagactagggcgatgcaccgtagcaacatgctaacaagacaaccaggtctaagcgcaccccaaagctgagcttctctagtaaccgcatcttttgccgtatgcgccgacgctccttgaaccaccccatgccagaacgtcgcggacactaccaaacaccggcggagatttcaacaggatcgtcatagacgcctagataaatgatcttgccatggggttcgacgacagcaagttaaccgtacaaggacatgcgggcataagtcgcgttgataatgccatccgtagagctctttgcagtttatatc

SEQ ID NO: 101802 - DNA, 366 bp, Zea mays
  Clone ID: MRT4577_24352C.1
ttttttttttttttttttttttttttttggggtggggttttttttactttacaaccagacctaacccaaagaggcatggaaatcacactattcatagggaaaaaaaacgctgaaaaattggccttttcaaacaaaaaagataaaaagccgccaacccaaaaaaaaataatggggaacaaaccccaaaggaaaaaaaaaaaacctcctaaacagaccaataaatgccgggggaaaaaccccaaatggggaacaaaaacggaaaattcaaaccccgggggaccttaatcccaaagaacacctgaccagtcccaaaaaccccccccaaaaaaaaaaccccttgaaaccgggccaacaaaaagtccccct

SEQ ID NO: 101803 - DNA, 111 bp, Zea mays
  Clone ID: MRT4577_24353C.1
cccatctaccactacctgtctacctagccagagcatagatcacccctcgcaacgccctggcgttggccaccaacgccggcgttgccgccgcagttgctgtagatggcgctg

SEQ ID NO: 101804 - DNA, 808 bp, Zea mays
  unsure (1)..(808): unsure at all n locations
  Clone ID: MRT4577_24354C.1
ccggccggggtgtctttacagggctagcccaccattagacgatgcttgttaccatctaccttgcttcctatgagcttgtttcatccacctagatggctggagcttgtttgcgaaagattgttcttgttctatttgggtgaaacctctgttgtcagaagcaatccggttaccacagtgaagcagagagaaaatggacatcgcgaagctcgcaggggttgatgccgtcaagcttgtcgtgatgattgtgcgggcagctcagactgttcgccgtaacaagaagacctgccggcagcttgtccaccatgtgcagataatcggtgatctcctggaaaagctgcagactccagcgatgatgcaacatccagagactaggaatggtctcaacgatctcgaagagattcttcatgaggtgtacatgtttgtcacatcctgccaaaacaacaaatacctgtaccacctcttcacagggaagaagcaagcagatcagctccgtattctgcagaagaggatgaattcgtgtctccaagttttcccactcatcagccacatcgacaccacagaccgcttggacaaaattttagaaatcatacangcctccacgttcacaggctgtaanaagatgtgccaagactgcttacaggttgctcatcctgcgacaccaggactgaagtgtataggtgaagttaaaaggtgctccctccaattgaattgcgcagatgcattcaattttcagtttgtcccaagtggggntggtgctacaaataacttctctgacaggaatctaatggncaaggtagctttggctgca

SEQ ID NO: 101805 - DNA, 187 bp, Zea mays
  Clone ID: MRT4577_24355C.1
gccgggccttctgggcaaagtcagaaactcgaatgttccgatcgctattgacgagccgatggcacatgtgactatgcaggacggccctcagtagcaggagacgcaacggatcttcttcacagatttcctaccaggtctcacgcccatcgacaaactgctgtacagcgactgacacgaccttgggtac

SEQ ID NO: 101806 - DNA, 165 bp, Zea mays
  Clone ID: MRT4577_24356C.1
cgcgggcggtacaacacatgccttaacactaaccctacatataaatgcttcattctttacaatattcatagggacttcctgaagtgcactatcgtctcatcagcacaattaattcatctactttgactacacttcttgatttccccccaacaaaacttgttgata

SEQ ID NO: 101807 - DNA, 2735 bp, Zea mays
  Clone ID: MRT4577_24357C.1
gatatcatcaaatctggatgaaaaaggaagatgagccgaaaactagcttcataactccaagtggcacgtattgctatcttcggatgcctgaggggctcaaaaacgctggaggaagtttcagcagaatgactgcgaaggttctccagtctcaaataggtagaaatgtgttgacctatgttgatgacattatcgtcaaaagcacgaagcaagaggaccatattgctgatctgcaggagaccttcgccagcttcagacaagctggtctgaagctgaatccagagaaatgtgtcttcggagtaaagaagggtaaatttcttggatgcttagtttcaacaaagggaatcgaagctaatccaaataaaatcgaagctatacttcgaatggagccaccaactacaagaaaaggggcccaaagattgacaggaaggctggcatctctcaacagatttatatccagatcagcagaaagaaacttaccattcttcgaggtgctgaagtcagccgaagtctttcaatggggcccaaatcaacaaaaagccttcgaagagttgaagcaatacttgatagatctcacaacattaactccgccaacgccaggggctcctctgttgttatatgtggcagcttcgcactcagcagtaagtgcggcgcttgtccaggagaagctttatggccagcttaagaagcaagttccagtgtactttgtatctgaggtccttagtgtctcaaagaaaaattatacagagctggagaaggtgttgtatgccgttctaatggcatccaggaagcttcggcattattttcaggcatataatattattgttccttcttcgcagccgttgaaagatatcatgagaaataaagaagctactggccgaattggaaaatgggctgcggagcttaatgaattttacattgattatgtgcacagatcctcgatccaatctcaagcattggcagattttattgccgactggacgccaggggctcaaggcgaagaagtgaataaagatgccgaagcatggacagtgttttgtgatggctcctggggaaccttcggagcaggagcagctgctgttttggtttcaccatccaaggttaaaacttgctatgcagcaaaactggacttcagctgcacaaataatattgctgagtacgaagccttgctcctgggtcttcggaaattaaaggcaatgggaatcagaagggcaattcttaaaactgattcccaggtggtttcgggtcatgttgacaaaagttgcaaagctaaagatccgaagcttgaaaagtatctagatacggtccgaaggatcgaggcatccttcgaaggattctcggtcaagaatattcctcgaggacaaaatgagcatgctgatttgctagctaagtctgcggcacaggggctgccgttaccctcggatgtgtttttcgaaacaataaaggcaccttcagtggagctccttgaaagagcagtcctcaacatatctcctgtttacagcgaagattggagaactgagataatttcttaccttcagggcaactttctatcagatgacgaagcttataataaaagaatagaggcaagagctcgtccgtatatcattatagaaggggagttatacaagcatggagtttgtgccccgttgctcaagtgcttgtctagagccgaaggtatagagttgatgaaggagatacatgcaggcctttgtggatcccacatcggatccaggccgttacttggaaaagtgttccgccaaggattttattggccgaaggcagcttcggatgcagctgagttagttcaaaagtgcgaaggttgtcagaaatgtgcaagagatcaaaaacaaccttcgtctttgacacagctaatacaacccatctggccattgcaaaggtggggcctcgatttgctgggcccattaccaccggctcaaggcaatctaaaatatgttgtagttgctgtggaatatttttccaagtggattgaggcgaagccattagctacaataacttcggccactgtccaaaaatttttctggcagagtattgtctgtcacttcggggtaccgaaggcaattactgtagataatggaacgcagtttgactccgaagctttcagaaacttctgtaatcaaatcggaacgaagatccattttgcgtcagtcaggcatccggagtcaaatgggctcgttgaaagggccaacggcattataatgacaggaataatgaagttaatcttcaatcaacccaggggaaagtggccagatcagttaatcaaagtggtgtggagccacaatacaacaacatcaaggtctacaggctttaccccattcaaattattattcggtgacgaagcaataactccggaggaagcaaaagctggatcagtaagagtagtagcttcggcagaatcaggccccgaagatgcttgtcttgtggaaaaagatgctttagaagggatcaggcttcaggccgtggagaatattaataaatatcaggctgaaacagtcaaatggcgagatagaaaagtccggctaaaaaatattgagccgggacacttggtgcttcggagagtggttaacccagatacagtgggtaagctacagttgaaatgggaaggaccattcttagtagtatcttcgtcaaggcctggatcatacagattgaaggacatggatggcaacgaaattccaaggtcttggaatgcggatgagcttcggcgatactatgtataa

SEQ ID NO: 101808 - DNA, 917 bp, Zea mays
  unsure (1)..(917): unsure at all n locations
  Clone ID: MRT4577_24358C.1
catgacgaccacgcgcgaccgtggcgccngcggcggggcgacatcgagggtgggtggcggnnacatcgacctgggcgagggctgggactggggcgccatcccgcggctcctctcctccgcctgcctattactctgctccggaggctgttttggttgctgcgataagactgtaaagcaactgggtgaactgtccagaaacttgatcacccaggaccaaattaccattggagagccattttggagcacaaccacgggcgccatcccgcggctcctctcctccgcctgcctcttcctctgctccggtaaattggctgttttggttgctgcgataagactgtaaagcaactgggtgaactgtccagaaacttgatcacccaggaccaaataaccattggagagccattttggagcacaaccaccatcgaggttgaaccagcagatctcagcggtgttacttcagtcaatacatctaacttggcctctggaactggtagcagtcataaccttcctggacttggtaataatggacttattctgtgggaacatacaaggcaggagtggactgaaactagaagtctacggctgaaggcgaagcaggttcgtgaaccagtattgaggtatgagtgaatgaaatgacaaccagaacccaaaaagtttacctttacccatgtcacgtttctgtcagacaagtatgtattctataaagtacatttattttaccaaatgcactttggcccttcttcatattaaaagcaaagggttatgctgggatcaccagcttttcagatcaaacctcagaataacatgttcgtctatcatcattttagctttcagtaacaattttgtctgcattcttatggaaacagaaatattntcatctataatttagtttatatttagaggcataattttgttct

SEQ ID NO: 101809 - DNA, 409 bp, Zea mays
  Clone ID: MRT4577_24359C.1
ggaagaccggaccaacttggtgaaataaattatttttgccaacttccatttacaaaaatttttacaacaacaggatggggaagttgactcctcaatttttatttgtgacaaatgcatcccccggttagctttgaatgaaacttactcacaacggaagttacaaggcctatttcacaggttaaatcattgacaaaaaattcccaggggtgggtacaaacgcatgaccgatttttttatgcgggcaggcccatgttttaccttttttttaggagaaaaaccccacggagcctgtgccgtgcatcatgaatttgaaaggaaatttttattaagaagttaacaacattggtgatctctttggccctttttactaagatcaaccccagggttttacttgcagatttttttttta

SEQ ID NO: 101810 - DNA, 319 bp, Zea mays
  Clone ID: MRT4577_2435C.1
atatttaccaaaacctaattatattttggggtttgtttgtttaaagaaggtacagattgacaccaatactgtcaacccaacctgggtgttcattggggagtcacaacttagaactccatacgtacgcagatagctagaccatgtcggaaaaaatttatgctgattatgtacagggtagaacttggaaagcaaatatcccattgttgatgaactgagcccagtttatatttttttggaatttatttagagccttttccaatgcagtattaattacctagcgtcttgaccaaaggcgggattcggccataagtggggggcc

SEQ ID NO: 101811 - DNA, 360 bp, Zea mays
  unsure (1)..(360): unsure at all n locations
  Clone ID: MRT4577_24360C.1
ctgcgcgcacagacgcaccgagcaagatttgcatcctatcctgcggctgtagtgtaagcagaagtctaggcgcggggccaatgaatagcaccatactgttggttgactctctgtagaccgcgcgagcgcagtggtggaccggggtgatgctcctgaaggcatcatagccgacgcggctgcatggcaaaggtgcgcgtttgagttgggcctgctgctgctgagcgacatggtggaggatggctacatccggaccgcgcctttcgtgtggctacgctagagtaagcngcctacgcacatgctacgcccgatcgagcgccaggtctcgctcggagccgaggacaccaccttagtggaggaccg

SEQ ID NO: 101812 - DNA, 326 bp, Zea mays
  Clone ID: MRT4577_24361C.1
gatgcagcgtagtacagctcggaccacatgttttgtagccatgtaagcttgtcccgggaaagagaactgtcctgcagctgaaatggactgttctttactgacctgctcagcagtttcttctctcataaattcccaaaacaagtacatctgcgatcaactctagccaaatttgcccctgtgtgctacatgatggatgattattattttaaggtctgtttagcgtagtcctggctacttggccagccatgcctggctttggtagtatagtatgattctcaccattatttgtcatggaggcaacatacaccagaatgggggagaacgta

SEQ ID NO: 101813 - DNA, 409 bp, Zea mays
  unsure (1)..(409): unsure at all n locations
  Clone ID: MRT4577_24362C.1
cacaccaagtttaccacttttacaacctttcaacaaacgctaccaanatagtaaccttggttgcgcttatcgcccttatagtcaccccaacacaagcgttcattattccacagtgctcacttgctactagtgccattactccacagatcctcccaccagttacttcaatgccctgctaacatccagccgagcaagcctacatgctacaactaccgcttgcttcgagcgtctcacaacaaccaattgcccaattgcaacaacaatccttgtcacatctaaacctacaaaccatcgcaacgcaacagcaacaacacattctgccatcactgagccacctaaaccaggtgaaccctgtcgcctacttgcaacagcagctacttgcatccaacccacttgctctggcgaacgt

SEQ ID NO: 101814 - DNA, 441 bp, Zea mays
  Clone ID: MRT4577_24363C.1
taaagaacaattacgacgcagcaggcactcctacaaacatctatcactctatagcgcccgccctctttttttttttttttttttttttttttcccgcttttttttttttgtggttttttttttttttttttttttttcaaattttttttttttgaaggccaaaaaaccaatcaccaaatacatattctacaaataaaggttcaaaaaccaaaatgcaactccaacaacaccctttaaaaattgcaacaactaaaactgccaaaaatttaaaaaatacccaatttaaaaaaaccaaacttttttaattttggaaatcctttccactgaaagttcttaaaaattaattaattaacaaatccccaaagcccaacccgataaacaaaatccattggaatttgttacaactgcctttaaaaccgtttgaaactccacgtaaactcc

SEQ ID NO: 101815 - DNA, 245 bp, Zea mays
  Clone ID: MRT4577_24364C.1
agcagtggtaacaacgcagagtactttttttttttttttttttttttttgtttttgggagccactagtttgcatgcggtttgaaataggcataaagcaggggacggagttacagacaagtgcggcacagagagaagaaaaagatgagtaaatgagagcctgaggtggttggcgagggcagtttaaaatagagggggtgtggggtgcggttggtcctatgacagtggtgggccgagtgttatgggg

SEQ ID NO: 101816 - DNA, 517 bp, Zea mays
  Clone ID: MRT4577_24365C.1
cgcatgcaccgcacggagagcaagcaagaaagcaaccactgcactgccactacctaacaatgggccgcgcctactggcttgtagtcgagctcctactggccgctgtcatcgtggcaccgtacgcgggagcgacacgtgtcgacgtcgttgagggcatgtgtatggcgaccgccaacgagccgtaggccgtcgaaccatgacacgcgtctgactccgcctgggcaccggactgcttgtgagatgcgccctccagcagctgctcctcgtactagatagatagctgctagacgcacgatgtcgctatacatctacacggcgatcgagagctagctgtgacggcatgcaatgcaaaagtcccattctgctagaataatgaagcacccaaggaatgtgcttgcctcactgactactagtacctcgttgttatatatgcctgctctgctgacgctgtgcaattgtaatcttgatgtatgcaacatatgtgctgaatggaaaaatcgacttgtatgtgccagtc

SEQ ID NO: 101817 - DNA, 468 bp, Zea mays
  Clone ID: MRT4577_24366C.1
gcgcatgcctcggcgctcggcttcctcgccagcgacattgtgccgaccgcgctgctccagatgtactccgggtgcgggtcgccgagggacgctaaccaggtgttcgacgaaatgatgacgccggatgtggtggcgtggaactgcgtgatgcactgcaacgtacggtacgattacctggaccgcgccctgcggaagttctgccggatggtgagcactgggctggcgcctacagagagcaccctttcttcggtgctgagtgggtgcgggcgctctggggacttgcaccatgggcgtgcgctacatggatgggtggtgaaatcagaggagcttgatcctgatttgcctttgcataatgcgctgcttgatatgtactgctgctgtggtgatctagacactgcagtacttgtgtttcggaagatcgaaacaccagacttgggggcatggaataccataatttctggattttct

SEQ ID NO: 101818 - DNA, 162 bp, Zea mays
  Clone ID: MRT4577_24367C.1
gcaataacacaaagcctattgattatggctgtcgatgaaaaagggccatttcaaaaactacattttgcaaaacatagagccctgtttttactttgcaacaagagattacggatccaattgtaagagaataatggtgatgatccgtttcgctcgcaatcctta

SEQ ID NO: 101819 - DNA, 1792 bp, Zea mays
  Clone ID: MRT4577_24368C.1
accgcgacatcactcactccgccaccgccctctacacctcgcgctcccaccgcccggtgtcagatctcgccgccgcgatgggctccgcccactcgtccgtctccaccgccggcggcgaagacgaagaagacgacgaggatccgtccgcggcagccgtttcctccgcgggcgcacaggcgccaccgcccgctctgtcgccgtcgccggtccgcgtgcccccggcctccgcgtccaaagtgctggagcaggagcccgaggtgctgccgtgcctcgccgcggactcgccgctctcgccgcagccctcggcggcgggcaccccgcgcctcctcgcgggtcccggcatcaaggtctgggacccctgccacgttctcctgcccccgccgccgccgtctccgcacgcagggaggcaggttgacgccgcggccatcgaggtcgttgtggtcagccacggcgagtgcgcagccgcgatgcgcccggaccttgtcggcggccggtggccggccacggcgctcacggcgcgcggggagcgtcaggcgcgcgcgctcgctgtgttcctgcgctcccgcggcgccaggctcgccgccgcctatgcgtctccgcttgaccgtgcgcgcgccaccgctgctctcgtctgtcgggaacttgatttcccagaggagcagatccaactatcagatgctttgactgaaatgagtcaaggtcagtgggagggctgcccaaaatccgaaatttataccccagaaatggtcaatctgatggaaagcacccaacctgatttctctgcaccatccggggagtcactcagacaggtacagtttcggatgatggaattcctcaaccggacagtcctaagactaccagaaaaggtggcaatgggggacacactgtcacaacaaaatgagttgaaggggttctctcggcagagctccagcaattctgtccaagatggccctccttgggattcgctttacaggctcaaccgacatagcctccaacgaaagaaatctgggaaaagccgactccagtttgtcacttcaggggacaatgaagctgaagatgatttctcccctaaagaagtaaatcagaggcatctccttcatgaaggaagtgttggcagctcagcagcgacctccattgctattttcagccacgtgacccccatccggtgcctcatcgcaggcctgctagactgcaaccctataatgtccaagagaatatgtatagacgattcctcggttacggttcttgagcattcgctgaagacaggatggcagataaaaaggctgaatgatactgcacatctcaggcttctctagctgatcagtgtgtcactgtaaagaaactatctgatagcattctgcaaatcagatgctgaaaccacttgctgcacgcatgtactatgcggccatcacaagtgtggtctcgtcactgtatttcaattgtacctatcgaatgtttctactcaatgtagaagggttggcctgtactggcgttgtgtagtatttgttgttatttttatcaagattatttctcaaattgtagttttccatcagtgtctagttactttttcttggtgggtagttagtggggacacatattagcgcaccattctttttggcagaatatttagcaagtttgtatacttcaggggtatgcagaatgaagtgctgttgcaaacttgctgtgtaactgccaatggcacaattgtttgtattttgcactataatgttgcacaaaatgtcggattgcaatcctctatccaaaaaaaaaaaaaaaaagtttgcctagggcc

SEQ ID NO: 101820 - DNA, 406 bp, Zea mays
  Clone ID: MRT4577_24369C.1
ttatattttttttttttttttttttttttttttgtttttttttttttttttttggtttttttaaaagggaaggaaattgccattgcaattgccctaaaaatgaaatttggtcatgctttttccaagaggttttaaaaccctttttaaaattcttccaactcgttctgacctggtttggggttaaaaaattaagaaatttagaaggaaatcctctaaaaagggggggacggagcgatcaccggggggggagcacccacgggtcgcccgggccggggtccgccttggatgccgggaggaacctcccctgtttgttctctgggaggcaaaacagggatgccttgaatgccctctgggcgggggggggggggtttaaaccggggtcctggcttaagagggggcccccctt

SEQ ID NO: 101821 - DNA, 384 bp, Zea mays
  unsure (1)..(384): unsure at all n locations
  Clone ID: MRT4577_2436C.1
agggggaaaacctattttaaaaaaagaaattaaacctggcgtggggggaggatcttttacctagaaaggggacctcgcccactggggggttcggttgcccgttcaacccccccggacgggggtttaaaacgccagggaaaaaaaaaaaactagacaacaaatgggggaggccctggaagctttggaaattaatttaacacgaaagacaaaatgggggaattcaaaaaaccagtttgggttactcacggccggaaaccttctggaaaaaaaaaaggaaaccgaagccacaaaaaaaaacggaaaaaatacatccaaggtgaactttttccctaaaaccaacacgccctttttaattaattcggngggaggaaacccgaaggggat

SEQ ID NO: 101822 - DNA, 596 bp, Zea mays
  Clone ID: MRT4577_24370C.1
ctcgttaaactgactgaaattaatagctttaatcttctcaatctatcccatatatgaactaatctgccatttgaaagccagtgtgaccctccttcacaacggtatccatcagcctgcttgatccaggaatacccaacagggcaagccccaagagcccttaacttctcctgtctcttcgcttcttcttctcgtcgtttttcttcctcaactagctggcgcataatcctttctcgagcttcttctgtcgcaactttctgagcagcttccttgagctttaggtactcggcttcccttcgttcttcttctgcccggtctttctgaagctggtcccagatttcgtcgcttaccccggcgtctcgtatcactttgcggctgcggttacccacgggcgactcaggtggcgtaggtgctccttcatctgactcttcggtgtcagttgcatcggtcttttgttgggtttcgatgttcgtatgggtgcgaattgacagggctggattagctggggctgttggcgcatgagaagaagctgcctcgccatggaaacgtgctggaggagcagacttgaccatcttagattgtcggtctttgagcatctg

SEQ ID NO: 101823 - DNA, 213 bp, Zea mays
  Clone ID: MRT4577_24371C.1
cagaagacggcgataacaaagatagagtgacacatgcactgaatgctgataaaactgttgatgataaggacatgggcacatgtgttacctatcttgttctctatacattataaggatctggtaaagatagcaacaaggagctggacacgaaaggaccgggagggcgagaccgcagtacgctgtggaaacagctgtacgagcgattaggcccaa

SEQ ID NO: 101824 - DNA, 798 bp, Zea mays
  Clone ID: MRT4577_24372C.1
atgtcgggagaacacgccaagagggagattgtgactggcgaaaagcccacaagctcgaggagaactctctcaagagactccagtaacaagaacaaggaggaatcctcttcctccaccaagtcgcttcggagaggtgacaagaagaagaagatgaagaaggtggtctactacgagaccgactcttcgtcaccctccatatcgagctccgagtcatccgtcgcttctaagcaacatgagcgcaagaagtataaggagtataataaggtgcaagggttaaagaccgccaagaaaatttgggacgtcctcaaaacggcgcacgaaggggacgaggtgaccaagatcaccaagcgggagacgatcgagggggagctcagtcgtttcgtccttgacaaaggagaagagccacaagcaatgtacaaccggctaaaaaccatagtgaaccaagtgcgcaacctcgggagcaccaagtgggatgaccatgaaatggtcaaggttattctaagatcccttgtttttcgcaatcctactcaagtgcaattaattcatgaggatcctagatataagctaatgtctcctgaggaagtgatagtcaagtttgtgagctttgaacttatgatcaaagactccaaacatattatcaacttggagcaagggaccacctcgacacccgaggtgcaacccgtcacattcaaagcgacggaagaagataagagggagtctacaccaagtaggcttcaaatcgacgcctccaagctcaacaatgaggaaatggcgctcatcatcaagagcttctgctaa

SEQ ID NO: 101825 - DNA, 175 bp, Zea mays
  Clone ID: MRT4577_24373C.1
gcgatatgcttaacctcactaacaccaactagctactctatctctcctccaataatgggcactgtatactcctcctcccagacaaagattgtcgatacgccatctatcatttcaacttcgctactgctgatgacgtccagaacaccaacatcttctatatcctatgagctccatc

SEQ ID NO: 101826 - DNA, 633 bp, Zea mays
  unsure (1)..(633): unsure at all n locations
  Clone ID: MRT4577_24374C.1
ccggcaaacgcaggcancngcggttggggggcagccgcgggggggagccggggggaggcgccagagcgcccnccgcgcggcggccgnganccacnccnagaccccggaggcangcgncaagggcggcggngaccaccncagngggcacccgccgnngcgncgcggccgagcggganggcgncgacaaggncaaancncggcggcgaggggacnnagcgtttttttttgggnccctcggttgttgatccccaacacaaaccaccagccaccgaggcgccgcaagccgccccttctcaagattgagatggatgccaccctgccgctcaagaaagccaagacaaggatgggcactgctctggcgaatgaggtccggatgcaggagaagcccacatagaagtcggcgccggccacagagcagatcccgacacccgaggagacaatgagggtgcacaaccgtatcatggccttctctgtcatggagattcgtcgagccatgcttaggctgcggtggtggttgacgacgccggatgaggtggtgaagcatgtccttctctggcaaggagatccgctagaccacactacggactgctgcggccgggacacaggctgaggtggaggcggccgggtgacatg

SEQ ID NO: 101827 - DNA, 540 bp, Zea mays
  Clone ID: MRT4577_24375C.1
ccaggatatagacccaagaagctatatgctaggctgctaacgtcggagagagtgagacccatgaccctaaaacatacattgtatacttttcagatttcatttgagtcaaagacaaaaagaaaggaaaaatcattttttggtatttgtcgggcaaggaatatgaaaaccatttattttgtttatatgagttactcctttccctttcctcaactgttctatatcttggaaataatctctgaggatgaacaccacggttcagttttagagaccacacagttcaccaagtatgatagtggtcgtttaccatttcttaactaaatatctgaaccattgttgttttgttcgagtagggaagggaagttgtgttcatctggcaatgtgataaaaataaatatgcattgtgttgttcttttactggataaatatgcaatgtgataaaaataaatttccttattattgaagatggacataaacggcgtctactagcccatccacgtcatcggaaaactttgtagccgttcaatcatggatcattggtcc

SEQ ID NO: 101828 - DNA, 533 bp, Zea mays
  Clone ID: MRT4577_24376C.1
cggacgcgtgggttgatttataagtgccagtattttgggagcataatagacactaagcttcaaacgtttggtcaggttcatcatttttaatgcagcaacaccaatgagccccttctcagcacaatgacattgtttacatgtatgcatttttttcttgctattgttatgaagaagctttatttctgaaatattgatttccaatttatgaaatattgattttaatttctgatagtacctttggtgcatttcttaacttctttattccagccttgggatactgtataatcttaccaaatgaacatagataggtctatgtttggtttatgttcattactgtcatttttctgttgtgtgctctgacaaggtggacttaacacaccctaatctactatgacaaacagagcagggcctgctgtagccaatgagttggatacagtggacacaatcacatcaattttgcggttcaattactttgcaaaaggttgtatatgcagcctctcttttgtagtcaactcttttataatggctaaacc

SEQ ID NO: 101829 - DNA, 252 bp, Zea mays
  Clone ID: MRT4577_24377C.1
acaaaaccaaacataattacacaatgcttcacttacttctaattccattattttacatttcctcccaccaaattcttcaatgatctttaaacacctaactattcaatccaacatttcaacatcaatctctattctttatctttttacaaacaaccaattttccaattgcaacaacaaaccttgtcacatctaacaatacaatccatctcaacacaacataaacaacaatacctaccaacacttaaccaccta

SEQ ID NO: 101830 - DNA, 366 bp, Zea mays
  Clone ID: MRT4577_24379C.1
ggggcgggaatcccggggggccccacgtccccacgagtccccagaaattaacaagctggggcggcggtagaggaggacctcgccatatgagcagagccctgagcctcaacgcccggagtttgccggaaaggccgccatcctgccagcagcgggcgacgaggccgaagacagaggggagaggcacacagcagacgaggaacgagaagacaggggcgggctcccggaggccgggggaaggagccgcccgagggcggcacgcggccgatctgccaggcgagcgaggttactaccagaactgcgagaacaccggagaggagggatgagacaccagagagctgaagaagaaccaggaacacatggaggaag

SEQ ID NO: 101831 - DNA, 442 bp, Zea mays
  Clone ID: MRT4577_2437C.1
acgcgctggcaaaacatgcatatggagaaaataggcgcacacctacacatgccaactagccactacactactatatactaggagggacggcacatatgtcactgactcgcgataacataggccaaattaatacggtggtacacaccagcagaacaagaacaacatttcacaaacacaggtatatatatagtgatgactagctataatagagcatgcgtgcgttttacataaccacaaggaccagcaaacatggcctgttcactgaccatccatctcgaccgatctaacggtggacgctgctggactaggcgctgaagagccagacctaaacagggggggagttgggctgaggccggtcaaacaggtaggagcccatgcgcctggtgggcaaggtgattcccaaaaggaagacgctgtgccacacgttggcggtgccaaacgg

SEQ ID NO: 101832 - DNA, 230 bp, Zea mays
  Clone ID: MRT4577_24380C.1
tcccgggtcgacccactcgtcctcccactcttcctcccactctttcgaattaaaaaaaaaaaaaaaaaaaaaaagggaaaattaaaaaaaaaaaataaaaaaaaaaaaaaaaataaaaaaaaattttttaattaaaagcgtccgttctatagtatccaagcttacttacacttctttgctacttcataccttttttattgtgtcacctaaattaaattcattgtccttct

SEQ ID NO: 101833 - DNA, 1073 bp, Zea mays
  Clone ID: MRT4577_24382C.1
aaatcggcaacatcccgcaccaacgcgtcccgggcaactccgacctcatgcaccgggcgggcagcacgcaccggtggagccccggcgcccgcgccttctccacggcgccggctacgcggaccaccgtgccgctcgcgcacctggccgctctcccggcgtctctgccagaatcgggctacaccgtcacgccgcctgtccaaccctggccgcgccgcctcaccgcgcggtcgctgtcccgtctcctcctcggcgcggccacgcccgagctcgcggtcctcgccctccgccacgcgctcttccacgccgcgcatcctctgccgccctcgctccccgtcttcgccgcggccctctcccgcctctcccacgccgacgctggcgccgcggcccgccacctgccccccgtcctctccctgctccgcgcctcccgcctcccggccttctccgaccgcccgttcctgccgctcctccgcgcgctgcggccgctcccgtccctccgccttttcctctccctcccgtccttcaactcccgtccttccacccgctcctttaacgcgctcctccactctctcgtctccgcacgccgccgccgcctcgccgccgcgctcttccgggccgcgccaaccaagttgtacatcacgccgaaccttgtgtcctgcaacatcctgctcaagggccttgttggcatcggtgacctcgattctgcgctgaaggtgctcgacgaaatgactggatgggggatcgtcccggatgtcgtcacttacacgacggttctcactgcctactgtgccaaaggggatctcgagggtgcacagcagctctttgacgatattattgccagtgggcgtaggccagatgctactatgtacacagtgctcatagatgggtattgccatcataggaagttgcaagatgcagcaaggatcatggatgagatgggagctgctggggtgcagccaaatgagggtacatactctgtggtgattgaagcgtgctccaaggagggaaaatccacaaaggcgcgtgatttgacaagggagatgctaggggcacgatttgtaccggacacaccactg

SEQ ID NO: 101834 - DNA, 422 bp, Zea mays
  Clone ID: MRT4577_24383C.1
gacgatctctcagacggtttttcatgacttttgtcaaagctagtatggagcgaactctgggggataagcacgtgtgaaaaccggacgctgatgtctgtctttggctaactgcacaaaccacgctataaggatcataggaccaacaatagagtgccagcggagttggagagccgatgagcacccagggaaaccgtgagacgcacgatgcatgagtgccggggaaactgtgagacgcacggtgcagcagagccaggaactaacgaagcaggcacaggaaaagcagggcaattccataccgattgacaagacgagaagttgcccgaaggtgagcaggtacagtatggaagtgaacttgaaggctgcatagatgatgagaaccctggcaagaggctggtttaggtactctggtattaatgaatact

SEQ ID NO: 101835 - DNA, 867 bp, Zea mays
  Clone ID: MRT4577_24384C.1
cgggtcaccacggtgggagtgtgagtggaggtgggtgctgcgtggaaaggcacatcgagcccggagagttgacagcgcgggcacaggcatgagagccggatcgattgcgggagagcagcagggaagacatgaagtactgccttcttagttacttgcagcttatctggcacccgctgcacatagctttgtacagctccttgtagaagcagtctgggtcttgctttggaggtgaccgtgcgctggtcctttgctccaagaattcctttagtctgtagattgtttatcttcttaagctgattgggaatctaaccagtgaaatcgttgttcgcaacattcctagaggcaagcaggttatgagctatggtactggacatgcaaatgaagcaccaaaaatacccatcatcatctcacatttcgagaaatttgctattttgccactctcaattttggctgcctattattatgccatcccgtgtctatgactggtgggaccgtctgtgtctatgatttgtgggtccgatggcatactggcgaagcccacaaatgataatggcaaaattgccaatggctcatctcatttcctaccaccgtatcagcactgcaggtaatatagagagagcatcaggcatgagatgtcatattcttgttttgtttttaaaaaagtcattcttgttgtgttacatgtagcaaaatgtaccttcagtttgtagcctgtaagaatactggattcttgcccactcatagctaagacctagagaagtttatgacagcccacattacctgtcccaaccttcctattttttactttcataaataaattttttgtgataatgctctttatatatcttatctgtaacagcccgcacg

SEQ ID NO: 101836 - DNA, 385 bp, Zea mays
  Clone ID: MRT4577_24385C.1
ctttattttttttctgtttttttttttttttggtttttttgcctgcgacgacacccgccagtatacacggtgtcattgcaagacaagatggtttccttcgagatgaatgacctcaacaagaatgggctcggccagacaagcagaggaatattctaataacaacgggcaaaagtaaacttctttgacaaggggctcatcgcaatgggcaataaccaaatcctgacaggtgtgggaaagacaatatggactgaaaccaactatgcagatcttcaccaagccaaagaattacaagggtactatctcatgtcgagctggaagacttctggttctcattgcctggccggttattggcatgcacttagaggcatatggccttatcgtactc

SEQ ID NO: 101837 - DNA, 373 bp, Zea mays
  Clone ID: MRT4577_24386C.1
tgacactatagaagagctatgacgtcgcatgcacgcgtacgtaagctcggaattcggctcgagcgctggatctctactggctcatcgagaatgcctccacgctcctgatgcatctgtcttggtacagccatgacacggactccaacttcatactaatccttgacgacagcaagatccaccgtcttggccgctagctacaagcgtctcaagctgctgccactcacctggatgaacccgtcaaccacggctagtcctaatctgacataagtggcatcctctgatagcttgttctttaccatcaatacactgaacttaaatgtcaaattatgtgatctatgtttttattctacgctacatacattgacatggaacc

SEQ ID NO: 101838 - DNA, 652 bp, Zea mays
  Clone ID: MRT4577_24387C.1
gccggccgttccgagaagatagatctgtgaataggtatatgacggccaccgagttctacctggtcgcggcgcgagccgaacgaaagatcggggagcgctagctctaccggaggccgatcaaggacaccctctcctgggccgtccaccggccccctcttactatgaggcatgcgtcgcctcctccctccacgatgctcaggcagccgagacgcgcatactatgtcaggagctccatatgctcctcgaccatgctccacggtcatgacaggaacttccaatgcctcaattccctacattgtgtgcatgggtgaccagtgagtcactaaactcagcaagaaacccgcctccgcctcaagggatctagatgatctacgattatggcaagtacgacaagtagacatcagtgctgcccacggaaagacaactgccgctgttccaaatgacttcgtggtcaatcaaatcgatgcaccagagacaggaaaggagattactgggctccatacatgattcgcattggctggatcggagaatactatgctcttcgtcaagggaagattgaagagatgtttcctcgtcataacatgtgattgtactatctcttgtggaggatgatacaaacatcgaaagagtgcccctactcgcaagtgcgctc

SEQ ID NO: 101839 - DNA, 403 bp, Zea mays
  Clone ID: MRT4577_24388C.1
actatagaagagctatgacgtcgcatgcacgcgtacgtaagctcggaattcggctcgagctcgtcaagggcatatgccaccacttcgtccgatcggggtctcgcgtgtttggggagtcatgtagatactttcatcccaagccaggtcgtgcccattcatctttctgattttattgcgaaccaaccggatttcgatgtataccaggcggtatacatatattcttcctcacatagaatagcgctgtgtgacatgctagttgcttatcatattatcacttaagacagctgtcatgccatgatgctagcccttgccacacagtcattctatttggacattccaatttactacgtcatgtgccaacggctccattggatagtgactacctgcctccagagactgatcg

SEQ ID NO: 101840 - DNA, 556 bp, Zea mays
  Clone ID: MRT4577_24389C.1
cgagtaccatccaccatgggtcatctcgtcgtgtccctgtcactcctcaaccacactagtaagtgcaccatgaggtcgaatccggctggaatgttgttctggcttcacggtcgtaacgaattatccgaccatctaagtgtataagcataaattcaacatgtctcaagggaccacaatggtacggtccttaatcgacacaggcaggatcactatggcctacatgatgctcataagagtctgcccgatctcaattttaattctttatttccatcgtggatattcctgatgactttatcccaaatcaagcataagtaaccacttatatctcgcaggtgacagaagatcacccgacttctactgtctaaacaggcctaagcattttaagcgtgcttactttaaacgagtgaaaaggatagggtaaacaaagtaatcaagggtatatgcaacaattggtttcaatcaactcctatacctaatgcaacaatataggtaggcagtgaataaattaaagtattgcaaatataggaagttagatgctggggctcgcctttctcga

SEQ ID NO: 101841 - DNA, 620 bp, Zea mays
  Clone ID: MRT4577_2438C.1
ccgggatggccgcggtgcccctccctgctcgccatgtccctgttgcgagctcttccctagcgctggatttctctccctgcgcgcgctcctgtgcccatgcggagctcccagcgtcgtgtccccttccctctgctcgctcggcgcccatctcctccggcgcccacacgaagctccctccagctcgcccgagctccttccctgcttccatggccggtgggcacttggccctgctcgcttcttctcgcgcgcacaagcttcttgcttgcttgacttcctttctctttctttccatggggcgcaatcctttgggcccgggccccaacgccaccgggcatttttcggttggccagcggtcctggccctggttgcccgtcccagcctgggcccccggggagccccgccgtgggcctttctgggggctcctggttggccctaattttggtccttggccgggcggccatccccaactgggcccctccggttgggttttggccccccacacccaggcggtccaaatccccgttccggtttgggttaattgggccaccaaccgaataatttttttcctaggggccccgaatttcaattccctttcttccttgcctttggttccacttgga

SEQ ID NO: 101842 - DNA, 4653 bp, Zea mays
  Clone ID: MRT4577_24390C.1
atgagccaaagaccaaggaaaaagaatagggagaaaacacaccccgaaaaacaaaccaaaaatccccaatccatgaagcccaccacttccgccgccgccgccgccgtggcggcggttaccgtcaccaccgatgacccatccccttcgccgtccgactcaacgtcggcgacgttcacggtcgaccgccgtggggacgcttccgcctcctgccggtggacgctcccggacttcccccgcacccgcgcccgcaccttctacagccgatacttcgaggtcggcggcttcgactgccgcctcctcctctacccgcggggcgactcgcaggcgctgccggggtacctctccctctacctacaggtcctcgaccccaaagccccggtgtcgtcgtcgtcatccaccacgaccaccacctcctccaaatgggactgcttcctcagctaccgcctctccgtagtccaccccaccgatccagccaagtcgctgggccgcgattcctggcaccgattctcgtccaagaagcgctcccacggatggtgcgatttcgcgccctcctcctccgcccccttcctcttccagccccacgatgccctcgtcatttctgctgacatatctgtgctgtctgaggcggcctctttctccgatgccgacggtcgttttaactggaaggtgctcaattttggcctcttccgagaaatgatccgcacacagaagatcatgagccctgcattttttcctgcatctgcctctgctggcgggactgactgtgggctccggattagcgtctatcagagcaatgtatctggcgcagagcatttatctgtttgtctggaaagcaaggagcctgttgtgcaggtagcatccgggtcatcggcattggcatcaggtggtacagggagtggtgtgccagatggtgatcgtgggtgctggtgtcttttccgcatttcgatccttaatcagaggtctggtgggagccatatccacaaggactcatatggtcggtttggtgcggacagtgccagtcttggttggggagaatacatcaagatggatgagtttttggctgctgacggcggataccttgtagatggagctgtggtgtttagtgcctcagtgcatgtcataaaggagtcaaactcattcagtcggagcttgccaatggttcctggaatatgtggtgctggtggtgggcgtgctggggctaggaagtcagatggacactttgggaagtttgtgtggaggattgaaagcttcacaagacttaaggagcttctcaaaaagcgcaagatcgcgggtctgtgtatcaaaagcagacggtttcaagttgggaatcgagattgccgtcttattgtttatccacgggggcagtctcaaccgccatgccacctgtcagtgtttctggaagttacagatccccgaaatacaactactgaatggagttgctttgtgagccatcgtctctctgtcatcaaccaaaaagtggaggagaagtcgatcatgaaagagtctcagaatcgttactctaagtcagcgaaagattggggttggcgggaatttgtgacattaactagcctctttgatcaggatgcaggttttcttgtgcaggatactgttgtattttcagccgaggttctcattctgaaggaaacagcaactatgcaagagcttacagatgaagattctgaaacttgcagttcaacttatggatgtcagattgaagctttaccaaagcggccatcattcacatggaaagtggaaaatttcgtgtcttttaaggagattatggagtccagaaagatttttagtaaattttttcaggctgggggctgcgagctgcggataggtgtatatgagtcgtttgatacgatctgcatatacttggagagtgatcagtcatctgggtatgatcctgataagaacttttgggtgcactataaaatggctatagttaaccagaagaattctgcaaaaactgtgtgcaaagaatcttcaatctgcacgaaaacatggaataattcagttctccagtttatgaagacttcggacatggttgacactgacgctggctttcttgtccgggacactgttatttttacttgtgaaatcatagactgctgcccatggtttgatttctctgaccttgaggtttgggcctcagatgatgaccaggatgaattgtcgacagatcctgatgaacttgttgattctgaagaaagtgaagatatgagtggcgatgaggaggatatgttccggaacctcctcttgagagctggtttttgtcttacatacaaagataactatactcaaccacaagttattttaagagagaaaattataacagatgctactgcgatagctggattccttactgatctgcgtgtttatctggataacccagcaaaggttaagcgtatgcttcttccaaccaaagtatccaccaagagtggtggaaccaaagatacttcaaagtgtgattcaagctcaagctccacaagcctcattactttgttgatggggattagtgccttgaagcaggctattatagatttgcttctagatataatggttgaatgttgccaaccttcagaagaaagtggttcctcagcaagcactaaagcttttcccgattcaaatggggctagctctccaccagagcttagtgttgaaggtgatctaacagaatatgcatgcagtgatgtgtatgcgagagttgaatctaatagtgatgatattcgggatagtcctgtaatttgtaatgcaggtttggctgcaactgagattgctgtaaataatatagaacattcctgttttcctccagaaacatctgctgctgatttgccagcagatgaaggctccgagcaggcttcctggtcaaaatgtccagagcaatcagaggaattgttagggttgattgttaattcattgagggcattggacagcactgtcccgcatgggtgctgtgaaccaagaaggcggccgcaggctgtccggaagattgcacttgtcctagagaaagctccaaaacagctccagcaagatttgatttcccttgtaccgaagttggtggatggttcggaacactctcttgcagcttgtgccctgttggatcatcttcaaaggccagatgcagagccttcattgagattgccagtttttggtgctctttctgagttagaacttgaaagtgatatctggaaacaagcatctgttcatgcactcgaattattgtctgactcgaacgatgagcctcttgtagctgccattacttatgttcttaaggcggcatcacagtgtgagcatctttctgtagcggttagagctgttagatggagattgaaagatttgggaactgaagttccacattgtgtgcttgactttttatctaaaacaattcaaacccagctagatgtagctgaagctatattgaaggatattgattctgattgtgagcctgaaaacaattgcctagcatcaacatcaccttctagtacttgttctacagatgggctttcagctgaagggatgtattcttggcaagagcaagctgtgcatggaagaagtcatctatcagatgtttttgcactgatagaaatgttatcaatgcctggattatttgttgaagtcgcacaggttattgagagggctttattgcgagggtcctttggtctacaattagtagccatggtgctggaaagaagacattcttacaggtcaagttcaaagtctgggtctgttgtgaatgattcacagaacaaagaagttctgttagatgggcagtttgaacctttatctgtccaagaaaatgatttcacttcagtccttgcacttggtgaggtattatctctatctacagaaacgaaggttcaagattttgtgcggatgctttatgctatcatatttaagatctatgctgaggatcatcataggtatagaatccttaagggccttgttgaacgagcaacaaatacatcagataactgccgagcagttgacatcgatatggatgtcttggtatttcttgttaaggaggagtatgggatcgcgagacctgttttgaacatgatgtgtgaggttgctgaagttgctcaggctgaccgtgcaaatctttggcaccaaatatgtgctactgaagatgaaaatattcgtcttcgagaggacatggaaatggagcaaacaaatttcaccaatgaaaagattgcactaaaccaacggctaactgagttggaggcaactattggcagtctaaggtctgagctaaaagctgagagggatcgttttactcgtgagaagaaggcattatctgatcagatgcgagagattgagaatcagttggaatgggtgcgatcagagaaagatgatcagattgcaaagctctcctctgaaaagaggaatcttcatgatcggcttaatgacgcagagtcacaactcgccttggtgaaagcacggaaacgtgaagaattaaagaaagtgacaaaggagaaaaatacattagcagaacagctgaagaatgctgaagcttcaaggaaaaggtttgatgatgaattaaaacgttatgcagctgaaacacagactcgtgaagaaattcgaaaatcacttgagaatgaagtgagaaggctgacacagacagtggggcaaacagagggagaaaaaagaaaa

SEQ ID NO: 101843 - DNA, 341 bp, Zea mays
  Clone ID: MRT4577_24391C.1
gggaatgggaacaaaacttttttcttttcatttcaattgttcattcaggacattgcttacactgaccctgccacccatggggaatcctgacacattttttctcaattatcgcccttaaatgactcaaccagctagctagccagcggctttactacaacccatagtttttttagggggggacaccgcccgcaccatcgtaggggcatggaatctgctgttgcaggccccacatccccgtcaggtgctgcgctttttgggccgccaacagccccgagacctggcccttttgtggctgttgttgcaggattgactgtaggaccaaccccaatatcgcctggtac

SEQ ID NO: 101844 - DNA, 1401 bp, Zea mays
  Clone ID: MRT4577_24392C.1
ccatgcgggtaacgggcaccggcgaggtgttgccgaggttgtacacgcggaacggctcgggcccgcgcttgcgtccaccttggagcccgtgctcctgccgaccgtgtcgagcgcgccgaggcagcccctgacgacgtcgtcgatgtaggtgaagtcgcggcgcgcgtcggagccgtcggcggcgcggaacagcgtgacgggctcgccggcgacgatgctgcgggcgaaggagaagtaggccatgtcggggcggccccacggcccgtacacggtgaagaagcggaggccggtgatggagagcccgtagatgtggttgtacgcgtgcgcgatggcctcgccggccttcttggtggccgcgtacagcgacgcggggcggtccgtgcggtgctcctcggagaagggcgcctgggtgttgagcccgtacaccgaggaggaggacgcccacacgaccgccggctgcgggtcggcgtgccttgccgcggcctcgaggagggagacgaggccggcgacgttggagtggacgtacgccgccgggttctccatggcatagcgcacgtcggcctgcgccgcgaggtggagcacgtgggtgaagggcacgacgtcgaagagcttggccaggaggcggccgtcgttgatgtcgccctccacgacgaaactcgtcgtggctgcccagcagcgcgcgctgcgccttcttgagcgaggggtcgtagtaggagttgaagctgtcgatgccgacgacgccgtcgccgcgtttgcggagcgccagcgagcagtgcgcgcccacgaagcccgcggtgcccgtgacgagcacggacagccccgcgggcgccccaggcgccgaccgccgccgcggcgacgccgacgcccgggatctggcgctcccagtgcaacccgccccaggacgcccggatctgtcgcgcccggtgctggtcatgtcccactccagcaaccgcctcgaccagtcgcccgcgcacccggtgctcgtcatgtcccgctccagcaaccggctggaccagtcctcctcggcgtcgtcgccggcgccagtgaaggcgccaatgctggtcatgtcaggctccagcaatcagcttgacagctcgcatccgtcgctgtcgccgaccgccgcggctgccgctgcgctggtactggtgctctccaactccggcaagcggatggaccaggtggggcggaagaagtacgtcaagcaggtgacgggccgccacaacgatacggaggctgtgctgtgttgtgctgagcctgtgtgtgctcggccgtggtgaatggtgatgaaggttcaaggctccatgacagagcattctccgtgatgttctagaggatgttttgccatttggtttggactggtttcagattagctttaataaagttggttcttttgcgcttctt

SEQ ID NO: 101845 - DNA, 583 bp, Zea mays
  Clone ID: MRT4577_24393C.1
attccttgatgcatcagtcgatgggggagggagctttggaacgtgcaatacattcttcattccttgtttcggcggacatggctcatgctctgcacccgaactatgccgaaaagcatgaagagtgccacagaccagaactacagaagggacttgtcatcaagcacaatgctaaccaacgttatgccacaagtgctgttacagctttcctcttcaaagaaatagcaaggattcataatcttcccattcaggaatttgttgtgaggaatgatatgggatgtggctccactattggacccatacttgcttctggtgttggcatacggatgtagactgtggtatccctcagctttcgatgcacagtgtacgagaaatgtgtggtaaagaagatgtggacacaacatacagacacttcaaagcttttttcgagatgttttctgatatcgataggaagttaaatgtagatttttaagcccaaatccttatctttttttcaggtttgaataattagtggaaactaaaactatgattgtcaagcatagtatcaatctatcaaactcatgttctgattttttttagttgcccc

SEQ ID NO: 101846 - DNA, 152 bp, Zea mays
  Clone ID: MRT4577_24394C.1
acgaagctcggaaaacggctcgggccgcatctcaccacaggaataaacccccaccgaaccgcaggaccggcggggccgacagagagaccgaaccggcgacccgaccgagacccgctcgcagacaagacgccccccgaaccaacgcgcaagga

SEQ ID NO: 101847 - DNA, 395 bp, Zea mays
  Clone ID: MRT4577_24395C.1
gttgaagtttaaaagattataccattccacatgttcaaatcgtctcatcctgtattagataagcttttcctttgtatcatttgacatgtttaaaccatctcaatcgatattagataagtttttttttcaatttatactacatctagcctatcatattattcatatacatcaccattccaaactcgatcatttcttatattgcaaaatccaatacaacatatatatatatatatatatatatatatatatatatatatatatatatggggggggggggggggggccaccactattttcctaacctggattcctttttaacctatttttttcattagcccacatgggggggttttaatcttatttaaatatacttttttttgaaaataaaattcttt

SEQ ID NO: 101848 - DNA, 609 bp, Zea mays
  Clone ID: MRT4577_24396C.1
gtagaagaagcacatgatctactgaggcgaaaatatgagctcaatcacttcttccgtaatagaaaatccaaggatgcctatagacctgtatgtttactcacgcgtccgtgacaacctagggcagttcgagaaaacatacaggtctataggcatccttctagaaccgagactgcattaagggttatctggaatcactcaaagacagtattgggaaagcaatattccacaatggctaaaaaacatttacttctttttgaggctatgcgcaaggaatttcctcaagcaaggtttctgtcaattgctcaaacacaattattgcgtgctcatgatgagatcaagatgtccatctcaagacttcagctcaaagagaaagaggatgatcctagcgctgccaatattgtaactagagaggaactcataccatataatgttcagtttacaagtgaagaattcatgtcactctcatctttagcccgtgtaagaggtcaactccgcgacttaaaggttgtctttacatgaccgaacaaacttgccgctcacttccgggaaggcgttcggactggattatgtgccccacatgccgccagcgtgcagattttgagaacattg

SEQ ID NO: 101849 - DNA, 660 bp, Zea mays
  unsure (1)..(660): unsure at all n locations
  Clone ID: MRT4577_24397C.1
gtggtgcacgcacgacgcctcgnggcacacgtacacctgcttcctcgacggcccgccgcagtcagcgcctcctcagggcccgccgcgctgccgcagcttccacggcaggttgtgcccgcgccggtgcagctgcaggttctggtcgcgctggaagcccttgtggcagatctcgcacacgaaccggttcgtcgccatcagcgtccgcggcgacagcgcgatcacctccgcgctcgggtctggtgtcccgggaaggcttctcttcttcttcacagtcagcggcggctgatccgaggggccgccgtcgtctcgcatctccgtcgtggggccaccgaggagcggattggtgtggtaccgcaggaactcttcctccacctccgtaggtgatgcgttgctcacagaagagaagctgctgctactgccgccgccgccgccgccggtgaactccctaccagcagctcccgacatggatccgatgcggatgatagcaatcagctaacctgctgcttgcatgcgccaaagccacacgcgctagcgagatcaacaaattgacaggcagacacacgccttctatactgctatatgcacactcttgtttgtaggagatgagagatggaaaatgaggagttgtgtgttcttccaaaaaaaaaaaaaaaaaagcgg

SEQ ID NO: 101850 - DNA, 158 bp, Zea mays
  Clone ID: MRT4577_24398C.1
ataggaggggtaggtctaccaaggatcctttcccatacacaccgtgggttcgggacagtccatttttttttatacacgggcccccactttttttagcatggacaatcaccccccagggagggttggtggccgtctgatttattttttagggagggggg

SEQ ID NO: 101851 - DNA, 292 bp, Zea mays
  unsure (1)..(292): unsure at all n locations
  Clone ID: MRT4577_24399C.1
cggggacgagatcgggaccggcgactggcaagcggaagggccccagggggggatgctcggnttaggatacgggtccattcacaccggccgcgtggggcgccccatccaggtttgtcatggattccatttggggggggnngntgggtccttcttcgtgcagaatgacatgtgccgactgaactatgggtaaaagacagccggcaactcttgtgatgaacgaattcgctaagggcttgatgtcgagacgaagaataccgactgtcggcgctactctcatatgctttggatgttc

SEQ ID NO: 101852 - DNA, 907 bp, Zea mays
  unsure (1)..(907): unsure at all n locations
  Clone ID: MRT4577_2439C.1
cggacgcgtgggcaaacctggaaatgtacccttgtgaattggaaactctaggtaatagagttctgttctatttttttatgggcagtacaacactgcaatctctacagctttgatgcaccttcttgctaagagctagcactgacgaatgcttctgttagtacaccagtcagatctttttggatcttgtatgcttgattgtgcaaatttattgactgtatagcttgtcagtcgttgtaacattgccttcaaatatgccccagtgattttgaaattttaggcaacaaagaatatagttacattgaaatgcgacaaacttgtttgcatcatggctagaaattggagggaaagcattatcggacaatcatttaatttggcttagttacaggtgctttttaagtggtaacgcaagttgcagttcacacaaataacacctttgaatgtaatgtattatcacacaaggctccagtgagttgtgttctatttgtttcttttctatttggcagtataatacttaatctttatgtttttgatgcacctgctaagcgctaccagtaccaaaaaggggttacattaaaatgtgatgtatcatgtatatattgttgggtctgcatgttgtgatcttcaagggcacaacaacttagatgaacccaagtcgaatatgattatgtatcctcttttactgttctatattagattacttcacaattgttgaatgatatttcgatggtcatatttgaatgttgtttgttatggaagaaagatgatattttggcactatatggtaccaagtttttattatcttgcanaaatatctaaatgttactgacagatttcccatcagtctgttttggatcacttttccctttctttgattgtgtgccaaaagaggtgccatcttttaccatga

SEQ ID NO: 101853 - DNA, 390 bp, Zea mays
  Clone ID: MRT4577_243C.1
ctgcgcgacgccggacggcgcccgcgtgttctacgatggcctcaaccgagctgtcaacgtttacctcaaggttcatgcggatctgagtgaagaagagaacgacaaggtgagcggcctgaagcacaggctgaaggtcacgctgcacgcctgcacgcacgcagggcataacgaacggatggcgctgcagacggtcttgctggagctcttcttgctgcagctgcacctgcgtcggaccatcattcagaccatcatggcgaacgaaggctgcgcagacgaatcaggtgaggaaggcggtgagagcgcctgcggcgttacatggcgcgtggcggaactgctcaaccagatgctgcagatcgtcatggacagcatgccgaacctcgtgcacgagct

SEQ ID NO: 101854 - DNA, 584 bp, Zea mays
  Clone ID: MRT4577_24400C.1
cacgcctgcgtgtaccgggcccctaattacacggtcgacctcagcgttcgtttcacatccatagtgtaagacactaacctcttattaccgccaaaggcggccaataattttgacgtccttgtccttcctgctttttgcataagcgatgctaccgcaactatcctcccacagtggtcacaacaattccggtgggcggagacagccaagcagattggatacccagctatacaagcctacagggtacaaaaggcaatttgattgacgcattctcgggggttaaggttgaccctgcaacatcctatgccctgattgcaacaaccctccttactgaatgtataaactgcaaaaaatggtattacaacaactacaacaacagttggtttcaacaatctatcaagtagtatgaaagaaacttgttgtttacctacagagacaacaagctcctgcctagaatgaactatgggaggagaaccctggctccttacttgcacgcacaacagctactaccattcaaccaacttgtgaggaaccctgctggcttgttactgcaacaacagttgcttgcatcccatctacaaattgtg

SEQ ID NO: 101855 - DNA, 858 bp, Zea mays
  Clone ID: MRT4577_24401C.1
atatttctccatccctttcccctctccaccccccctcccccctctctctcctcaccctctcgccaaaagactggatacagaacagaaggaaaaggaaataaagaacagagaagaagaaagaaagaaagaaagaacagcacctaccgagcaagccttctccgacttcacatgggctgcggaattgttcccacgagccccctccgggcctgaacagattcatacaccaccggagaaccgccccttgatttccccctcccccttttttctgctcgcgaattacttgctagtactaccacagaagaactgctctgtttttccgtgtttttctggttgggaattcctccggttcttcctggttttgcttgcggggggcgaggggaggaggaggcatgggaaaggaaggtccttgctgccattgcggcgtcacgagcactccactttggcgaaatgggccaccacataagccagtgctctgcaatgcatgtggctcgagatggagaacaaagggttcattggagaattacacaccaatgcattctcgtgatgatatcgatgctgatcaacctagagttagcaagctgaagccgccgacattgagactaaaggaacagcggcagctcaagaaaaagccaagccacagcataagggagaatggagcattttctgatcagaacttctggaagatgggggatgccgacccaagtcgatctagttctggatcagcactatcatattcagagagttgtgctccatatggttctgctgatgctagtgaaatggggtcagcgcaatcgcatgcttgggagtcatgggtaccatcaaaaagaagagctgtgtcactcggaccaagtcttcatc

SEQ ID NO: 101856 - DNA, 240 bp, Zea mays
  Clone ID: MRT4577_24402C.1
atccggctcgaggacgcacgaccagagagttttcacacacgaacagcacagaaaacgcccgttgagcgttctcgaggctactgatggtgcaaggctgctcatccacataaacgagatcgtgcacacacaggacacctagaggcctcgatcagaggaccatacacacatctcaactgacgaacaggcaccgttagaaagatggatgaagagactcaaactacaactgtagagaacactaac

SEQ ID NO: 101857 - DNA, 651 bp, Zea mays
  Clone ID: MRT4577_24403C.1
gaattctacttgcagtttttactatgggggctctccgtttttttatttgtcacgttttagtgtaaagataaactagtgaacgacaaatattcgaggcagtatgtatgcttctgggtttccttgacatggattccgcataacatacctggtatgacaaagtttgcaatgactggacgcgtaggtggcaatagtaattggtagggccacaaataacttgatgcacgaattccaaatcacagtctgccattacatgctatcgtcagtttgcatggcaacactttctgaaaatgaacataccttaaaattttgaaatctacgttgctcatttttttacttttcctgttttctcggattcagaacactgggacgttcctaactttgtgtacatttatccatgcaatgtatgaagactgttgtttgtcaggaatctggaaggctattagatgttagtttaacagcaacctgccggctttcatcctggcctaggtgaatatttttctccgaaaaccatttagtccattgttagtaatgttgaaatttttatatcgtcttaaaggggaaaaaatatcaaagagggcatttagaaagaacaagatgatacaaacaatacgaaagagaagatagcaacctgcattcgaaaggtggtctcat

SEQ ID NO: 101858 - DNA, 246 bp, Zea mays
  Clone ID: MRT4577_24404C.1
aaaaaaaaaaaaaaaaaaaaaatagattttttatacaaataaaaaaaaaaaaaaacaaaggggcgcacgttgtggggtgcctttcttctcccacgttcttcccacgtcttgctcttttagtgccacctattttcactcatttgccttcactgaccacgtctgactggtaaaaccctggaaatcctaacttaaccgaacttaatccatcccccttttatccagctttcgtcatttggaagatgcccg

SEQ ID NO: 101859 - DNA, 169 bp, Zea mays
  Clone ID: MRT4577_24405C.1
gggcgggcaaaattttagggcgggcacataacatatgctggaatgattcacacaggtattacaggccgatgggtgctccgcacacacctgagacccccacgcctcaaggtttttgtcacacacagaccaaaaaaatccggttcccgccaggggaacccattaacatggg

SEQ ID NO: 101860 - DNA, 1017 bp, Zea mays
  unsure (1)..(1017): unsure at all n locations
  Clone ID: MRT4577_24406C.1
ggaaggatggaataaaaggaacatacagagtggatgttgacattcctgctaatgattggataaacgtcaccaagttctatgatgttctaattttcaacactggacactggtgggatagatataaattcccaaaagacactccccttgttttctacgaagggggaaagccgattgaacctccacttgacatacacaacggactgaaagtagtcctgaaaagtattgcttcttacatcgaaagggaggttcctaggaaaacactgaagctgtggcgcacgcagtcacctaggcacttctatggaggtgagtgggatcacaatggcagctgtgtatctgatagacgtcttgaagagcatgagctcaattcttggtttgatccccagtttgggggagtgaacaaagaagcgagaaccgtgaatttagcaattcaggaagccctggctggcacggaaatccagttgctcaacctcacttacatgagcgagttccgtgctgacgcccatccagctatctggctcggcaagaaggacgcggtggctgtctatggacaggactgcatgcattggtgcctgcctggcgtgccggacacttgggtcgacatcttggctgcacagatcatgcatcacttcaagcaggagaaaggctgatcacaatttctttaaatctgtagttttgcgataactacagcaactgtgctagaactttttagatttgtatttttgggataacataacaaacattaaatagttttgcaaatattcattaggttaggtctcccataatgctatagtgatgcacaaaactaatgggcaccacaccgaacatcggaacatcccagtgctggagttttcaaaaaaaaaaaaaaataaaaaaaaaaaaaaaaaaaaagggtttggtagagtttctcttcattctgattcaccaaactaccaaagcatgttcttgccctgctataagttttacaggcatgaattantgtcacataaaagcatgttcttgccctgctataagttttgc

SEQ ID NO: 101861 - DNA, 585 bp, Zea mays
  Clone ID: MRT4577_24407C.1
ctgtcgctgagcctacagccgatgcgatgggcactgctgttttgatatctggcccaccaaagctgatgcattcagccccaagtttcgttaaagctttcgttataaacgaattttttggcccattacatgtccaaaggcagtaaagctagcgttcatatgtgggttcatgtttgtgaatatgcgtcccagtctgtttgcaaagtgacatatgctccaagtggctaattaggttgaatattcgactggagtcctctttctgtttgcaaagtggcaaatgctccaggttgctagttataaataatcttccaaagtggtcccttttatttttaaaatcggagcccttttttagtaaccccagaactattttgtttatgcaaggaagttttttttgcccccggaaaggcttaactttatttttgttgtgtgatccccctgtttgtatttcacggtaaatctttttatgggttgccccagttaatggtaaggcgaaaaggggtaaaccggggaattttaaaaaaaaaaaaaaaaaaaaaaaaaaaaaaaaaaaaaaaaaaaaaaaaaaagaaaaaaaaaaaaaaaaaagcg

SEQ ID NO: 101862 - DNA, 338 bp, Zea mays
  Clone ID: MRT4577_24408C.1
gggggggggcccctgggacagggggggggggggggccttaactggcttaaagagaacttgggggggccaaaaccacaaaacgggggggcttccttttgggcatgggggggccccccatgtttatatgcccaggggggggaacggcgccattttcccaaaaaacaaaaaaagccctttgaggggtttaaaaaacagggccacttggacccctttggggaaaaagcccccttttacatttaaggggaaacaatagggaatgctgaagggcatgaacttaagggaaaattacacggggggggggggggggggaaaaaaattccccaaaaaaaaggggcttt

SEQ ID NO: 101863 - DNA, 430 bp, Zea mays
  Clone ID: MRT4577_24409C.1
ccggccgggcgtctggaccaaagttttgagccatcgcttactatcgggcacgccgagagagagagatagatagaaagagtacgccgccaccggtgaatactgcgacctgtccatgatctctatcctcggtcggcggtcggggccttcggtgctgcattcccgcgcttgtggcgccctctacttccgcgattcctgcatcgcgaagaagaaattctcaccgaagtgcacactccgttgcggagccgtgattctccatggccagcgacctctgacactccctgtccctgcgagggtacaactcacttgaaaagaaaacggtacttgcaatctcaagtcacaggagaagtacaagggggtcaagtggagccacaccaccaggagctcatttcgatctaggagggggctaccaattgactttatggcgcccaaa

SEQ ID NO: 101864 - DNA, 736 bp, Zea mays
  Clone ID: MRT4577_2440C.1
cgggtgtcttctttagagtctccttccttggtttctgacttgactaggaagcctccggtgacacatgtctactctcaacgggtcgtaaattcttctggtatgccgtcttcctctgctgagctaccctcttttgttgtgccatcttctactattgagtcatctttctctaatgattcaccttcatttgatgagaatatgctgagccaacttcttctggtagttcttcactgcgacagtttctcgcttttatcaatcacttgaccggtaccatcctttgggttttgctgctacctttctttatgagccgagctcttattgtgatgttatccttcatcaggaatggcagcatgcaatggacgaggagattgttgctcttgagtgtatcgatatgtgggaacttgttccttgtccaccacgtgttcgccctatcacataagtgggtctataaggttaaggcctgctttgatggctctcttgagcgttataaggtcacttgatcacccgtggcttccagcaggaacattattgtgactacgatgatacttttgcgatgttgctcaaatgaccactgttcacactcttcttgatgtgacctctgttcgtgagtggtctatctctaaacttgatgtcaataatgtcttccttaatggtgaactgcatgaagaggtctacatgcatccaccacctggttattatgtcactgtgggcatggtttgtcgcctatgatgctcccttt

SEQ ID NO: 101865 - DNA, 430 bp, Zea mays
  Clone ID: MRT4577_24410C.1
cccacgcgtccgcccacgcgtccgaaaaaaaaaaaaaaaaaaaaaaaaaaaaaaaagaaaaaggaaaaaaaaaaaaaaaaaaaaggaaaaaaaaaaaaaaaaaaaaaaaaaaaaaaaaaaaaaaaaaaaaaaaaaaaaaaaaaaaaaaaaaaaaaaaaaaaaaaaaaaaaaaaaaagggggggtacattaaaaaagaccaaagtacacgtacatgcaacgtaaaagctaaactatagagaaaggaaaactaaattaaatacaaaggacagcacaacaaaaaagactggaaaagaaaaaacctggcgtaaccaaatgcaaattgattagaataaaactccctataccaaactgggaataaaataaaaaagcaccaaacgaagacccaacaaaaaaatcagccagactgaaaaggaaaagggaccccccatt

SEQ ID NO: 101866 - DNA, 823 bp, Zea mays
  unsure (1)..(823): unsure at all n locations
  Clone ID: MRT4577_24411C.1
ttccggaatttcccattctgaatttggtctcttgcctgcattcttcaagattcagttgtctgcgtcggtttacccaattttacagccaagccaagccaaccatctagtatttctctttgcctcgtgttggtgttggacaggagggagcgggagagcatgaagcaacgatttccaagcagcagcacgcgttccaagtctgaggcagctgtgcaaacgcgggcatcaagagcaccatcacccaaagtcaatcctgctactccaggtccaggcccaggggtgaaggccaggccaagatcggctgccgccgccaccatggcagcgacgaggaggcagcctgccgtgcctatgcccgtgtggaagtcggagacggcagaggaggaggtggtgcggctgcgcggggaggttgatgccttgcagaaagaggtgcagcgtctgctccgcctcaacgcagagctccagaccaaccatgacgctgcagccagcaacagaccacaacctcccagcaagatttcggcttccggaggagtcggttgcaccgccgccgccgcccccgccgccaccgccaccgcacctaaagcagcgaggagtccgtttcccttcggctccgagcacaagcccggagagcaaggccactgcgctggtcgacatgtacaactcgctgcaggccagcaacaaggcgtcaaagcgcacagacaaaagtagcagccatagcagcatcgntgacgagctgcagaaacgctcccagcacttgctagcggtgcggtgccttttcttttccctctgtgttttctagaatcattatacatgccgccattatcttttt

SEQ ID NO: 101867 - DNA, 318 bp, Zea mays
  unsure (1)..(318): unsure at all n locations
  Clone ID: MRT4577_24412C.1
gctgcaacanataaattgctacccaggcatagctgggtacctccgcaacttctgtttgtgggatttgctacactgatggtttcgatatatagggggacttgaatgtcaaaaaaaaaaaaaaaaaaaaaaaagggcggccgccctttatttttccttttccttttttttctcttttctactttttcaatttttttttatgattttcttcctacaaatcctcttctcttgccgcaaaaaaaaaagggcccccttttttttttgtgggaaaaaaaaaaacttttttttccgcctttcttgacaaaattttaagaggttttt

SEQ ID NO: 101868 - DNA, 258 bp, Zea mays
  Clone ID: MRT4577_24413C.1
cggccggggtgctttctttcgagagaaatggcttctcctccccctccggttcggtttcgggatcgtgaccttttcccccccacacccaagaatgattcctggccgctctttcactcaaacaaagaaagaagagggatatacccctaactcatctgacctccactcacctcatctaccttcaaacttcaacaacagaccaccccacaccccccaaagccaaaaaacaacctcctcagaacatgcaacatccaatccaac

SEQ ID NO: 101869 - DNA, 326 bp, Zea mays
  Clone ID: MRT4577_24414C.1
catcaaaagatggagctgggatctcagggggctgcttacgccatgcaatcatagttgcagacctcttatcagagccaagtgttacatgtcacttgaaccaccgggacacacatgctgggccatgaacctgcacgtcccgaatttcaagaggaggaataagactgtttccttcctgtataaaatgaactgaaggcagactggagcagcaatgtctcacatgtgaagaagagatactatgcggaagactcatcacggagccgaggactctatttatgatcggactggacctcatgtaaagcgcttctgactgacattgcagattatca

SEQ ID NO: 101870 - DNA, 383 bp, Zea mays
  Clone ID: MRT4577_24415C.1
cggacgcgtgggcggactcgtgggttgcaatcacaacgaacacaatctctctatcgcaccggcaccgatgaagaagagatcaatgtcttccgaacaggtactcgtgatcgcgtgccacagcaaggctgcgtttgacgcccacatgaccaatgcccatataagccggcaagctggcgcccattgacttcactgccgcctggtgcggtccatgccgtgccatcgccccactgttcgtcgaacactccaataagttcactcaggtcgacttcctgaaggtggacgtggacgaagtgaatgaagtcaccgaggcctacgaggtcgatgcgatgcctaccttccacttcgttaagaacggctagaccgtcgcgaccatcatgtgtgcc

SEQ ID NO: 101871 - DNA, 299 bp, Zea mays
  Clone ID: MRT4577_24416C.1
ggaccgtggcagtggacgtgccgtgcgtctcgctgcggcgaggcccgcgtgacgatgcgcaagtcagcggctaaggcaaagccgtcggcgagctccggcagcccgtggtacggctccgacctcatgctctacctgggcccgctgtccggctcgcccccgagctacctgacgggcgagttcccgggcgactacggcttggacaccgcggggctgtcggcggactcggatacgttcgccaagaagcgggagctggaggtcagccactctcgctgggcgatgctgggcgcgtttggctgcgt

SEQ ID NO: 101872 - DNA, 242 bp, Zea mays
  Clone ID: MRT4577_24417C.1
cctttagaggggtctttcttggtttttcgaacactttaaaaacgttccaaatcacaatgcatcccctcctttggttgaagttacttacgacatgacccggggaacaagacattaaaccgcccagcttttcgctgtccggttccaaaaccaacgcccaaagtcccgttcttcgggtcctttatcccacgaataaatcggaggccttatcccttaatactccctataaaagtcacccgtcctcc

SEQ ID NO: 101873 - DNA, 668 bp, Zea mays
  unsure (1)..(668): unsure at all n locations
  Clone ID: MRT4577_24418C.1
ncgnggnnccggccgggnaaaaaaaaaaaaaaaaaaaaaaaaaaaaaaaaaaaaaaaaaaaaaaaaaaaaaaaaaaaaaacaaataaagtcatcaaccacgacaggatggcttgcacaaccaatgggatgagagccttgttcttcctggcccttttctgaatcgagcatgatgaaaaggaaaagtcaaagggcttggatgcgaatagcgcccggccctgtggggtccttcgacattaccaagttgggcccctccgaaattggaaaaacaaacaggacaaaggctgtgcaggaggcatgggcatcggcgtgcggtgaaactgaaaagcaaacaattttaataccaaagggcgatttccttgcctgacaactcaacttcacaggcccttgcaagggcaacttgaccatccaggtggatggcaatctgttgccgaccacgggcctaagccagaacaaggcccatggtaattggatcgagattctacgcgtggataacctggtcatcaccggcacgggaaaccttgacgggcaggtcccagccgtgtggaccaagaactcctgcactaaaaagttcgattgcaagatccttcccaattagttggtgatggacttggtgaacaacggttaggtgtccgtgttcaccctgttcaactccaagttcttccacatg

SEQ ID NO: 101874 - DNA, 321 bp, Zea mays
  Clone ID: MRT4577_24419C.1
ggggccggcccgacggacgctttgatccaagacaggtatcgtcttgttggactcggccgagctccactgtggaattcgaaggccgaccctgggggtccaagacctacccgcatcaggctggcaccggccgtaagaacggcttcttagtcatcaatagccgtacctgcaggggtgaggggtcctacctccaagactgaaagcatggtcacgccaaatgccactttgtctccatatacatattaatgggaaaaagcttgaaaaattgctgcttcatcacacagctgtgacattccgcatgtagaaccgtacctgccttgtcgg

SEQ ID NO: 101875 - DNA, 667 bp, Zea mays
  Clone ID: MRT4577_2441C.1
gtgagcgagcggcagcggtgtgtgccgaacaatggcagcgcaggaggccgcagcaggcggcgggagcccgcaggtggtgatgcggtggcggtacggggacgtgggcgacagcaacttcgcggtgcacgggcgcgcggtgccgctgctggtggggctgctgtgcgccgtcgtcttcttcgtcgcgctgtgcctgtacctccgctggaggtgccaccgccacgcgcccgacgacccggaggcggacgccagctccccgtcgtcggccgcagcggcgtcgctccccggcctcgacgccgacgccatccgcgggctgcccgtgacgctgtaccgcccgcccgcgtcgccgcgcctccgaggggaggccggcgacgacgacccggcggcggcgctgtgctccatctgcatcagcgcgctggtggccggcgagaaggtgaaggtgctcccgccgtgcggccactgcttccacccggactgcgtcgacgcctggctccggtcccagcccagctgcccgctctgccggtgcctcctcgccgccgctgccaaggacgccgtgtgagtgccaacgccaacggcaggcgcttcgatcgtcgcatgacaagcgggcccagctaccagcgtccctcgagacccgcggccttttaaatcagcgcactagttaatgatagcg

SEQ ID NO: 101876 - DNA, 326 bp, Zea mays
  Clone ID: MRT4577_24420C.1
ccacgcgtacgatcacatctctccctatttgaaagttcactataaattgtgtaaatcctttattttatacgtttttgctgaagataacctaggagagtgaagtttaaaatataagatgtgaacggacaagccgtgaaagatagtcttacaatagccactgtgcagctgtagcaaatgagtaattgcattgagtttctgaggcaattacgtcctgctattattgccttacggagacatgtaatgagatggcatatttgccatgacaaatttatttgttggatactttcttacttcttgaaaaaaaaaaaaaaaaaaaaggggccggc

SEQ ID NO: 101877 - DNA, 584 bp, Zea mays
  Clone ID: MRT4577_24421C.1
cctcgagccggcgggaacattgttcgctcggatagacatccggtattgtctcctcttccgatccccagcgaatctgatctgctggatcaatgcatgactcattcgacatctcttctgcggctgtaaattatatccgggtctaccggtgcctagtttgaactaaagcctcgccaaaggggcatgtctgctaaatgggcaacgagcctacaagttggttcatgtcgtgtggggcattgagcatcatctccaacgactattcttgctgatatgaataaacatatgctgaatcccctcctacgttatcatgtcgccatctccgatgcccatcttggaaatatgtctgccctactgcgtcctactgcacccactgtaggactctcatgcaatgctggtcccgccaaactacgaatcctgactgagtgtgtcggatactatatgcacttccgtgagagcatggattcacacgatccgtctcaatgacaccgccttagtgatcgaattcgtgggagactccggcgtgacctgttcgaatgaatgggttacatcacttgacaactattacatcaccatccagttgactcacc

SEQ ID NO: 101878 - DNA, 319 bp, Zea mays
  Clone ID: MRT4577_24422C.1
aaataaatgctctatatacatttttattttcttactaactgccctgagagagtactttaaaatattagatgtgaaatttacatcacgagacaataaccttggcttcaattgatgatgcaatagggcacatgtttaaacttaaatctagcatcttccttgtgcgccaaccaattatggtatatttgtgacaaacggatactgaggagaacacaccatattcttgttgttcttacccatgagaagcaatcaccaaatggctttgcatgtaaaaaggcacaggattcaacgctgaacttttgatgaaatggaatccacttaa

SEQ ID NO: 101879 - DNA, 383 bp, Zea mays
  Clone ID: MRT4577_24423C.1
gcggtttgagcggctcgaggtacgacccggtcagtctcagcaccgtgtctgaggtcaagaccatacgccaacgggacgaacgcacgccgagggcagcccaacgcgcatatggccggacacggatacgccgtacaaccggcccatgcatagccgaacccccagggcacgcacaagccatgctactacgacatgactgtacacatgtgggactaccgcgccaaggatgcacaggtagacaagtacaatcaccacacggcgagcgaggccgccatcgacaagagcgctcatgtcgatggcttgaacgcacgcaccggaggggacgagacgggctacaacaggacatttgggacggatgcaccagccacgtaccgcgcagatgcaag

SEQ ID NO: 101880 - DNA, 113 bp, Zea mays
  Clone ID: MRT4577_24424C.1
tcgttcacgcgtccgcgcaagcgatagtatctagatcgttagcggttcggcaaggaagactatattgatgaaactatggtcaaaattgaggacaagttagatgagaaagtata

SEQ ID NO: 101881 - DNA, 444 bp, Zea mays
  Clone ID: MRT4577_24425C.1
atggtgaccgccggtttctgggtgggggagagcaagccgggctgcgatcttggtcccaccctcagcttcaaggatgttcatcatccccgctggggcgggagccacgctgagccggcgctctaccttccgcgcgggttcgcaggtcgccctttcccgcggcgttcgggggtggaggcgctcgctggccctgcggacggcgcggacttagacaacgtggggctgatcgacggcgggcgtcgttacctccagcgtgtcggagtcgtcggccgggcttccggcggcccctcctgccggagggtgaccgccgcatcgtgtgcacgggaggaccacccacgattccgcgcgccgttagggcggcgttcgtgttctggggtggccctgcttttgcactgggacggcgcccttgcgcagaggccggcgccccactcgtccgggaggatttga

SEQ ID NO: 101882 - DNA, 707 bp, Zea mays
  Clone ID: MRT4577_24426C.1
cgataaataagcaacaaaacgcttgtcttcatgcatcagaagatccaacatacgaagaaaacatttcaactcttaacagcatccaccacagcccaatcacatgaacaagttcggcctcgttgccttgtaggtggtcttcagcttcctggttggtggcctgaccttttggtacacaagggggaacttgatcttggagttgtggaactgcttggtgttgtctctcttgcatagcttgaagttgacagtcgcggtcttgatgatctgaatgcagggggatctcacacggtggcgagaggccatctcagtgtacatctgctccacggcaccatttagtgtggtgtcacggtactccttgtacatgttgtggtagccagtcctgctctggtaacgcagccaaatgccatagttcttgatcgtggttgggttcttctcaaagatctcgttgatggcgagcatctggccgttgctcttcttcaccttcttcagcttcctcaggaaataccagaacttgctcttggcgcggacctcattggtggcccagagcttcatgcggtagatcttcggctgctcatcgccgggcgtcggcagcgcacgacccaccacctggtactgatggaacctgaaggccaccatttccgcgagctctgtgaagcccctagcctaacctaacctaaggagatggggagagcaggaggcggcgggcgaag

SEQ ID NO: 101883 - DNA, 1181 bp, Zea mays
  Clone ID: MRT4577_24427C.1
cattgggaccctcgaggccggccgggcttctgctcggggaaaacagctaagaacagtcgggcggtcgggccaggcggcctgtgagagggtccgagatccacaggacgcaggacgctgccgatggcgaagccgaggaaaacccgcacctcggctccagatccgcccgtagccgccgttcggcttccgtggcacacaccggcgccggcggtccccacggccgttctgatctcgctcgctgccctcctcatccgcgtgctggtttccgtgggcccctactccggtcagggtgcggcgcctaagttcggcgactatgaggcgcagcggcactggatggagctcacactccatctcacgcccgccgactggtaccgcaacacctccgacaatgaccttgcctactggggcctggactacccgcccctctccgcctaccagagcctcctccacggccgcatcatcaacacctcactccccgaggccgtcgctctccgctcctcccgtggctacgaatctatggaatcgaagttgctgatgcggtggacggtgctgtcatcggatctgttggtgttcttcccatctgctttgtggtttgtgtgggcgtacatgaaacttggagtcggtattagtggagaggagagacgggaggggtggatgtggctgctagccttggtcctgatcagtccttgcttggtattgatcgatcatggccattttcagtataattgcattagccttggacttacgctcggagcaattgctggtgttctgtcgaagaatgagcttgttggtgcatctctcttcactctcgcatcaatcacaaacagatgagcctgtactttgcattttagcaggtccacccaatgtttgttgtgaacgctggcagtggattcaagtggatctggaacagtgtgaagggcttccttgacccaaaatcttcatcctagattcatgtgctcggttcgaagtaccagagtaggcttcttgaagtaatagattcgagtgagttgccagaattccttggtggttcatgcacatgtagtgacaagggtggttgccttggatcgaacaaagggccatggcaaccacccttggtggttcatgcacatgtagtgacaagggtggttgccttggatcgaacaaagggccatggaatgatccttatatattgaagctgatccaag

SEQ ID NO: 101884 - DNA, 592 bp, Zea mays
  unsure (1)..(592): unsure at all n locations
  Clone ID: MRT4577_24428C.1
aattcggcacgagggcaagacgcatgcagtgcagcttcagcaatgacgtcgtcgtctacgagcgctactaccagctgctgccccctactgctggcgctcttggtcctcatggcggcacaccgcggcaacgccgccgccgtgttcaccggcctggtcttcgagagcccgggtgaggcggaggccttcgaggacgcgctgctgcgccaggcctgcttcaacgtctccttcttcttgtccgcgggtggccgccgcgaggcctgcgtgtcgcggctcgacacggcgcggggaggcgcgggcagcgggcccgtgcccgtgctccgcgccgcgctgcgcgacacgctcggcgaggccgtgggcgccgcgggagcggtccgggggctcgcctcgctgtccaaccacgcgcgcgaggaggtggcgctgcgcgactgcgtcgagctgctgggatactccgtcgacgagctcgggtgggcgctggacgctatggccgacgacgacaccgacgccgccgcggncgggcggnggnggnctggagctgctggactcgcccggccgncgngccgnctcaagccgcgccgagaacgacatccacgcg

SEQ ID NO: 101885 - DNA, 455 bp, Zea mays
  Clone ID: MRT4577_24429C.1
gagctctctagtcggcggccgccgtcggttcaccacgtttaacactcctcgccgtgataggcgcccatgaacgcctgccccaccagcaccagcattagccacaggcaggacgcgcagcaccaccctgtggcgctccttccggggcgccgttccagatgacgcaactgcgcgggcctacgactgtacatctgcagtgggggcacgcgcccgccgggcaccatggacggaagccgcggaccacattggccccacggcagcacaactcgaggtgcctgcagacgcccatacgataaccgacttcaactgcgactcgtacccccagctgcccattgagcctataagtatagagtattcgatgacagtttacagaatgaggattggaagggttttcccttccttacctagcaacttatactttaaacaacaacacatggagatcacatgctatagaccct

SEQ ID NO: 101886 - DNA, 645 bp, Zea mays
  Clone ID: MRT4577_2442C.1
tccttcctttggcaaatccttggtggcaagcaagaaaaggctggttggagatgtggaagagcaacttgagccagataaaaacgatgatggggtgcaagcaacgcagcagcagctagagctcacaaaagagaacactgaagcaagagcttcaacatgttccacctcccaagagcttcaacatgttctgctccggtggctcaagaggcaagcgtcgcacccgccccgattttgattccaaggacgaatacaacattcccgccggactagcgatcaccgtacctcctgtgcctcgaggtggagccgcccgtctgcgactcgcgcagaccacatctaacgcgtgtggcgctcgtccggctcacgggcaagcaccccttcaacttagaaccttcggtgtcgtggctgatggcgcacgacttcatcaccccggcaccgcaccactaccactactggaaaaatatcggctagaaaccgaagttcttactctaatagatcaacgttcttatgtaaagttgtttcgataggtcttatctaatacctgtaatgtacaatgggcagtttgatgttcataatgtaaagttgaacgttggactgtacacctgcaaaaaggccatcagtatcaaataaatatgtaagctactaacacct

SEQ ID NO: 101887 - DNA, 772 bp, Zea mays
  Clone ID: MRT4577_24430C.1
aaaagcatccttttgtgactccggagtgcatcccctccttgcctatctgcccccggatcccatacgccatcacctccgattaaactatgctacatactttcgccccccgcctgatcgatctcactatccacgcctcccctgaggagccatctgacaacatgtgacaacagtagaggcgacaccccgtgcgaggatcaaagcccaccagaacagcgcgggctcttcttctgtggctcacacgcttttctaggctggtccgattgctgcgtacaacctcctcaaggaaacgaccctccaccttgtgctcctgctcatgtgagacatgatgatcttggtgaaaaccctgaccgctatgactatcaccctccaggtggatacctctgacactgttgacaacggcatacgacaagattcaagacaatgagggcatcctctccatcatcatgaacggctcatctgttgctgagaagtagcttgacgactaatgcacgcttgccgactacaacatccacaacgagagcaccctccacttggtgctgcgcctcaggggatgcatgtagatcttcgtgaagaccctgaccggcaaaactatcaccctcgaggtgtagtcttcggacaccatcgacaacgtcaaggccaagatccaggactaggagggcattcccccagatcagcagcgtgtcatctttgctggaagcagcttgatgacgagcgcacactgttcgactactacatccagaaggagagcaccctccacttggtgctgcgcctc

SEQ ID NO: 101888 - DNA, 985 bp, Zea mays
  Clone ID: MRT4577_24431C.1
gcacgaggctttgtaggcttctatcgacctattgagctcaaattctgtgctatatcaatcgcaatcgtcatctctacttatgattggcatgatctcctaccaccttacgtggaggtcaggactctcttggtcatgcatacgtacaatgacgctgcacacttgtttccttcaacagcaatctttgcctacccccacagatatatgcttccgagttccgacgactgacactcccctatcttccgtacagtcagaggatccgtcatggcgaagaaccccaaggtgttcttcgacatcctcatcggcaagtccaaggccgggcgggtcgtgatggagctcttcgccgacaaggtgcccaagacggccgagaacttccgctgcctgtgcacgggcgagaagggcctgggctccgcggggaagccgctgcactacaagggctcggccttccaccgcgtcatcccgggcttcatgtgccagggcggcgacttcacccggggcaacggcacgggcggcgagtccatctacggcgccaggttcgccgacgagaacttcaagctgcgccacacgggacccggcgtgctctccatggccaacgcggggcccgacaccaacggctcccagttcttcatctgcaccgcgcagacgccctggcttgacggcaagcacgtcgtcttcggcaaggtcgtcgatggctacgccgtcgtggacaagatggaggctgtcggttctcagtcaggtgccacggccgagagcgtacgcatcgaggactgcggccagcttgccgacgactgagggcctcgctgtgtccgattgtaaccaaatgaatgatcaataaatttctttctttcattcttttgtttctgtggagatggataccggcctgtagttaattaaccaatataaactatggatggatggggcggtgatttgatcaagacatctgtatttgttactcttatctgtcttatctgtctattgtatttagaaa

SEQ ID NO: 101889 - DNA, 391 bp, Zea mays
  Clone ID: MRT4577_24432C.1
gctgggagctaccagaattaactgataaccagcaactgatttcgggcttcctctacagcgacaatattcattaatccaagctacaatttcactggatcatagaaaatcataccaatccatgcttgaaatttcactgccgcgcaacagacatcgtgctgaagcaataagacatcatattctagattgaatcaatcattcaattgtcaattgggcagactacagaacgatacatagttttggcaaacaagataacggaaggagctgtagtgctgtacagactacctagaatcactaaaagctaaggcaaactctaccagttgttttctttgatgccaatgtattatcacttcgatttttaacgttaatggagggtaagagcatctccaagaaa

SEQ ID NO: 101890 - DNA, 440 bp, Zea mays
  Clone ID: MRT4577_24433C.1
caggaaagtgggaaccacttacaatatttgagaataatttggtagacatggagtacaatttttgactcgttgggctatgtacatttatcgatcaaattgatggtccctgttacattgacatattatatgatcactgttcccatttcccatgccggccaactactaacactccaatgaacaaaaaaaaaaatttaaccatgatggaatttttaattacacatgaaccaccaatccatgcatgcctgtgtgtggggtcaaaaacggggatctgcccttgccggtcgatattctgcatgagcgaatgctgcatgtgccgccgatcctgatcacttttgagtagcagcggttccgccgcgccccatgacggacgtgatcgccgccaccagcaccgactggaagctcggatccgacgtgatcgccttcgccagcgtgtccgtgac

SEQ ID NO: 101891 - DNA, 731 bp, Zea mays
  unsure (1)..(731): unsure at all n locations
  Clone ID: MRT4577_24434C.1
taaaaattcagatcgccccctcttgccttccctcctccgccggaccgctgctcgcgcgatccgaccctccgactccaccgccatgtgcgcatagcggccgcgccagagatgtaagtcacatgtgtgacaccctgctgggagcatctacgctgccatgagtcaaacatgaaaactccagcgtcgcaggtgtgcctgnctgttaaagagaggtcatacgagcagatatccacaaacctacggcttgcctattccaggcctgaccaacacagtccattatacatgcaacggagaggtggctcacccgatgacacctcacagttagaggatagatcagagtggactgagcaataattctccttgaatatagctggctcatgacatgtaacaaggggagtcatcnagtgcacgcaccagcgctaagacaactgccgaatcaggtcacnnctcctactcaagacaggatgcctgtgtgttccaccttcanaacgtctaccaacccccagctacaccaggcacctaattgtaccctgacatgtgcactgccctgctaactaggctacagcctccagcagcttacctgctggttgcgtgtatccaccggagggcagatatgcttatgatcaaggactgccctcaaatcctaatttgactgggcatgcaaccttgcgaaggaaacagattcaattccacttctctggaaatgggggtgggcnggnaatatgtgggacaag

SEQ ID NO: 101892 - DNA, 394 bp, Zea mays
  Clone ID: MRT4577_24435C.1
tgaaatctctggtgacaaaactaagaaagtcgtggaagttctcatgataaatgcccggagcggacctggtcttttgtttccaaaggtactgtactgtaaacatatccatctgaaatacacatgcaacaattagaaagtggacgtagccttttgtttccaaaggtattactgttaacatcttcatctgaaatccattgctagttgtttacatggatgacagcttttattgcatacttattctgtttctgtgttttcacataactacatcggaaccattatataccctatagcagtgcatattattatttcagttagttcctaagtgccagtgtgtcttaagtcagcaatccaggaaatccagatgaagtaactggaatgtctgagttgccgatct

SEQ ID NO: 101893 - DNA, 504 bp, Zea mays
  Clone ID: MRT4577_24436C.1
acggacgcgtggggcgaccatggtcggcttgtctgaccagaccgtggacaccgcgaccagcagcctgcagaccatgtacaggctcaacgtcggcggctcttacattgccccgaccaacgactctgggctgtcgcgggactggtacgacgacaccccgtacctctacggagctgcggtcggcgtcacgtacaaacctgatgacaatgcccagatcaagttcccgagccctgaggcagagtacgcggcgccggccagcctctacctcagcagcaggtccatgggccctaacccaaaggtgaaccagaactacaacctgacgtgggtgttcgaggtggacagcaacttcacctacgttgtccgcctccacttctgcgagctgctgcttaccaaggtcaaccagcgggcgttcgacatcttcgtcaacaacaagacggcgcaggcagacgcggatgtcatcgggtggacgtccgggaaggacgtgcccgtgtacaaggactacgccac

SEQ ID NO: 101894 - DNA, 1115 bp, Zea mays
  Clone ID: MRT4577_24437C.1
gagacattttcggggtgtcattaatttggaggattgtaatcttgaggataatttagacgatgaagatgctccaagaagttcgaaggattccaaaaaggcaaatatggtagataccggaaaagattctagccttatgttcaagattacccacaagattgcatataaaaatgtgttgaaagctcatagcgctgttatactgaaagctgaaagcatgagtgataaaactgaatggatcgccaagattaagggcatcgtcgacccaaaagggctttctgcaaagaaaccaagcgcttcagaaggcggtgccccagtgaggcaaagccatccagatggttccctagaaccagtactcaagaaacctgtgaaccatgaagaagagcttcgatggatatcccaggaagtccgtgcatatgtggaagcagtcctcaacaatcttgcaggaaatgtccccaaggctgtggttctctgccaagtagagaaagccaaagaagatatgctcagccagttatatacttctataagcacgcaaagcttagccaaaatcgaagagctaatccaggaggaccacaacgtgaagcggaagcgtgaaaagttccagctgcagtcgtcgcttctttccaaggtcactcggctgctcagcatccatgacagccggtcgggcagtgctggtctgtcgacagattctgctggatcagagagtagcccgaggaacggcggacactctggtgacgactggagatctgcattcggagctggatcggccagttggtctactggagcagccattgccggccgccgcgtaccgagtcgaggtccgccgccgcctccaccaaatgttggctgattgtgagcttttttagcagaacatgtattactcaaaacaaggtgaacgtatataggcttatgaatcgcagatcgtggattaatagaagaggtagattttttttcaactattcacattaattagtcctgtactaggatcgattcagcgtctgtccgatcgaggcattccgccaccggatacttttttttcatcttctcaaatatcaactgttgtctcccgttccgtcgtcataagttcatatactactaatattattttacgcacttctttc

SEQ ID NO: 101895 - DNA, 236 bp, Zea mays
  Clone ID: MRT4577_24438C.1
ttttatattattcccctttagtatttttttgggaaacccggcccttcccccccccggcagggatattacgagattctcttatgaggaccgaaaacttaacccccaattttttgggctgtcggactattcggcaacatcagatggcaaactgcccccggacgacaaaccattgctccaagcctatgttttttgtagctttgccgctaaccataccatttcccatgaatccttccgat

SEQ ID NO: 101896 - DNA, 128 bp, Zea mays
  Clone ID: MRT4577_24439C.1
ccaaataaatgcaacacataccacatatcggtgcgggctagggaaagaatgcgacccgggcgtgcgtgcagtcataacctgtggctagttggctaggctgctggatcaccgtggggataccaccctat

SEQ ID NO: 101897 - DNA, 426 bp, Zea mays
  Clone ID: MRT4577_2443C.1
aaaggaaaggcttcccccccctttgcggataaagggaatggatccccttttttttttggaaaactcgaatttcaaattgcgggaaaaataaaagaaaccaccaccaaaactgttttttcgatcaaacaaaaacaaaatttgacgtggtgtgcaccaccaccaaaacaagtagggccctcttcctccaaccggaagtggtcaaccacccggccgtccagtccaatgcttttaaacttggcaataaaatccgggaacttgaccctcctttacaagggaggcttgctggggtttgaaatggggccatacaccctttcggttttttttttgtcggggttaaaaaaggcatttaccgaaacccttgccgtgtaactgtttttgttagccggcacccggtgatccacccttttcggacccgtgggtcaaccc

SEQ ID NO: 101898 - DNA, 382 bp, Zea mays
  unsure (1)..(382): unsure at all n locations
  Clone ID: MRT4577_24440C.1
aattatatcttttccaaagttgcaagccttctattttatgaacccgcatcagtttcccatttttaaccaaatgggtttccaaggaatttaaattaggtttaccaggggtcaaatggggccaaacccctttttttttcaccccctctaaaaaaaaatttctttttttttgggggaaaaaaacttggggggcggcttccgccctcttttttttttttttttttaacccaaaaaaaaaaaaaaatccccccccccccccccaaaaaaaaaaaaaaaaaaaagaggggttttttttttttttttccacccccccnnccaaaaaaaaaaagaggggcgcccccccccccccccccccccnnccccctttcttgtttttttttttttt

SEQ ID NO: 101899 - DNA, 458 bp, Zea mays
  Clone ID: MRT4577_24441C.1
tggggtagtactagtatttggtgtgccacacaaattgaatttgttgttctaagaaacccaaattttttgcttattttctggtaggctaacaagggttgatcaaatgacaggtttctcgttcaagctctgttccttcaaatacaagggatacattataccaaagtttgccaccaaccataaagtcatctctccgttctaagctacactcctttggagtcaaggaagagcttactgtttctcaaatcaaggctgaaatggagaagaccctgcgatggcttgtccctattgcaagtaacaccaccaagtaatctaaattattaattgccttcatagcatgcaaaatagcttgtggcttctgcttatccctttttgttactgcatttttgatgatctgtccatacaagggctcatcatggtttcggttgggttggagagtgggcaagtaccgtgtcagatgt

SEQ ID NO: 101900 - DNA, 252 bp, Zea mays
  Clone ID: MRT4577_24442C.1
ccaatccaaagaaaaaaggctttcttctgggcaaaggggaacaaaaaaaaaaggccaaaagccaagaggggaagggacccctaccacaaaaagaaaaaggggggggaccaaaacaagggacctagctgacggggccccaaaattttcttccggggaaaaacttaaaaaccccgctaacctccactgggcccccaactcctttttttggaaccaaacccaggggacaaggagggcaccacccaaaactggaat

SEQ ID NO: 101901 - DNA, 255 bp, Zea mays
  Clone ID: MRT4577_24443C.1
aacagatgcaacaagcacagtacccaattctactagcaaaaaccagattttacaataaatagccattgcaaacaagcaacgaggcaagacaagaacatcagagaacattcatctagaagttcatggccttgtcataaatcacttaataataataaatctttacttatatatttatatattattataaaattaaagagtggaaatttcttcctccaaattttgatccatcactctctcttagtctctctctctctc

SEQ ID NO: 101902 - DNA, 125 bp, Zea mays
  Clone ID: MRT4577_24444C.1
ttttgttttttatgtcaaagttgaagatagcgtgaatcttgacttagctgggggaattgagatgctcgatatgccgtcaaggtagccaaggattgtacaatggtttgtatgtaatcaggtatggt

SEQ ID NO: 101903 - DNA, 412 bp, Zea mays
  unsure (1)..(412): unsure at all n locations
  Clone ID: MRT4577_24445C.1
aggattgggatcgtcaaaatccaacacaaattgtaacggagatgtgcggcttcgttgcaatcctttctggaacttttcttcttcacaagacaaaggatatggtggatggtatgtcgtacatttacgccccttttgacctgtaactactcacgttcataatgtcttattggttcgcgtcgtgacaggtctcccaccaaatttaccgattcggcttcctaaacatgcggatgaggacggctacgctgctgaaggaattcctctcagatccgctgctgacggtattccgctcaggtcaccaagggctacagattcatttcgctcgtcatgatgccccgctgagatttgcatgcgcactcaaatcgtgtcacttgaaggctcatacccagcangcgtcagtcctatatatacatgg

SEQ ID NO: 101904 - DNA, 1443 bp, Zea mays
  Clone ID: MRT4577_24446C.1
gcatgcacgcctgcggtagctcggaattcggaattcggcccatcactcgcgcgccggcgccgctcacacgcccatttccaccccacaagacccacacggaatcccggcaccctacctctccaacacgcaccagcatcatggcggtggcttcgacctcgccgctatccgccaagcccgccacggccccctcgccgcccgctccggtgtccgggttcctcgctctccccgcccgccgcggctgcgcaacgcgcctcggctccgccgccgcgtggaggaggcttcgcgtggaggcgatctggaagcagcaggagaagcagcgggcagaggtgtccgtcgaggaacccgcccccgtcagggaggccgccgcgcccctggacggagtcggagctgacgaccccatggttccttcctcggacgagagctgggtggtcaggctcgagcagtcggtcaacattttcctcacggaatcggtgattatactactcaataccgtgtaccgtgatcggaactacgccaggttttttgtgctggagacgattgccagggtgccgtatttcgcgttcatatcggtgcttcacatgtatgaaacctttggctggtggagacgagctgattatctaaaagttcactttgcgcagagcttgaacgagtttcatcatctcttgatcatggaagaattgggtggcaacgctatatggattgattgtttccttgctcgatttatggcgtttttttactacttcatgactgttgcgatgtacatgttgagcccacgaatggcatatcacttctctgaatgtgtggagagacatgcgtactccacctatgataagttcctcaagctccatgaagaggaattgaaaacactaccagctccagaggcagcattgaactattacctgaatgaggacctttacttatttgatgagtttcagacaacaagaattccatgttctaggaggcctaaaatagataacttgtatgatgtattcgtcaatatacgagatgacgaggcagagcactgcaagacaatgaaggcatgtcaaacacatggaactcttcgttctcctcactcaatgccgaactgcttagaagctgctacagaatgtgtaatacctgaaaacgattgtgaaggtattgtggactgtgtcaaaaagtcccttacaaagtaaatagtatgtagaatcctctttcgtgtgttttcaggcatcatagtatacaaaagtacaaattctggatgatatcctctcttttttcctgtgtatctttgttaaagcaaaatccgggtcatatatcacacagaagtcagtgtagatacaattatgcaacagaatcaaatatctaacattgaagatatgagaatattcaggctgtgaagcattgcctcgtcgcttgctgtgctgtggatatgatttataaaacgttgcattcttgttgcatcgt

SEQ ID NO: 101905 - DNA, 337 bp, Zea mays
  Clone ID: MRT4577_24447C.1
tcagcccgcgcataatttcgctctgcaactgccaccatcggggggttcttcagtgaggataggggggcattaagcgaactggcagggaaggatcaggaacttattgaagctacaaaagagccagggctgaccttcatggttgcaaacaatgatggcattctcgggctaggatgtcaagaaatctctgacgagaatgcatcaccagtgtgaaataacatggagaatcaaggtctcatcatctaccactgagtctctagctgattcaaccgacacgctaaggaaagtgaaggtgatgacaaaggccaagggagcacaacatgcatccacgaaagaaccc

SEQ ID NO: 101906 - DNA, 389 bp, Zea mays
  unsure (1)..(389): unsure at all n locations
  Clone ID: MRT4577_24448C.1
gaaagatcgggtcggtttcttcctnagggtggtttttttttttttttttgggggcacccaaaaaaaaatccccttggatttgggggggttcaactactttgggggggggaaaagggccccgggccccaaaaaaaggcctcaaaaaaaggccaaaccggggggtttctttaagggaaattccccccaggaaaaattcccaaggccaaacccaacctttggcccgggaactacccccattgttttgggggggcccccccatttgtttaaaaaaaaacttttttggccccaaaaaggaccctaaccccgggacaagagaaaggggnccggtttttaaaaaagggttgggggtttttgggcggtttttttgggggtgggacccctttttaaaa

SEQ ID NO: 101907 - DNA, 351 bp, Zea mays
  Clone ID: MRT4577_24449C.1
atctttactattagcgggcgtttttttctttttttttgcgcctccaaaaaacaacaataccatccctgacaacagattcacagaataagggcccattgataaaaaaaattccactaaaccaaatccggaggccactaaaacgaacgcgacccaatgatccagtcaaggtacaaaaactcatggacagtattcgtgtcatccgcctccaagtacctataaatgtgttggaggtcgatgaggtctattatagcttctctggatgccacctctacgaggctcaccagcgccttggtctaccaaccatccactgcaaagttcgccgcgggacaaaggaaacactgatgcaccata

SEQ ID NO: 101908 - DNA, 358 bp, Zea mays
  Clone ID: MRT4577_2444C.1
aattcggcacgaggggaagacggtactactgcacatcggcgtaaacgctcggccggggcccctcctccacctccccgacgcatcatccagctccctgctccggccgcagcgtcccatggccgcatgagaacctaggggccgagctgccatagcaccataacgcctacctccatcttcgctgcggacctcacccggcctgtcaacactgcaagcttacccaccgtaagaagataccatacgttgtgcttcacaccgacggcacactgtacaacgaccatagtgccttactacagagcgagcgtacagacaactacaagcgccaaatgtgactctggcaatgatagatatgctcacgacc

SEQ ID NO: 101909 - DNA, 367 bp, Zea mays
  Clone ID: MRT4577_24450C.1
cacaactttcagatagatctacatctaactttaccagcctgcaccatgcgatttctacttcaggctcgtatctacgcttccaagacatctccataactaaatccactacatcaccttcacaacctctctcactacaaattcttcttgctagacacatactactgctatctctgacaccacctctattaccataaagagacctatcccattaatcactaatgctccatcatatgatatcaatgactgacagactttaatgtccttgacaaactccaccttgatcgctatttctacaaccacgactactccacatactggcttcacttcctaccaggtcttcaagactatgctcacatacctttattat

SEQ ID NO: 101910 - DNA, 235 bp, Zea mays
  Clone ID: MRT4577_24451C.1
aagcattctgctgaactttccaaccgtttagacaagcaaaattaatcactaatggaaagatattttacaatggtgcatgagttgcataaactgcatgtacaagaaaagacaatcattcgcaacttttattaactaaaaatcacagaacggctagctcccaatctctataaataaaatcaacatggataacataatatgagttcaactttaaactaaaaacattaaccataaattt

SEQ ID NO: 101911 - DNA, 293 bp, Zea mays
  unsure (1)..(293): unsure at all n locations
  Clone ID: MRT4577_24452C.1
aaaaaaaaaaaaaaaaaaaaaaaaaaaaaaaaaaaaaaaaaaaaaaaaaaaaaaaaaaaaaaaaaaaaatttgttcataaaaaaaaaaataatacttttgcttgtgaccacttttaaggttataattttagttatgctccatcacactggggggggggggggagcttgctctttaaagggccaaattcgctcctatacctgtggccatttacaattaaatggcacggngctttacaatttctgggcgtggaaaaaccatggcggtgccctatttaaatttatgggggtagaaa

SEQ ID NO: 101912 - DNA, 368 bp, Zea mays
  Clone ID: MRT4577_24453C.1
accatgcgaatacagtatcactaatggacaataagaataaacaaacacagtagtcttccctttatccttgcggatataatatgttgtccaatcgttaattacaagtcaagtctgaatgaaaagtcgaaagtatgggatgggtgactcgatgacgtcagcgtgtccacctcagattggcacaagcctatcccgaatgcagaagtggctcacagaacctccaatcttgtcgctgatcagtggacgccgtcgttgtcggttgtcgtcgttgccccgtgccgcgagaatttttgcgtgctcctcgcaccaactgccatctatgttctcctgttgacttcccctccgcctctcgcgttcctgcagtccttgat

SEQ ID NO: 101913 - DNA, 625 bp, Zea mays
  unsure (1)..(625): unsure at all n locations
  Clone ID: MRT4577_24454C.1
gcnncggccgggccggggaaaaaaaaaaaaaaaaaaaaaaaaaaaaaaaaaaaaaaaaaaaaaaaaaaaaaaaagaaaaaaagaagaaaaaaaaataaaagggtccccaagggccgcaggaagccaaaaaaaaaaaaaaaaaagccccttgggccggaggcggtttaaaataaaggggaccccccggctggaggaaatttaaaagaacctcttttggcacccggtttaacctcgagggggggtgccggaaaccccagtttggccccaaaaaaggggtgggaattggaaaaactccgcgggtcgccattttaaaaggttgggagggggaaaccctggggggacccgacttaaaagcgttgaggccaaatcccttttgcctattggggggattaaaaaaatggacccccaccgtaaacctttcccaaaattgtgctgttttaattggcgatggaattttgaaaggccaaatttttttttaaacccccggtaaaattttggtaaaatcccttgtttttttaaacaaaaaaccgaaatcgggaaaaaccctttttaaatcaaaaaaaaaaagcgcaaaaagggggaaggggggttcaagggggaaaaggggaacaatctttaaaaaggg

SEQ ID NO: 101914 - DNA, 581 bp, Zea mays
  unsure (1)..(581): unsure at all n locations
  Clone ID: MRT4577_24455C.1
cgnaaaaaagnaatatacattggnagtataagccacattcttttgcgtatcttgctcaccgtcacctgacgaacaaaattgacatcgggagtgcagtaacgattagtgagtggtcctgtattgagcctgggtgcagcctctgccagtataagtgctctacgtgttatacatttttttatgaaaaaaaaaaaaaaaaaaaaaaaatccatgaaacattgatccactgagaaaatatatcttcaggtgccaatctacgacaaaaaaaaaaaaaaaaaaaaaaaaaaaaaaaaaaaaaaaaaccaaaaaaaaaaaaaaaaaaaaaaaaaaaaaaaaaaaaaaaaaaaaaaaaaaaaaaagggggggccccttttaaagaaccaaattttacttccccgggcttgcaaggaaaaagtttttttttggggcccccaaaataaaattcatgggccgggttttaaaaacgtggggatgggaaaaacctggggtttcccaaattaaatcccttggaaaaaaatccccttttcgccagttgggttaatacaaaaagggcccgcaccaatcgcctttccaaaaatttgccc

SEQ ID NO: 101915 - DNA, 406 bp, Zea mays
  Clone ID: MRT4577_24456C.1
atattctaacattattggacgcccgcgcctgacacgatggaccgatacgacgacaccatcatccccttctcccgccgagcggtcacctcttaaccaacccctctcctcgtgcaccgccgtctcacacggaacatgcgccatggccgccgcctcctcccgacatggtctggctccccgtgcacgaacactacctcacgatcttcaccgtctccagggccttgtccaccatggtgagccagctcacccatgtcgatccgcattgatgggtgatgaatgaggacgcaccagcgatcgtgaaccttactgagcatgaccggcacaatctgcgagttgtcgtcgatgagccacgctacccgaagaggacatcagcggatacctcgctaagatgcatgatgctgatacacag

SEQ ID NO: 101916 - DNA, 432 bp, Zea mays
  Clone ID: MRT4577_24457C.1
cccacgcgtttgttcacgcgtccgcccacgcgtccgcccacgcgtccggtaatggagccgatgtgccttctggaaccaaacctgaaacatgtctagcttgtaggggttcaggatttgttagttcttcattatgctgattttgtcagaccggaggaggacgatgagatcaaggccatgtgccactaccggagctctaaggtggacaacattgtctactgcctcagggatgacgtttatgtcaagcgcctcagcggtacatggtgataaaatcttgagcaaaatgggagaaggccttttagttcacaatattcttttgttctactacaaatatgttcaacatggcagggagagtctcgaggtcaagcctggacccactgtcaagtgtgtgcttggacatgactttatcctgcactttccattgctgcacttggg

SEQ ID NO: 101917 - DNA, 694 bp, Zea mays
  Clone ID: MRT4577_24458C.1
cctcgagtttttttttttttttttttttttttttttttttttttttttttttttttttttttttttttttttttttgagcaaaccaacaacagatgggataatagcaaaagggggaaaacccacaaaacaaacccggggttttttttttttcccccaaaaaaaaaaacccagtttaaccgaccccccccattttggtctcgccaggggcatcctccaaaggggggagggggggggcagcccccggagccccctcgccctcggggaggctcaggcccagtttgagcatgcgggggaggcggctgccaaagggggggggatcggcggggctaaagccaaaagggggcagcgccgtttaaaacagaagaaggaaaggggccttaacggacttggcgtttttggcagcctcggcacgctgggggagcccctccatggggggggtccggggggggacccccatcggcttttggggggacagggccccaaacagggggggggccctcagggccggggctttaaggaaccgctccaggggggggggccaaccggactcggggggcaccaggcagggggggggggcccccacgcggggggagacccccaccttttccacctgggggcccaaaacctccttggggaccttggaaaggccctaaaacttctccttgggcccctccttggcgcttttttcaaccc

SEQ ID NO: 101918 - DNA, 2111 bp, Zea mays
  Clone ID: MRT4577_24459C.1
gacgacgtccgcgccacgcgggcggaacttcgtagtttgcgacggggcacgcacgcacgacgcaccccacgcattttcaactatataaaaagcaccctggacccacgggcccgggccggcgaacagaggagaggagaggagagactagacccgctagctgaggccgggcggcgcgctggacacgaacatgatggggagaaaggcgctcggctgtgctcctcttctcctcctcttggccgccgccgtcgctccggccgagctcagcgtcggggcggcggctgcctcgggcgcggtcacccgggccgacttccccgcggggttcgtcttcggcgtcggctcctccgcgtaccaggtcgaaggtgcagttgcagaggacggaaggaagcctagcatctgggacacattcacacatgaaggctattcccttgacaacgccacaggcgatgtaactgcggatcagtatcataagtacaaggacgacgtaaagcttctgcatgagatgggtgtcgatgcctaccggatgtcgattgcctggcctcgacttatcccagatggtcggggagccgtgaatccgaaggggctggagtactacaacaatctcatagatgagctccttagctacggaatacagcctcacgtgacgatataccatttcgatttcccacaggctcttcaggacgagtacagcgggctgatcagtcccagattcatagaggacttcacggcgtacgcagacgtgtgcttcagcaacttcggcgacagggtcaagtactggagcaccgtcaacgagcccaacgtcgagacgatcggcgggtacgaccagggaatcctgccgccgcggcggtgctccttccccttcggcttcggctgcgaggaaggcaactccaccacggagccatacgtagcggcgcaccacctcctgcttgcgcacgcgtctgcggtgtccctgtacagagacaggtaccaggctgcgcaaggaggacggatcggactcaccttgcttggttggtggtacgagcctgggacgcagactcccgacgatgtcgcggcagccgcacggatgaacgacttccacatcggatggttcatgcatcctatggtgttcggggactaccctccggtgatgaggaggaacgtcgggtccaggctgccgaccttcacggacgaggaggcggcgcgagtgagggggtctttcgacttcgtcggattcaaccactacatcgtcgtctacgtcaaggctgaccttggccgcctagacgaccaagtgcgagactacatgggcgatgcagccgtgaagtatgacatgccgtttctcaagtcacgcaaccagttcccgttcggcgccttgacgagcgacttcatgacgtccaccccctgggctctcaagaaaatgctgaggcatctccgggtgacatacaagaaccctgcagtcatgatccatgaaaacggagctgccggacagcctgatccatccggcgtgaacagctacgacgacgagttcaggtcacagttcctgcaggactacatcgaggccacgcttcagtccatcaggaacggatcgaacgtgcaaggctacttcgtgtggtcgttcctggacgtgttcgagtacctgttcggctaccgcctccggttcggcgtctacggcgtcgagttcaactcgacggcaaggacaaggtaccagaggcactcggccaagtggtacgccagcttcctccggggcggcgagctgaggccagtcgctctgcctgacggagcatattcacagtgaccagttacacgtgtacgctccggctccaggggaggggaatatctggcgatcagcgctcttggtgaggtggagagaaaatagagagtttgtaagcacggatagtcggggtggtatatatagcagtgcttagatacggttttcttgggtaaatgtggtacgagttgaataagttgtggcatgtttggttagaggttagaggattggctctacccgaaaccagctgattcagatggtcgtttctatatatttggttagggggatggagtggatccattttttgtttaggcagctgatttagggcttgttcggttattcccaatacatatcgattggatgggattgg

SEQ ID NO: 101919 - DNA, 356 bp, Zea mays
  Clone ID: MRT4577_2445C.1
cccactcctccggctcttattctccaccggcaccaggccaccaccttctgccaccgcgcggccccaaccaaccacaccggagcgcatcaatggcgggcaacggcgccatcgaagagagcgacccgcttaactggggcgcggcggccgcagagctggccgcgagccacctggactaggtgaatcgcatggcggcacaagcccggcagccacggaccaagatcgatggttccaccctccacgtgagccaggtagacgccgtcctcttcgccaaggacgcgtacggcgttttcgtaaatctcgaccaggaggcacgaccccgcgtaaaggacagcaacaagtggatctctaactgcatc

SEQ ID NO: 101920 - DNA, 492 bp, Zea mays
  Clone ID: MRT4577_24460C.1
attgggacctcgagccggcgggagtcatccgacacgcgcgcgctgcttcatgcactcagttggcactcgcccctgacttcccatggccggaactcccagcatcgcggctggctttctccggtgcttggccagctcgtcgtcaggccggctcaagccccatcgcagcactccagctcgcccagtctccgcgccgtggcactccctctggtctgtgcttccttcagctcggccaagcgggacatcgttccctgctgcgctcgcccttggtgttggccacatgatcctcgtccggctcggccgcgacctcgtcatcgttccttagctcgctgcgcgccctgagtccgtgcgcgcgcgcagcatcctcaagtcgtcgtgtgcccagctcgctccagctcgccagtcgagtttttccctcgcgttcggacctggtcgttaacgcccagtcatgtgttcattttccccagcttggattccaccagccaccattgtcac

SEQ ID NO: 101921 - DNA, 159 bp, Zea mays
  Clone ID: MRT4577_24461C.1
atgtggcaaccgttcacgtgagtctagcactcccggcccgtttacttttgatccttccttgcgtcgggtagcctagggcttaggctttaagcgccgcgatgtacggcggcggcggcgactggcactacgacggatgcagcggtggagcagggaacgcta

SEQ ID NO: 101922 - DNA, 234 bp, Zea mays
  Clone ID: MRT4577_24462C.1
cccactgctaccttcttgcgcaagctcaatgccctagaacaaaccgtcgctgctagtaccgagcccacggaaagtgagatccgccgtcgtcacctcgagccgttggcgtcgcccgagctcaggaaaggggtccaaggacttcgtttgacgctgttgatgctcgccggtgaccgaacgcagcgttgaatcgactgcgccgtcgacaattgctccgcggagttcaaatttcatccc

SEQ ID NO: 101923 - DNA, 513 bp, Zea mays
  unsure (1)..(513): unsure at all n locations
  Clone ID: MRT4577_24463C.1
ctcccgccgtccggtagaacgctggaccgccacgtatgagcttccttgtcaacactaggcggtcgaacactgcgtgtgctgcgacgcgtgtgcctggacagtatnactataacacgaagagtgagttcatgcatgcgctgctccgcgaggctatgaggcacctcgattgacggatgcacctccaccaggcgttgacaactacttgtgccgaggcagatctgacactgataaaggcggcttatcaaaagacaaacagagtgccgatggagcgtgcttgcggacaaagaacaactagagattatgaggatattatgcttgccctccttggggcagagcgaggaggcatgcctcaactcgatctcatgtgctactacttggttgatggggccaaaaaactgactcgacgcgggatccacatgggcgtggctgtgaataataataaaccagtaacacgcagcctgcattagcagcgcgttttaaataaaggaactttcgtggtgaatatattggtca

SEQ ID NO: 101924 - DNA, 610 bp, Zea mays
  Clone ID: MRT4577_24464C.1
caccacggccgtgcgcgcccacgacgtaccggccacgcaacgggcccggggagtaactgtcgtgggcacgtcgcccatgctgcaccgatggcctggggctgccggtgctgaccgcctgcgcgtgacacagtcggacgccgtggccaacaccgtgtccggcactgagtagctggcaggaggagggcaggcccatgcactaccggtgcctcgacacgcaccgtggcgacccgatgccaatgggccgtgacggtgacgacaatggtggggagtgctagccagctctgatgctcgagaggggccacctgttgtagctagatatgctatgccatgctggccttatgcaggggcgactgatgcctagcgtgcatgaagtataccatacccgtctgtcctttttgcgaccctacatccatcggccagtctgttgtgattgacgcctacttcatgcacatgagcgctgcctaactagctctattcgtggcgcgctctctatgtgacccactgatagcagggagtacgactacacattgcatatgttgtgtgcagaccgcttatcatgcatgggcatagtgcgagtgccctcttgtggcatacgcgtttgagtacaaat

SEQ ID NO: 101925 - DNA, 412 bp, Zea mays
  Clone ID: MRT4577_24465C.1
gagtttctttttattaatctatttatttttttattaaggggggacgcgttatatctccatcacatcgcatgtctgttgtgaacagtcggactgaattttactacatgacgagaggttgagcctctgtgtgaggcttgatgatggacagacaccctggataacacttaataatccccgaacacccatgcgatggatatccttacccccaaagggcgctggtgctgtacaccaagagggggccaacaccgatgatcccagttagggtgacagtccacatccaaagcctaaagctttgaccgactaaaacgtgtccgatggggagaccggccttccttgaggcatattgggctgctgccggccaccgttgtccccttattgtcccacaaacggaccaccccgtagcccttgccct

SEQ ID NO: 101926 - DNA, 537 bp, Zea mays
  Clone ID: MRT4577_24466C.1
ccctctccttcctctccgccgccacacccctcgggtttgaagcccacacacgcgacctctctcccatgtaaccggccggcatgagcgtcgccagcgggagagcacgcagcccaccccaacagcagcggggagctggcctgccgccgccgccgcctgccgcgcctcgccggggaggcgacccggcgaccggaggagagggcaccatggcgcggaagcatggctggcagctcccggcccacaccctgcaggcggcttccggcggaggagtcttgtagtgttcgtggaggctacgaggaggtagcgatggggatcggctaccgagcgagggcaagggcgccgatctcccatctcctgtttgtaatcaccgacgcggccaccatcgactggatcttcaccccctcagaagatgtgccatgagttgatgggcagctagccgttgcaagagcattcagagatatgagctgctactcatacacagctcctacaaacttacggagccattgttctcctacctgggagcggataggaaggatttgg

SEQ ID NO: 101927 - DNA, 451 bp, Zea mays
  Clone ID: MRT4577_24467C.1
ccggccggggccgtatccataatcacactttcactccctgggtaccagattatcgcagcgactgcggcggcgtgtagatgggtaaaggtatcgggcgtatgttgttcgtctgtggattctctggggcggaataggccgtcgccggtgccaatgcaacgcatatccagcctctccttcactcggctgaagctggcgtttcatcactcaaggcgtttgagcaacaatggcgaaggtcggggaatatttgtgtgctctagccatgaaaggtcgctccacaagatccgtgtaatcaatttggctgtgcaacgcatgctaggactgatcaaccagtcaacggcttagatggagaggatcggaaaatccatcgatgaatggtctattgttgcgcgatacgatgaatccataacttgaccggttctaatataaatgactacccatctactgtacactt

SEQ ID NO: 101928 - DNA, 508 bp, Zea mays
  Clone ID: MRT4577_24468C.1
ggggaaaacaaagtcaaaagatgcatccgtctcatatccgcatcactgaaccggcgctgccataaacaagacccccaaaaaaacctactactactactactactttaatccagcaatcctatcctatcggtttgacaaccaaccagccatcacgaaaagttgacgcaaacgctgccgttcttggcgcacccgcacgcggggcacgccctggccgcaccggggcacggggcgcacgcgcacaggggccggcacgggagcagcagcacgtcggccgggctcaggccgaacaccgggcacgttctcgccaacgacgtacccgtcccgccgtcctcccccccggggaagcacgacccggggtcgtcggcgtcggcgccggcgccaggggcgccgcgcgtccgctggtcgtcgagcgcctgctgcagctcggggcggagctcgttggccgtggcctcgttggcccgcgccaggtcacgccacagttgggcctccacgtaaaggctcctggccc

SEQ ID NO: 101929 - DNA, 389 bp, Zea mays
  Clone ID: MRT4577_24469C.1
agaactatcaactgaccacgcacgcagcgcgtacgcatgcatgcattctatacagatccacccactcgtccgccagcagatcgtccgctagggttggaggctggtaccccgaatcccgctcctccaccacctcgcgtccacccttcctcttggcgcgctccgatccaagagatcgcggtgccgctgctgacaaagaagatcgtgaagaagcggatcaagcattttaagaggccccatcttgaccgctataagtgccttaaaccaagctggctcacgccaaagggtcttgacttccatgttaggaggaagttcacctgatgcactcttattccctatattggtttcgttttatacaaatctaccagactcttaccttactaaaatatatc

SEQ ID NO: 101930 - DNA, 618 bp, Zea mays
  unsure (1)..(618): unsure at all n locations
  Clone ID: MRT4577_2446C.1
aattcggcacgaggcggggagggcagggcagggcaggggaggggaggaggaggaggaggagagcattggtagcagcagtatttcttctttcccttcctgctcgatgcatccctttcttctctagcctcgcaaagtcgcactctctgggtgctctcgcctcctcctcgggcgacgctgccgccggcggaggtgcactccctctgactccctccccctctttccctcgccattaatttgccgcctgccatcccggccgcgcttcagtacgcctgaaagtttggttttggctcccatgggcggtggacgcaactagcatttctttcttggcggttcttggtgccttgtgggggtgggcaccgagcagcttcataggaatgggggtggcgcggagggaggagcaccgggcggccgccgccgcgttcctgtacgcgctgacggttcttggggtgttggcgggcggcgccggcgtccgcgctntcgaggacggcactgcggtgtacattgtcaccatgaagcaggcgccggtttcccacaggcgacttaacttggagaagttcgggagcagcaaggctgctactgccgtcggccgcggcggcagcggaaaaagaggaggaggag

SEQ ID NO: 101931 - DNA, 543 bp, Zea mays
  Clone ID: MRT4577_24470C.1
gggccaaaggggcccccttttttttttttttaccaggggaattttcaaatttcccgggcgggcaaaaaaaaaaaggggggcggcccccccggggggttttaaaggaaaaaagggaccttttttggggggggaacaaaagcaaagcgttctcagttgggcaaaggggaaagctaaattttctggcccccggggggtcccccttaaaaaaaccccgaaggaaactcaaccaaataattggggggggcccggggaaattccccaagctgggggggttttggggggaccccccagaagggggggccccccttttccgaccgggggttccgaaaccccaatgggagccgggggtccggaaccccggggaaaatttgggtggggggggattggtaaaaccccggggggaaccccgccaaaattttggccgatttgcctttgcccccgggggggggtccaaaaaaggaaaaagggggccccccaacaaccgggggaattttgttacggggtgttaaacccggttccggggccggcccccccacgggtccc

SEQ ID NO: 101932 - DNA, 560 bp, Zea mays
  Clone ID: MRT4577_24471C.1
tccgggacattaccccaggaatccacaccaagacttccaacgccccccggcgctggacaccgaaccaccaaggggccggacccatgggttaataccaagaaggggactaatggtccgaagaagggaaggccgggggccccggcgggttccggccgcaacggggcggcggccaacaacaccgcggcaaagaaaaagtccaagaaggccaaaacggcggaagcggcgggggcaaacaacaacaacaacatgggcaacaccgggggcaacggttccgggtggccgaaaacaagggccaagaagaacttcaccaccggacccgggaaggccaccaacggaaggaaaacttcctccgcaagactaaatggaaaagccgggcgggcgggattcaccgccggtcggggctggccggcgggcctaatgatggccgggaatggggcagggccatggaacttggtaagggaactaacgggaacgaattcgcttccggaagaaataagaacaataagtccgggaccgaataaaaactccttcgaattcctataccctcatcaccacgcaaa

SEQ ID NO: 101933 - DNA, 171 bp, Zea mays
  Clone ID: MRT4577_24472C.1
gccggccggtccgggatctccttcaggagccgatacttgttacagctatcgctggagaagtggtatgacgcgcacgacgatatatattagccatctgctttttggcggccgtatcaaggtgcacgagctccgagggaagagcaagacagggccgctagggccgctcaacga

SEQ ID NO: 101934 - DNA, 1207 bp, Zea mays
  Clone ID: MRT4577_24473C.1
gtccgcccacgcgtccggtcggccatgtcgacgctgcttttgctggttctccgcaacgccagcgttggccgagcggagccagaggtggtcatctgcggcggggcgcccaagaagtcgttcaggaagggcgagaacaacacgttcctgccggcgctccgcgactgcgcccgcatcaacctgggcaggcccgacgcgcggtgggagaaagaggacatgcccgtgggccgcgtcatgggcgacatgctgatcctccccaccggcgacctgctgctgctgagcggcgccgccaagggctgctccggctggggcttcgggcggcagccggtgctgaccccggtcctgtactcgccgcggaaggcgcagggcccgcggttccgggcgctggcgtcgtcgaccatcgcgcgcatgtaccactccaccagcgccgtgctgcccgacgccacggtgctggtggccggcggcaacacgaacgcggcgtacaacttcagcggcgtggacttccccaccgaggtgcgcgtggagcggttctccccgccgtacctcagcgagggggccgccggcaaccgcccggtgctggacgcggcgtcgttgcccgcggaggggatgcagtacggctccccgctcacgttccggttctctgtgcccgccgagcccgtggcagaggccgacgtgaagaccaccatgtacgcgccgccgttcaccacgcacggctgctccatgaaccagcggctgctgatcctgcgtgtcaccgcgttcgtcgaggagggccggagctacagggtgaccgtggacgcgccgagaaagccggagctggcgccgcgagggtactacctgttgttcgtggtggcgaagggcgtgccgagcatgggtgcgtgggtgaaggtccggtgagatcgatcagctcacatccaccgtgtgggtcgctgcgggatcgtgtacacaagtggagagccagcctaactctctctctctctctctgtgtgtgtctctttgcgttctttggttttgttttcctgctagggatggatggatgtaaataggatcgatcagattggccagttcaccgctggatccctctatagggttgattggatacctgcgcacgaccgcgcaggctccgacgagggtggctgtgtgggtacgccagttttaggcgtccatacggaagcaagtgaaatgacttatgttgtatctgtttatataggcc

SEQ ID NO: 101935 - DNA, 163 bp, Zea mays
  Clone ID: MRT4577_24474C.1
tctttcgggcccaaacaccttattcaagccgattttcaccgccgccggggagaggaccgcattaaaatccccccgatggcgttcccccccattttatatcacaacggggcgcccccccttgggcatattccggggaaagttccggaaccccccccaaggcttc

SEQ ID NO: 101936 - DNA, 1430 bp, Zea mays
  Clone ID: MRT4577_24475C.1
cgtcgtaagctcggaattcggctcgagatcctcatctgtcctagggaagcacctggagaccgcgcgcagtagcccctggtgtgtgctcacaagagcaatcatctgctgtgaccttgcctcttcctgcccttggccctgcgccgatcattgtcacaggggtcgcttgcagcctagaggtgggctgccagcccctgggtccgtccatctttaggagcaaataacgccgaccatggtcccggcggatccatgttgcctgtggggtttgtgaagggcgacaaagcagaggcggaggagtggcgacgacttgagtcgaccccgctttgggctgacgtgattctagaaaccattgagtgcatgcttagtggtttcgagatgcgatctcgattgcccaagcgtcggtgacgggggactttgtccccttcggacggcaccttctcgcacgatcggaggctcggtggaggcactgcaaacggcacaggtggggatagagttgctccgcgcgggtgctgtctacactgaagaggaagaacgcgagcttgtcgtcccccatttagaaatataccatcttcgaggcgagacatcatccttgcatgcgaagtgcgatggggctcgtggcaatgcagatcgcctttgaaactagggttcccaactcggagaggcactccgcagagtaaagtgtcatgctgggctagccgagtcatcttcatgggaggcaaaggttcgtctggtgcaagcagtctcaaaacttgtgatggagcgcgacgcgaccagagaggtccgcaaaattctcactcaagcgcgggatacgaaggtcgcggaggatgaagcgaaggctacagccacggagaatacatgcaagctcttgcttgctcgcgaaaatgccgttgctgcggggcaccgggcggatgcccttctctcggaaaggagcaccaaactccaagtgattcgtctggttgttagcatggtgtgcgcccatctctctcctctgttgtcgactgaggcgcctctggttgatcgcctctgggagctgcccgattgtgtggagagcgcaccgtcgccgagggcatttgtcgaggggtggaatcggccttggccagatggtctctcactttgacgagatcgacgtcaccattatcgccgagggctaagccagtgtccggagcgacaagtaattggacgttatcgaagaccaggtccacccccacgctcagtcaatcatgagccaagttgacgtcaggtccctcctaatcagcccctcgacactggagcttcccgccaatggtctaactgctcctatttagacgatgcccgctgggattcatgtattgaacctctacatggtgcattttgtgtatatgataacacttttttccatgtagacaatagctttgacacgcatttataaccttcccctgattttgcccccccgt

SEQ ID NO: 101937 - DNA, 627 bp, Zea mays
  Clone ID: MRT4577_24476C.1
ttgggtaaagcctagggatggctaattatttgggggggggggggggagcctcccagttcaaagacagggtcaggttagggttccccaacctttttcaaggggggtaatgaattttggctgtatttttcaaaccgcccacgccgttccccaaccaatatgccccgaaaaccccgggtccgttgacatttccgtgacaagggttaccgtcattttgggtcttgaaattttttttttttttttttttttttttttttttttttttttttttttttttttttttttttttttttttttttttttttttttttttttttttttttgacaattaatacaatttgttccagggtatgtatggggaatatttacctccgtgtacattctgtgtgcaaatacaaagttttgtacagttagcgggaatagagagatatacaataacgccagctggtacctgccagatcctcaatcttgaggaaggttgtccctgtatttcccgatttgcactttactcatgctgctctccaacctctgtatgcttgcagcaacccggccaatgttttgttttgagtcagcgctgtaatcaccgctgctgtcaacacttccagtgtcagtctgttcatcagtgctctt

SEQ ID NO: 101938 - DNA, 625 bp, Zea mays
  Clone ID: MRT4577_24477C.1
gattagaaaatagcaggtgaccatgccgaaaatagcaagtaaaatgatatatgtggttgtcatgagtgtggaaaataaatagataacatattgcttgttgggaaaaacatacatgttcccaacgtaagtcgtaggttgttcaaatgagttgttgacgattcaaattagttgttcaacatgcgaaaatgcaacagaaaacaaatgagatttgtgatctataaactgatcaagaatgtgaacaattgtaaacatgggaaaatgcaagggaaaacaaatgagattcgtgacctataagctaattaagaatgtgaacaatagtaaaccaacaatgcattgatacataagtacgtatggagggacatcatgttaagctatacagggaggataaagtttatcttgtttatgagaatataaaaattgagtatatcgacaccgcctgtttcgccacgattattgagtattcaatcctttcaagataggtaatgggctatggtaacctaccaaatgataatatctacaatgttataatcttagtatttcccatcacttgacattccgcaaataaacaatattgcatctgttaaatggctcttctaacaaaagaatttttaaacccacgcgtccg

SEQ ID NO: 101939 - DNA, 643 bp, Zea mays
  Clone ID: MRT4577_24478C.1
gagacgatggaggtcgcgacggcagcgaaggcgccgtcgtcccggctcgctcggagcctggctgctgcagcgccttgttacaaaggggtgtccgtcttcttcgccgcggtagtcgccggcgctctcgtctccgcctgctggatgtctgtcagcgccagattgcaggtcactccgatcactcctgccgccactccaggcatagcacgcaacgctgcaacggggccggaggcgccagcgccgggtcggccacggtccactggcgtcggcgcgagcacgaaccaaacgccgtccgcgggggcggccagttccgcgccaccgcctcgggaggtgccggactgccccgcctacttccggtggatccacgaggacctgcggccgtggcgcggcacgggggtcacgcgcggcgcggtggagggcgcgcgccggttcgcgcccaggctccgcgtcgccgtggtcgcgggccgcctgtacgtggcgcgctacggccggcggcggtgcttccagacgcgggccgcgttcacgcagtggggcatcctgcagctgctccgccgctaccccggccgcgtcccggacctcgacctcatgttcgactgtgaggacctgcccgtcgtcggcgctggcgaacgccacggggcccagcccc

SEQ ID NO: 101940 - DNA, 241 bp, Zea mays
  Clone ID: MRT4577_24479C.1
caataaaaacatattttttccgggggaggggcttgacaaaaaacctgccctggtccagaaccaccaaaaatctccgggcaacatgatgacctaaactcaccaattgatgatttattgctacatgactgcttgccaatgaaattattgactgtaccgccctaccccggaaatcttaaattctgaaccccacataaattatcatatttcaagattagttctcaatacaaaacgggaggaatca

SEQ ID NO: 101941 - DNA, 669 bp, Zea mays
  Clone ID: MRT4577_2447C.1
ctacagagtatggctgaaatgacattatcagccgctaaacgtggtgctgaactaacccgccatttgctggcctttgcgcgcggaaacccccttgaccccaaaccgaagaatattaatcatttagtggaggcgatgtggggacttattcgccgaaccctgccggaaaatattgagcttgaatttgcccctgaccccgatctgggtattgccgaggtcgatgctaatgaattggaaacagcattgctaaatctggtagtcaatgcccgtgatgccatgcaagatggtggcaaattaatcattgagacttcctctgctgtgctggacaatgattacgccgctctccactgtgaagtgataccgggtgactatgtaatgatttgcgtttcggatactggcattggcatgagcgcagatacggtaagccatgcttttgagcccttttttactaccaaaccagtaggcaaaggtagtggccttggcttaagcatggtctttggttttacgaaacaatcaggtggacacataaaaatttattctgaactcggtgaaggtacttccatcaagctgtatttccctaaggtgaaagacgctcagcgaataaactatcaaccggcgaaggaactaatacccaaaagcggcacggagcatatcctggttgtcgaggatgac

SEQ ID NO: 101942 - DNA, 155 bp, Zea mays
  Clone ID: MRT4577_24480C.1
gttggggaaaaaaaacgcaagatgggcgatccgtacatgctccgggactggtacttatatgtcacacattatgttacgaatggatacttgacacttattcaatgtcaggaaaacaatgggtttattgttgaaggcaaaaatatatattctgcttt

SEQ ID NO: 101943 - DNA, 725 bp, Zea mays
  unsure (1)..(725): unsure at all n locations
  Clone ID: MRT4577_24481C.1
ngttcgccgctgcggtttnctatctccccaccgcttcccggccacctcagaccccgagccgccccctccccccaccccatatggcgccgccttcccgccccgtagccgtcctcgcatggggttcgggggaagacgggcagctgggcatgggccgatgcgacgagaaggactgggcccgctgcatcggcgctctggatgcgtacgccgtctccgccgtcgtagccggcagccgcaactccctcgccatatgcaacgacggcagcctcttcacttgggggtggaatcagcggggaacgctcgggcacccgccggagaccaagacagagagctccccggcgcatgtcgacgccctcatcggggtcaagatcgtgcaggcagcgatcggcgggtggcattgcctcgcggtggacgacaaggggcgggcttacgcttgggggggcaacgaatatggacagtgcggggaggagcctgagaggaaggaagatggcacaagggcactcaggagggacatccccatcccacagcgatgcgctctcaagctcaaagttcggcaagtagctgcgggggggactcactcagtggttttgacacaagaaggccatgtctggacatgcggaccaccgtggcctccgggtgatatcaaaaaaatatctacgccagtacgtgcgcaagggccttgaacaagtgagcctgattgctgtaggggcattccctcctttggcact

SEQ ID NO: 101944 - DNA, 607 bp, Zea mays
  Clone ID: MRT4577_24482C.1
aacatacaagcacatagtgcaccaacatggcagccaaaatttttgctcacgtttgctccttggacttgctgcaagtgttggtaccgtaaccattctaccacaatgctcacaagctcctatagcttcccttcttaccccatacctcttaccagcggagcattaaatgtgtgaaaccccaattgttcaacccttacagatccaacacgcaatcgcaacatgcataacaaccattattacccttgctcctacaacaaccttcagacctattacagctactacctcagctccatttggtggaacaaatcataagggtacaacaactacaacaacttgagctagcaaaccttgctcaatactctcagcaacatcaatttattccattcaaccaactggcatgcattgaactatgctgctcatctgcaacaacaactaccattcagccagctagatgctgtctacctggaaaatcttttgcattcaaccaactagcagcattgaactatgctgcttatgtacagcaacaacaactactaccattcagacagctagctgatgtgagccctagtgccttgtttacacaacaacagttgttgccgttttacctgca

SEQ ID NO: 101945 - DNA, 533 bp, Zea mays
  Clone ID: MRT4577_24483C.1
aaacacccactccaacgtcttttctgaactctaggagacgagcaagacgcttggttataaggataaaacaaactctctgcacggagctgtattgaaaccaatgactatgaagcagcacagtttgcagtacttaaaagttcaagtggaaaatgatttgacagtgattatattctatcagtagctatatgtatcaatgatggaaaaccttcaaacaatgaatccttattaattgaggaaaaggaaaggaatggttgagttgacactattgacactagagcatctgccaacagttctaatacaaagggttatgatggatcacacgaatatgctgacaagaatggatgccgattatcttgagagaaacagatcagatcatgctgatagaaatatgtgtgcatatgcaactggtgatgatagactccagtcaagatgaaaagcagagatgctactagtacgtactgatggatgatcttgtgctagagaaaaagtaacagaatcatatgtggcttttacgcatactagtacccagcaac

SEQ ID NO: 101946 - DNA, 333 bp, Zea mays
  unsure (1)..(333): unsure at all n locations
  Clone ID: MRT4577_24484C.1
actcctataggggcgatgggttccttcgagncggccggggagaatatacgggcagatacccaactcttccaagcagatggatggggctttatgagaacgtcgcggatgcgatcaatggcaaggcagaattagttgtcaagcctactcagtgtcgggatgttttgagagtcattgagctggcgaggcaatctcatgagaagcccgctactcaccgctcggaggttgaaggagcggtgctgctgatctggacatcgtgtcccccaacaagatctttcatgctccgaacccaagaggacgtgtgtcatgctcgataacttttgcctgtgctctgct

SEQ ID NO: 101947 - DNA, 434 bp, Zea mays
  Clone ID: MRT4577_24485C.1
ggacctttgggctgatttatgtgcttgggagcggggacgaagtaacctagcaaagctcgtagggagtctcccggtacgtcctagaagaccgacggcgataaccacttagagatttcgcgttgtacgcctactactaacgtaggttagggaccttggtcctcacggggtattgctaagagtccctccgatttaaagattatcgtaaagacctacgcctcgggcaataagcactagagtaagtcctctgaggcgaccgacgtcagcgagccgttagaaacccccggcggaattcgttgacgcgaaggcggccgtacgaaggtcgataaaggtttccggaaggattttgaaactccgaagacggcctaaagcggcgacgggaggcgcggactatctggcatggttctccctgaggtcttggagaaaacgacccgcga

SEQ ID NO: 101948 - DNA, 282 bp, Zea mays
  unsure (1)..(282): unsure at all n locations
  Clone ID: MRT4577_24486C.1
ccttcaccacgccaccgactccggctctcgctcccccctcgccgcgccggccgaacgccacgatgcgtcacctnctcctctcccgcttccttcgccgcggtggcggcagcggcattcccaacggccaataccaacaacttccccttcttccgggccttttcttcttccccttcccgggcttcttggaccccaaagttccgaaggtccccggcctacccccggttttttttcggctggcgggccgggacctactattccttcccgttcccggccaacgcgctg

SEQ ID NO: 101949 - DNA, 195 bp, Zea mays
  Clone ID: MRT4577_24487C.1
gtacacacactgggggggcataaataagacgctgcatactttacaggacacaatatatacgcacacaattagatctgagactaccaaaatacatcacaccgtgccattccacgaggcactcataaccaccgtacgtgccactacatgcaggcacatggctctacaagcttaagcatatgaaccctacgaggggag

SEQ ID NO: 101950 - DNA, 284 bp, Zea mays
  Clone ID: MRT4577_24488C.1
gcggtctggttgtgaggaaggatgcatctagctcgtgactctctgaccccaagcgacccaagccagggtggtactggaggtactggctcgtgcctatgcaatccgatggagggcgagatcagggacgagtaccgtgaccgtatgacgctggcattctcagtcatcccctcaccggacgcatctgataccgtggttgagccatacaatgccactctttctgtccaccagttggttgagaatgcagatgagtgcatggttctcgataacgaactcctgtatgacat

SEQ ID NO: 101951 - DNA, 206 bp, Zea mays
  unsure (1)..(206): unsure at all n locations
  Clone ID: MRT4577_24489C.1
ctctcccgtcaactccggcttccgcgcgaggtcgagntatcgttnggagttctcgagacctacttgttatggcggcagnncaancgnnngngaactacacggtgganganctcntggccctgaaccctactaccncgacancctncanggcttcgnggagttcgncaatagangctcatcnagtnatatactngatgaattnnaca

SEQ ID NO: 101952 - DNA, 303 bp, Zea mays
  Clone ID: MRT4577_2448C.1
aaaaaaaaaaaaacaaaaattaccaaaaaaaaaaaaaaaaaaaaaataaaaaaaaaaaaagggaaaaattggaaaaaaaaaaaaaaagagaaaaaaaaaaaaacaaaaaatttcctccttttaataaattccaaggtcactttcccgtacctccacctttttaccccttttataatagactactaattttcttcaataacatcacttaacaccacttttccctttaaaccatctttagaaaaccttctttattccccaaataaccaaacaaaatatccacgactgacttgtcattcaaacatc

SEQ ID NO: 101953 - DNA, 360 bp, Zea mays
  Clone ID: MRT4577_24490C.1
aagtcttatcctttttttttcctttttaatgaaccaagagcccacctgtggagggggttttgtaaattttagagttcacactgggagccgggcaacaccaaagggggttcaaggttcaacagagtacaaaacacaaacctggaccacgaccatccgctgccgtttatttacttagggcgtccttttcacacaggacacaaacaggccccaaatttttggggacacattcttgccaagttacccactctttactagagataagaataattttgaagggtacccactccaaactttgagtggatcagtccaaaattgatttggagtctgaccacccccaagacaatacactcacaggctaac

SEQ ID NO: 101954 - DNA, 667 bp, Zea mays
  Clone ID: MRT4577_24491C.1
gggtacctcgagggccggccgggagatcatttttcccaccttctcgtggatcagtcctgattagttttctcctcgacacctcgcgcatcctatctgactatgctgagctgatgaatagtgttcatcctacccaggatgaccgagtggacatgatctactgctccctcttctgtatcggggtcatctctgactccactcctatggaggaccatgttcgtttcccgaaatcgccgatgctggtgctgcctcgagtctcccctcctcgcatcgtgatgtcagagcttcgccatccgcgcacccgtccgaaattgttaggcgacaaccatctcaatctctgatatgtcatactgcagggcttaaagaggaaccgctgcactctacgatgcatttctacgggacagccgtaggagcacttctaccctatgacttctccaagaacccgacatttgcaagcgtacataggtggctccgtaagctccactaccgcgcattctccaacatcgtgatcatgatggacggcaacaagtctgacctgctccacctgatgttggctccaaggaacatgcgcacgcgttcactgagaaggaaggtctatccttcctcgatacatccgccctcaaatctctgaactcccagaatgcgatactcatcggactctctgagatcc

SEQ ID NO: 101955 - DNA, 359 bp, Zea mays
  Clone ID: MRT4577_24492C.1
ctaactataaacatagaacgtacaatattagaccaataatggtagccaaaatattatgccacattatgctctttggtctttctgaactaactgctatggacatgcattttaccgcactgctcacaggctgctatagctttccttgttccccaatacctttgaccagcaatgcatttacgttgtgaaagatcaattcttataccctacaagagtccacagggaatttcagaaggcatgttacctttataaaccttaggcctcccacaatgatgcgtcctattacacgagttacctttggtgcatttattggcacaaaacattagggtacaacatctacaacaactcgtgctatgaaacct

SEQ ID NO: 101956 - DNA, 522 bp, Zea mays
  Clone ID: MRT4577_24493C.1
attactcaggctcctctagccgtctcgtagcgcttcaccattccgctccccgacgacgccattccacgctcgcctgcgcatccgctctgcatgagcatcaccacgaatacgcagctatgagatctggaagcacctctatgtggtgggcgtcgtgcatcgcgagaactgctgcgagcagaggaagcacgcgcacatcgatcggctcaccctgcccactctccctgtcatgcagagcctcctcgcctacgaggacgagcaagagtacgtctcctgcgtgactacgacaggcacgtcgccaacaataggactgagcctatacgcattgaccatgacctcccagagtgacattgtatctgccacgttcagtaacacaggcacgacactgctgctgctgattagatctgtgcactactgctgtagcgcactcagggtcctgcaactcctactggactgatgaggatagcacctacgagaactttgacatcattcttgtcgatgtgctcccactgacttccgcgatga

SEQ ID NO: 101957 - DNA, 533 bp, Zea mays
  Clone ID: MRT4577_24494C.1
acaaagctttttttttttttctttttttttttttctttttttttttttttacaagcttttttttttttttttttttttttttatttttttttttttttttttttttttttttttttttttttttttttttttttttttttttttttttttttttttaaaaaccccatttaaaccaaaaaaaagtttttttaaattttaaaaattaaaaaacccctgggccggaacccccttagggggaaattccaacaaattgggggccttttttaggggacccaacctgggacccaatttggggaaaaaaagggaaaaaatttttccctgggaaaaatttttttcccttaaaaattccaaaaaaaaaaaaacccgaaaaaaaaaagggaaaacccggggggccctaaggggggaccaaacccaaattattgggggggccctaactgccccttttcaaagggaaaaacttgtgggcccatttgattaaaaaaatcccccaacccccgggaaaagggggtttgcatatggggcctttttccctt

SEQ ID NO: 101958 - DNA, 1761 bp, Zea mays
  Clone ID: MRT4577_24495C.1
gctccttcgcagagagtcccggggactgccgggctgcaggctgggtggcctccctgtcttggccggggcactgccagaggattaccgggggcctccggcccttcgcggtgcctcagggacttgccggctagcgccgagcaggcggggaagctgggtgggccagggctgggccgtgcaatctcctaccagttcgttggctggatggcggggcctctgactgtcgcctccggggggcgcggacgttctgcatctgcccttgtgcccccccctgtaagccctggagctgcggaccctggtcttgagccccccgttgggctccgtggcctgtccctgtccgcaaacagtgatatagaaggttctttcttttttaagccacaaatgcgggcttcccttctgtctcctggtgtttcaataatgaacaacacaaagttattcagtaccaagcttatgtgctatgacccgcctgacataccagatgaccgcaaattgtcctgaaataatttcccttagacaagacgaaattttacaaatacttctactactcaacaaccgaatggtgctagtgttaggagcacagctgaagaagaacatgataatgcaatggtccttgaactgaatagtcaagctgaacgggtttccagttcccgaggagatttggtatccgtttcaggtgctgctccatgcaaagttcctgaagaacaatcactccacaagaaatcaaaatgttctccaaccagcaacaaagcaaagatcctcctagttgaagataacaaggtcaacataatagtggcaaaatcaatgtcgcagcagctgggccatggaatagatatcgtaaataatgggatgcaagcaatccgtgcagtacagcagcatcaatatgatcttattctgatggatgttcacatgccagaaatggatggcctgcaagccactaaacttatccggtcttttgagaataccggctgttgggatgtttctgtaaagcctgaagataatccgatgataactgactcagctatttcatcagattctgcacatgcaaaaaagcaagggcagagggttcctataatcgcgatgacagcgaattcattcgcagagagtgccgaggaatgccttgctgcaggcatggattcctacatatctaagccggtgaacttccagaatataaacgagtgcctgcagcggtacttggtgtctcagtgactaaccgactattgtaaagtagaaaggtaatctgtgtaggccaggaaagttttgtggaatcacctacgagttcgtttgctgtaaatcgatgcgtaataaattctagcgtatcctgccttgtcgaccattttaccttcaccttctgggagacagagacatactgaatctgacctaaccccaccagtaagatcaagagctaactctgaactttaggatcccatttggttacgaggcatatccctgtatataattgtcacggaggttcttatcctttagcagttagtcttctatctgtatcgtaattgatgagcaacatcggttttatgatgatgtgatggagaagcaaaggtgtaatacagcaataagtgtacatgtattgctggaacatttatagatcaaacctgccatctttttcggtgcaaaatattctaataatccacgttcaaagatttcaaagttaaaaaaaaaaaaaaaaaaaaaaaaaaaaaaaaaaaaaaaaaaaaaaaaaaaaaaaaaaaaaaaaaaacaaaaagggggagaaaaaaaaaaaattctggg

SEQ ID NO: 101959 - DNA, 469 bp, Zea mays
  Clone ID: MRT4577_24496C.1
gttgttttttttttttttttttttttttttttttttttttttttttttttttttttttttttttttttttttttttttttttttttttttttttttttgggggggggcccccctgtccttgggctttattttggctgggctcgcggagggggggggggcccataaaagcttgggcctcaaaatttttcccttcgggccttttggccttctccaaagggccaaaaaaggtgggtcaggggggggggtttttggcggcccttccgggctttagggagttcgggctttaccgaaccctggctttagggaattcaggcttttttaactccagcctttagggaattttatttggcgttcccaaataatttttgaaccattttgggagcctttggaaaaagaaccaaaggctttggggcctttaaattggggccttttcttgggacgggggcccttttttgtgttgctttgggga

SEQ ID NO: 101960 - DNA, 267 bp, Zea mays
  Clone ID: MRT4577_24497C.1
gaggcaggggcgcagttgctgaagccgccacttcacctcgactccatacagaaatggcctattcttgcgcctacacactcccttcactttccttcgtttcctcctccagttcatctccgccgattcaggcgctctggtgtggtggccatggcacagcgttgggcagaaggtgtatgcccccggcgtggcggggtccaaggacaatggcggtctgccgaaaatccacctgaaatacacccacgggagcaaggcttagatttatctgtt

SEQ ID NO: 101961 - DNA, 2068 bp, Zea mays
  Clone ID: MRT4577_24498C.1
ccgggagcttgtgctcgttcgagactgagacaccccaacacgcctccctcagcgcagatctcgccgccgccgagatgctccgccgcggcgtgcttcttctcgcggccatcctcatcgccgtcgcacactcgcccctcgcgtacgcctcggaggccgagcacaagtataaaacagaagaacctgttaagctatgggtaaacaaggtccttggtggaaatgagctgattgatagtcagatcgatataaagttcataaaaaatgtggacaagggggccatttgcacaattgaacttgatgttcaaaaggttcagcaatttgctaatgccattgaaaactcatattggtttgagcttttcatagatgatctgccattgtggggttttgttggggagactgacaaaaacaatgagaaaaagcactacctttacactcacaagaacattgttgttaaatacaatggtaacaggataattcatgtgaatctaacacaagagtcacctaagcttcttgaagctggcaaaaagttggatatgacttattcagtgaagtgggtgcaaacaaatgtggcatttgcacggcgctttgaggtttacttagactacccgttctttgaacaccagattcattggttctccatcttcaattcattcatgatggttattttcttgactggtttagtgtcaatgatattgatgaggacactaagaaatgattatgcaaaatatgctcgtgaagatgatgatctggaatcacttgagcgagatgttaatgaagaatccgggtggaagcttgtccatggtgatgtgttccggcctcctcgtggccaggtgtttctttctgccctagttggtattggcactcagctggcggctcttatcctgcttgtgattgtgttggccattgttgtcatgttatatgttgggcgaggagctatcatcacaaccttcattgtgtgctacgctcttacatctttcatctctggatatgttagtggtggtctctattcaaggaatggtggaaaaaactggataaaggctatgatccttacagcatcactttttccattcttgtgtttctcgattggattgttgttaaacactattgctatcttctaccgatcattagcagctataccatttggcacaatggttgtcatgtttattctttgggctttcatctccttcccgttggttctattggggactgtagttggtagaaattggagtggtgctcccaacaacccgtgtcgtgtgaaaacgatcccgcgcccaattcctgaaaagaagtggtaccttacaccttctgttatttcactgatgggtggacttctccccttcggcagcatcttcattgagatgtacttcgtattcacttccttctggaactacaaggtgtactacgtctatggtttcatgttgctggtgtttgtcatcctcataatagtcaccatatgtgtcactattgtgggtacttatttcttgttgaatgctgagaactatcattggcaatggacatcattcttctctgctgcttctaccgccttgtatgtgtatctatactctatatactattatcatgtgaagacaaagatgtcaggatttttccagacaagcttctactttggttacaccttgatgttctgtcttggattgggaatactttgcggtgctgttggatatttgggctccaccctatttgtgaggaggatctacagaaatatcaaatgcgactaaacttggtctaggctgctagcatgtcttgtcacaatatggtgcagagtaataccttgagcttctgattgacttcggaaattacacaggaggttgctctccctttcgttactcttttcatcttttttggcctatcttcctggacgtgtggaactgcccatgataaatgtatacctagttggagaattagtcagagtactggaaagtacatgtaggtttttttggtgcggcctctctcggtcaattgtaggagtacattgatgaatattactgcagtgcagattccagtgggctagattcgcccctcttaaaaaatcgacgcggccgcgaattcggat

SEQ ID NO: 101962 - DNA, 526 bp, Zea mays
  Clone ID: MRT4577_24499C.1
gaattccgttgctgtcggccggccgccgggacggccgccgcctgggctccgaccgcgccggctcgcgcgcctctgcagcgcccgcaactggccaaggccatccgcctcctcgactccatcctggcccgatccccctcctccatccacgacctctgcaaccgggccttctgctactcccagctcgagctccacaagcacgtcgtcaaggattgcgaccgcgcactgctgctcgaccccgccctgctgcaggcctacatcctcaaaggcaaggcactgtcttcattagataaaaaagaggatgctctagctgcttggaagcaaggatatgaaattgctgtccgtgacacaacagacttgaaacaattgcttgatctggaagaattggtttcttctgttaaaatttgtgggacaacccagtctgcggaccatgtcatggatgcatcaacttgtgataccaaagttgttatctcagaagatcgtgttgctgacacgtcgttcgctgcaactacaatggctgatacaaaaa

SEQ ID NO: 101963 - DNA, 186 bp, Zea mays
  Clone ID: MRT4577_2449C.1
ggggtcggggtttttttttttcttactacctacacttttgggctcttgtttctgttagtcctttctctagcggggggacaaaaacattttcatggccccatgctggcaaatctgacgaacagcacagaatccggctgcaaagttttcaaccactggaagaagacccagtcggactgcaccggcggg

SEQ ID NO: 101964 - DNA, 592 bp, Zea mays
  Clone ID: MRT4577_244C.1
aggcgtcttcgtactcatcctacctccgcggctcaaacctttcccccttctcacaattccttccgccggacgccgctccacccgtacgacgacaccatgagggagtgcatttcgatccacatcggccagaccgctatccaggtcggaaacgcgtgctgggagctgcactgccttgagcatggcattcaggctgacggtcagatgcccggtgacaagaccattgcgggaggtgatgatgctttcaacaccttcttcagtgagactggtgctgggaagcacgtgccccgtgctgtttttgtagacccagaacccactgttcatgactatccgagacatcccccctaccgccagctcttccaccctgagcagctcatccatgcaaaagaaaaatgcagccaacaactttgcccgtggtcactacaccattggaaaggagattgatgacctgtgacttgatcccatcaagaagcttgccgaccactgacctggtctccagggcattcatcgccttcaacgctgccggtggaggaaccggatctggccttggctcacctcctcctaaagctgcctgtcagacgactacggcaagaaa

SEQ ID NO: 101965 - DNA, 932 bp, Zea mays
  Clone ID: MRT4577_24500C.1
gggtacctcgaggccggccgggccgggattacggcccctctctttctctctctgactacctccgtatgaggcagcttgtgctcgttcgagactgagacaccccaacacgcctccctcagcgcagatctcgccgccgccgagatgctccgccgcagcgtgcttcttctcgcggccatcctcatcgccgtcgcacactcgcccctcgcgtacgcctcggaggccgagcacaagtataaaacagaagaacctgttaagctatgggtaaacaaggttgggccttacaataaccctcaagaaacttacaactattacagtctcccgttttgtcaaccatctgaaaaccctgcacataaatggggtggtctcggagaggtccttggtggaaatgagctgattgatagtcagatcgatataaagttcataaaaaatgtggacaagggggccatttgcacaattgaacttgatgttcaaaaggttcagcaatttgctaatgccattgaaaactcatattggtttgagcttttcatagatgatctgccattgtggggttttgttggggagactgacaaaaacaatgagaaaaagcactacctttacactcacaagaacattgttgttaaatacaatggtaacaggataattcatgtgaatctaacacaagagtcacctaagcttcttgaagctggcaaaaagttggatatgacttattcagtgaagtgggtgcaaacaaatgtggcatttgcacggcgctttgaggtttacttagactacccgttctttgaacaccagattcattggttctccatcttcaattcattcatgatggttattttcttgactggtttagtgtcaatgatattgatgaggacactaagaaatgattatgcaaaatatgctcgtgaagatgatgatctgggatcacttgagcgaga

SEQ ID NO: 101966 - DNA, 424 bp, Zea mays
  Clone ID: MRT4577_24501C.1
gggggccaaaaatccccccccgggaaacatgcgtaagggggggcctgttacaattaaagcgggtttaaaaacacataaaaaaaattttttggaagggaacacggggggccccccaaaccaaaagcccacttttttttttaaatcatggggggggcaaaaaataaaaaaggcctttaaaattttaaactttttgggcccccccaagttttaaaattccaaatactttggccaaaaacgttttgggaaccctttaaaggggaaaacctttccttggggcccaaaaaataatttccttttggaacacgtagcccttggtggcccatggggggattaagttttccaagaaatttcgtttttttagccaaaaagacccggttaaatttgaagccccaggctggaaaaacgtttgggcaaaaacatttgc

SEQ ID NO: 101967 - DNA, 867 bp, Zea mays
  Clone ID: MRT4577_24502C.1
ctggccggatcgtttccttcgtcctggggcctgggcgacttggctggctcttgctaatgggagttgacaggacagatcacggccagccagttaggtcgctgtgacgagctgtacaagaggagtgttccgcgatgatgcgtctcaagcagatttatatcggaggagaaggagatgaaccgcgttggctcttctctcggtcctgaaagcacaagtttactatgtctgggatggcatttgatgattcacctgcccaagtgaatgttgaaggagatgtttcagagaaaaaagtagaagttcaagaccagaatgaagtgggtgggatgccctcacgacaagaggaggaggcagcgattaagaaaaagtatgaaggaatattgcccagaaagactcgcgcttatatctaagattcttagctatgggctggcatggtgcatctgtcaacaagatctccagttttccacgctgttgaatcgacaggtacagcagacaaatacagaaaagggctggcctggttaaaaaacggctcaggttagcaagcagcctggcctgcttcacgtttgagagaaggtggcttcgaacgagacctgatcgtttccttcgtcctggggcctgggcgacttgctcaatgggagttgacaggacagatcacggccagccagtcaggtcgctgtgacgagctgtacaagaggcgatgatgcggctcaggcagatttatatcggaggagatgaatcgcgttggctcttcactcggtcctgtttcttaactgatgtaaattttagcttgtttttactagaggaacgatgtaagtttaaccagacgaataaaacaactgtgtatgctctgcttccaatccagttattagctgc

SEQ ID NO: 101968 - DNA, 657 bp, Zea mays
  Clone ID: MRT4577_24503C.1
ggaattcggcacgagggggaaggggagctacctgccgttgcgtgccagctactacaccttccagctcccggatcgaagcacgggtcggttaaagcacggggccccgagcggcacggccgacttggcagcagccagcaggtgaggcggagggagagggatgagcagcctcgctatagtggagaagaagccgccgccgttccccggcggcggctgcacgggcggcgtgctcttccacctcctggactggcaccgccgcctcgcctgcaagcgcaggctcttctccccgcgtcgcctcctcccttcgtccctccgctcctcgtccccacgcaggctcccgtgcccgcctcctgctgcctcgccgccaccgccgacgctgccacatccggccgatggggccgccccgggcgttgtcgcgcgcctcatgggcctggagtcctggcccgccaccgccaccgccgcgccgccgagaccgcagaagcagaggaaggtggaggcgtcgcgcgcggacggcgctgactcggcggtcgtgctcgtgctgcctacgacccggagccgtcgacctcccgcgtccgcgcccgtgccgacggcgaggagccaccacggggccgacctgccagcgcggagcccgaggcggacccgtctcgtgcacgcggccgc

SEQ ID NO: 101969 - DNA, 1142 bp, Zea mays
  Clone ID: MRT4577_24504C.1
gagccggccgggatcgttgccggctgccccgcgctcccgttccccttccgcgctccccaccactccgtcccatccctcgcctgccttcgcacgggtgcgccgcccgttcgacggccacgccgcgccgcgccgcgccgctcagctgccccggcaaccgctcttccttcccgagctcgggatcgacgtctcccgcacctcctcgcgcccgttccgggctccgcatccggcccctccccgtccccaaccccattccgcagcaggcgaccagcacaacatcccgaaacccccgccgccccccgcacgcacaaggttattatgtctgggatggcatctgatgattcacctgcccaagtgaatgttgaaggagatgtttcagagaaaaaagttgaacttcaagaccagaatgaagtgggtgggatgccctcacgacaagaggaggaggcagcaattaagaaaaagtatggaggaatattgcccagaaagactccgcttatatctaaggatcatgaacgtgcttactttgattctgctgattgggctctaggaaagcaaggtggtgttcccaacaagcctaaaggtcctcttgaggcactccgacccaagcttcagcctacgcaacagaatgctcgcgcccgccgaacttcatatgcgtctgcggacagtgacgagactttgaatctgtcccccgaggatctggtcccgcaaggagaacccagccagcagggagaaccagtcgaggacaagaacaaggaataagcacacaagatgccattttccgccgtcgcacaaaaaaaaaaaaaaacttcttttgccttggtaataagcgtgtggattcggttccggcccaacggtcccggtgaggctgaggttgagacacgtgcagcttgaactgcatgtgagatgtggtatccgctgcactgggctgttgggggtccttgggatgcatggaacaaataaacaatgatgcttgcgatgtttacattgctgtacctggacctgtgttacctctatgcaaacacatgcaaatccgatggtccgagactcgaaactctcccgttgagctgaaggagttgctgtactaataataatgaagatttttttgttctgatgttgcctatagatgcatcgcaatggtttctttt

SEQ ID NO: 101970 - DNA, 1389 bp, Zea mays
  Clone ID: MRT4577_24505C.1
ccccaccactccgttccatccctcgcctgccttcgcacgggtgcgccgcccgctcgacggccacgccacgccgcggcgcgccgctcagctgccccggcacccgcccttcctcgccgagctcgggatcgacgtctcccgcacctcctcgcgcccgttccgggctccgcatccggcccctccccgtccccaaccccattccgcagcaggcgaccagcacaacatcccgaatcccccacctcgcattcggctcgccgtagctcctcctccgcgtcccgccgcccccggcacgcacaagtttactatgtctgggatggcatttgatgattcacctgcccaagtgaatgttgaaggagatgtttcagagaaaaaagtagaagttcaagaccagaatgaagtgggtgggatgccctcgcgacaagaggaggaggcagcaattaagaaaaagtatgaaggaatattgcccagaaagactcctgcttatatctaagattcttagctaagggctggcatgatgcatctgtcaacaagatcaccagttttccacgctgttgaatcgcagaatatcctgaaatcaaactactcacgcaagaaaaaaaattctggaaagtaaattgttctgcctgctggtgaaggctggcatgaggagtctgtctacaagacatagcgcagttccacgctgctgaatcgcagattacatctgatgattcctattcacgcaagaaaaaagaagggggaaagtaaattgttctgcctgctggtgaagtttggttagaggagttgccataaaatccatagcgcagcacaagtttactatgtctgggatggcatctgatgattcacctgcccaagtgaatgttgaaggagatgtttcggagaaaaaaagtagaagttcaagaccagaatgaagtgggtgggatgccctcaagacaagaggaggtatagcagacaaatacagaaaagggctggcctggttaaaaacggttcaggttagcaagcatcatggcccgtatccagaaggtagcttcacgtttgagagaaggtggcttcgaacgagacctgatcgtttccttcgtcctgggcgacttggctggctcttgctcaatgggagttgacaggacagatcacggctagccagtcaggttcgttgtgatgagatccagaagcaagcagcatggctcgatgtgatgagctgtacaagaggcgatgatgcgttatcatctcaggcagatttatatcggaggagatgaatcgcgttcgcgtggctcttctctcggttctgttttactgatgtaaattttagcttatttttaactagaggaacgatgtaagtttaaccagaccaataaaacaaccgtgtatgctctgcttccaatccagctattagctgcc

SEQ ID NO: 101971 - DNA, 588 bp, Zea mays
  unsure (1)..(588): unsure at all n locations
  Clone ID: MRT4577_24506C.1
gggaccctcgaggccggccgggattcagcagagacgaactctaagcttgcgttcttgtactatatgctcgactgcaactaccgtgacatgccatagtatcagaagatgaacaccagcactctgtagccaatcctagttctcgcatgccttctgctctctgcggtcgtgctcaacgacctgctgggccgaccactaataactaccgctggcgcggcgagtgcaccaattgctcgctcgtgcggacctgcgacgacctcctcacgactggcgccgccacctgtgagaactgccttgccgtgtccaccgacatgggggccattaagtacacgggtcgcgacttcctccccgaaaactgagcgtgcaagattctctagatactcatccaattccaccatggccgcccgccacagcggcacatacgatggatccttccatgttcctccgaccgaccgccttgctacaatgacgcagccacaccaataagctagctcttgctgctgttttgtatagttgattgngtgtcccttcccagtccagatgaaatatgatanatcgtcagtggctaaaaaaaaaaaaaataaagcgacc

SEQ ID NO: 101972 - DNA, 701 bp, Zea mays
  unsure (1)..(701): unsure at all n locations
  Clone ID: MRT4577_24507C.1
ccggccgggactcgctccccccactccgttccatccctcgcctgccttcgcacgggtgcgccgcccgctcgacggccacgccacgccgcgccgcgccgctcagctgccccggcacccgcccttcctcgctgagctcgggatcgacgtctcccgcacctcctcgcgcccgttccgggctccgcatccggcccctccccgtccccaaccccattccgcagctggcgaccagcacaacatcccgaatcccccacctcgcattcggctcgccgtagctcctcctccgcgtcccgccgcccccggcacgcacaagtttactatgtctgggatggcatttgatgattcacctgcccaagtgaatgttgaaggagatgtttcagagaaaaaagtagaagttcaagaccagaatgaagtgggtgggatgcccttacgacaagaggaggaggcagcaattaagaaaaagtatgaaggaatattgcccaaaaagactcctgcttatatctaagcaacatcagtcgtcagcacaagttcagatgtcagtcgtcatcagcgcaacgtccaaggacttgcttggattcacatgtatctatattaatccgcaagccctattgtgctacagtatattggaattanacttaggggccaacaagattggatcccttcattttgggaaattggaaataaaaaaaaaaaaaaaagcgggc

SEQ ID NO: 101973 - DNA, 325 bp, Zea mays
  Clone ID: MRT4577_24508C.1
acagataaagaaggattatcatactcaactcgcgagaagcgagctgctgttggttcaagatcacaaatccttttcccaagttctacttacaatgttggctagttccccgcataataaaataaaaatgcagcctaaacgacccaagttgcctaaaattgaaccaattttttgtaatgcaagggtgctcactatgaataataaggggagagtttgcggaagctacaatgggggttgactgtaactgatcacaaaacttttacccccctcgggcggttaccttccatgggattctttttggggggggaaataaaacaaagggaagggg

SEQ ID NO: 101974 - DNA, 299 bp, Zea mays
  Clone ID: MRT4577_24509C.1
ttgtaattcggcacgaggggtgggattctgtggttcctaacttgactgagtttcccatggtactttagctcccatctttcctatcttaattgctggtctgcattacctaaatgttcagatttcttttcaggggtcccagatcaaggatcacccaggaatttttgacttgctgactaaggactatagaatataccttaatgtgctgactatgcctttggttcttgaggaacatggggggggctgagggatggctggggtactggactgcgatgggggataggctggggtgagcgggatgc

SEQ ID NO: 101975 - DNA, 451 bp, Zea mays
  Clone ID: MRT4577_2450C.1
gcacacatccaacatatatttcccctttatttgatcaccagaagacgtaaataaaacaacacccccttctgtccggttccctgacacggctaattaatacgcatatacgtaaagcatccatggatgccttgaaacatgcatcacttgaacagaagctcacgagaggcagcgtcgtcgtcgtcggccggcgcatgcatgtaagagttgtggcttcgcggaatggcctcaactcaagcaacaggagtaaatatgacgtagcagaggcgatcactaaagcttgggcgtcgtggcgagggagccatccggcacggctccgcgcggcgagcgggcggccatggccgtcggtggagctgccatgagctgcagaaccagcagtatggccaccaccgcaccggccacttccttcttgccacccttcatgatcgactatgctctctcctcgtgccgaatt

SEQ ID NO: 101976 - DNA, 1595 bp, Zea mays
  Clone ID: MRT4577_24510C.1
ccccgcgtccggactagttctagatcgcgagcggccgctcgcgatccggccggatatttatggtgtggatgatttgtatgatgtggatcgatttgaaaaaaaaatcggggggcttcgcacgaggatccacacgctaccctcggcaccgtagccgtctgccccgcgctccccgttccccttcctcgctccccaccagtccgtcccatccctcgcctgccttcgcacgggtgcgccgcccgctcgacagccacgccgcgccgcgccgcgccgctcagctgcccggcacccgcccttcctcgccgagctcgggatcgacgtctcccgcacctcctccgcgcccgttccgggctccgcatccggcctctcccccgtccccaaccccattccgcagcaggcgaccagcacaacatctcgaatcccccgcctcgcattcggctcgccgtcgctcctcctccgcgtcccgccaccctccgcacgcacaagtttactatgtctgggatggcatctgatgattcacctgcccaagtgaatgttgaaggagatgtttcagagaaaaaagtagaagttcaagaccagaatgaagtgggtgggatgccctcacgacaagaggaggaggcagcaattaagaaaaagtatggaggaatattgcccagaaagactccacttatatctaaggatcatgaacgtgcttactttgattctgctgattgggctctaggaaagcaaggtggtgttcccaacaagcctaaaggtcctcttgaggcactccgacccaagcttcagtttccgcaccaattccgctcccagcctacgcaacagaatgcccgcgcccgccgaacttcatatgcgtctgcggacagtgacgacactttgaatctgtcccccgaggatctggtcccgcaaggagaacccagccagcagggagaaccagtcgaggacaagaacaaggaataaacacatgcccagcatagctactgtactgtaccccttttcatacacaagatgccattttccgccgtcgcacaaaaaaaaaacttcttttgccttggtaataagcgtgttgattcggttccggcccaacggtcccggtgaggctgaggttgagacacgtgcagcttgaactgcatgtgagatgtggtatccgctgcactgggctgttgggggtccttgggatgcatgaacaaataaacaatgatgcttgcgatgtttacattgctgtacctggacctgtgttacctctatgcaaacacatgcaaatccgatggtccgagactcgaaactctcccgttgagctgaaggagttgctgtactaataataatgaagattttttttttgttctaaaaaaaaaaaaaaaagcatcgcaatgctttcttttatttgcaccctgtgcatgttattatcggtatatctcctgttatgttcatagggtaaaatctagaactacccacgcgtccgcccacgcgtccgcttcactcggtcctgtttcttaactgatgtaaattttagcttgtttttaactagaggaacgatgtaagtttaaccagacgaataaaacaactgtgtatgctctgcttccaatccagttattagctgc

SEQ ID NO: 101977 - DNA, 436 bp, Zea mays
  Clone ID: MRT4577_24511C.1
ggacattggaatacgttaatttatgcattacttaattagggggaattcaaacatccattattcgggaggcccggggtatttaatcggatatatatttatttaaaggtctggggcaaggaaaggaaatagggggtagcttatatattataaaccgatggggggcgtttgggccacaatgtcaacaaaaatgcggacacggttagggggaaaatccgggggcaccacggagccgacgggcaaaaccacaatgtcggggtccgggttggccttgaggaacacctttttggggtcctccacgctaaacccgaccacctaaggccaaaaagttttggggccgccgccgccggcggcgaacttcggggagctcatggggtcgcaaactgccggaccagttgacaatatgaacgatgggcaggtaaatcttgaccgctgccga

SEQ ID NO: 101978 - DNA, 279 bp, Zea mays
  Clone ID: MRT4577_24512C.1
caggaatactcaccagtcccttttcatgtggaggggcgtcttggcaagtttgggctagtctaacgcccccatcctcgtgtacacctgccacaccacctgacagccgtatcagacccaacttttatctccagggatgcgaacaacactttctgatgctgaatagaatgcgtacatacttgtcgcggatggttaactacaaggtaacaccacttcggttacctctactcagtctttggttctgatgctatgcattctcaatgcatttcactaccctcatat

SEQ ID NO: 101979 - DNA, 423 bp, Zea mays
  Clone ID: MRT4577_24513C.1
ccagggaacaaaaagggatcgggggaccctccatttgcaaacgttagttgggcaatggcagctgtaaccatgggacactgaaggggaaacaaacgcggccaaaacccaaatatacggttgggattgcgtcttacgggggggcctaaaaaaaaactcaaatttgacgggtctgggctgggcataatctggaccctgaaaaattaaactggggactgcatgcgttccttttgtttaacaggatgccgccaacctcccagttgtcgttgccctcgccccaagccttggaggtcgcgtcggcgtttttttttggaaacctgggttcgtccataatacccctgcaacggttggggggtccggcctcgccccccttgcgctttttttcgtttgtcttgctctcgtacctccgggggcgcttgatctcct

SEQ ID NO: 101980 - DNA, 242 bp, Zea mays
  Clone ID: MRT4577_24514C.1
atcgatctcacggaataagcttccgtgttacctccattacgaaacagcaaagatccagcgcgcagagagagaatcgccatggcactctgaacaagaaaagaaagagctagagagatctcaggcagccagtctctgacaacacaaggtcggggaccaccaagctcgatccttgcttccaagggcgggggcagtagctccactactactactgctggtgctagttctgcacgggagacgaggtc

SEQ ID NO: 101981 - DNA, 873 bp, Zea mays
  Clone ID: MRT4577_24515C.1
gccggccggtccggggcatatcctctcgttcatccttgcatcagtatttaagggacctgtacacgttccggcggcttgagattcgccgctcgatctcctgcgctggctgccaccgcgcgcgaaagaatctatttctcctctctccggccggcggcctccaaggtaatatattttaattatatcgtcatccattcaactccacacgagctaggaggacgcccggcctcgtccccgtccgtgtcgtccatggacggcaccaccgtgtgctccatgtgcggcgacgtcgggttccccgacaagctcttccgctgcgcccgctgccgccgccgcttccagcactcctactgcaccaactactacggcgccgcggccccggcgcaggcgggcgccggcgtgtgcgactggtgcctcagtgacgacgtcgtcagcgggaagaagcggcagtactcttcggcgtcgggatgcagcaagcggcatccgcaggtggaagaagcagactggagcacgcagcagccggcgttcccgcccagcagcgggtgcagcaagggcgccggcaaggtaaccggcagcgagcaggccgagggtggccggaggccccgcaggtacaagctcctcaaggacgtgctttgctagttagccaggtgctcgtacgtcgttgtactatgtacgaaacaatgttttctactgtaattagtagacaggtaaaactaggttactagtagctagctggtttaattagtttcatcttttttaattaccttcgtccttgtacgagcgagtgtagttttgcgtgttgtgaaaagagacgctttggctactatgcatgcatgtgcataataattaagctagctctgctgccctgcttgtcgagcg

SEQ ID NO: 101982 - DNA, 407 bp, Zea mays
  Clone ID: MRT4577_24516C.1
tttttttttttttttttttttttttttttttttgggtttttttattttttttaagcgaccggaaattttttttccccaaaaggggtgtggtgttaaaaatgtccggcccacaggaacaaacaaatggacctaaaaaaacacgcaatggggggaagaccccccccaaccggaaaggggggagtaccccagaaccggaacgggcccgcgggccaacgagagaaccaagggacaccgattccggagtatatcccccgccagccaagagcccgaaggcccgcgcctaaaaaacctacccggccggggatggggccccccctaggaaccatggaaacatgatttggccccccccccgcggggggccgggggccaaaaagaaagaggtttgcccgggcgaccggggtgcaggg

SEQ ID NO: 101983 - DNA, 1780 bp, Zea mays
  Clone ID: MRT4577_24517C.1
actcgagcgtggccggacgcgtggggtacgacgcaattgttccccggttcaaagaaagaaaaacagacagtagactcgctgagcagcagcagtatataagctcacgggtcacccaccgctgggggccgcacagccagctgctcagctccgtccggcggaactcggaagccctacgctacgcctaccctcgctgtactactagctgccttcctacccgcttcccctctcctcccgacgccgtctccctccctccctccgcctccgccgtcgccgccgggacacgcgaagcttccaggtcttgtctttgggtagaacatgtcgtgctttgcgtgctgtggtgatgaagatacccaagtaccagacaccagggctcaatacccaggacaccatccagcgagggccgatgcataccgcccttctgatcaacctcccaagggtcctcagcctgtgaaaatgcaaccaatcgcagtccctgctattcctgtggatgagattagggaggtgaccaagggttttggtgatgaagctttgattggtgagggatcctttggcagagtatacttgggtgttctaagaaatggtaggagtgccgcggtcaaaaagttggattctaacaagcagccagaccaagagttcttggcccaggtgtctatggtgtcaaggctgaagcatgaaaatgttgtcgagttgcttggttactgtgctgatgggacactccgcgtccttgcttatgagttcgctacaatgggttcccttcatgatatgcttcatggaaggaaaggggttaaaggggctcaacccggtccagtcttatcgtggtcgcaacgtgtgaagatagcggttggggcagcgaaaggcctcgagtatcttcatgagaaagcgcagccccatatcatacaccgagacatcaagtctagcaacgtccttcttttcgatgacgatgtagctaagatcgctgactttgatctgtcgaaccaagctcctgacatggcagctcggcttcactcaactagggttctcggaacattcggataccatgcgcctgagtatgcgatgactgggcaactcagctctaagagtgatgtatatagttttggggttgttcttcttgagctgttgactgggaggaaacctgtcgaccatacattgccaaggggacagcagagtcttgtgacctgggctacaccaagacttagcgaagacaaggttagacagtgtgttgactcaagacttggaggggactatcctcctaaagctgttgcgaagtttgcggctgtcgccgccttgtgtgttcaatacgaagcggacttccggccgaacatgagcattgttgtcaaggcgctacaacccctgctgaatgcgcatgcgcgggcgactaaccctggagaacatgctgggtcataagctttgcgtttgcttctctccctcctcttgttcttgtatgataggtaaggtatatgactcgtcgatgtcgttgttgcggacatgtggctggcagcgtgtaatgtctgtgattattcttcccctgagctgtaaacaagattcttgtatccccacagtatttgattctttctattggtgccgtttttacctaactcaaggcgcaactgcaaaagcaatcatccaaacaggccctacaagtcaagttgagcaaattgcgggtaaaaggaatctaatttttttaaattcctctgaacagaatgcctccaggctccggtgaataatcataatcatttgatttgagggtgttcaacaacaccatatatttctaaaaaactct

SEQ ID NO: 101984 - DNA, 1722 bp, Zea mays
  Clone ID: MRT4577_24518C.1
cccacgcgtccgcggacgcgtgggcgtggacgaaattgttcccatgttcccggaacgaggaacgtggcggtttctaagtgcatgacattgatatcggttacttaatggaattggttgcttgctttctaagtgatttcgtttcctttgttcgtttttctgaccggtgctatattgctgccgcctctaataaaaatgtgtttgatttcagcttcaaggtcttgtctttgggtagaacatgtcgtgctttgcgtgctgtggtgatgaagatacccaagtaccagacaccagggctcaatacccaggacaccatccagcgagggccgatgcataccgcccttctgatcaacctcccaagggtcctcagcctgtgaaaatgcaaccaatcgcagtccctgctattcctgtggatgagattagggaggtgaccaagggttttggtgatgaagctttgattggtgagggatcctttggcagagtatacttgggtgttctaagaaatggtaggagtgccgcggtcaaaaagttggattctaacaagcagccagaccaagagttcttggcccaggtctgtctttccctgtttatgaaatgcagtgcatctattttatcccgtggtttgaagtcaacatgaaattcgtctacaggtgtctatggtgtcaaggctgaagcatgaaaatgttgtcgagttgcttggttactgtgctgatgggacactccgcgtccttgcttatgagttcgctacaatgggttcccttcatgatatgcttcatggaaggaaaggggttaaaggggctcaacccggtccagtcttatcgtggtcgcaacgtgtgaagatagcggttggggcagcgaaaggcctcgagtatcttcatgagaaagcgcagccccatatcatacaccgagacatcaagtctagcaacgtccttcttttcgatgacgatgtagctaagatcgctgactttgatctgtcgaaccaagctcctgacatggcagctcggcttcactcaactagggttctcggaacattcggataccatgcgcctgagtatgcgatgactgggcaactcagctctaagagtgatgtatatagttttggggttgttcttcttgagctgttgactgggaggaaacctgtcgaccatacattgccaaggggacagcagagtcttgtgacctgggctacaccaagacttagcgaagacaaggttagacagtgtgttgactcaagacttggaggggactatcctcctaaagctgttgcgaagtttgcggctgtcgccgccttgtgtgttcaatacgaagcggacttccggccgaacatgagcattgttgtcaaggcgctacaacccctgctgaatgcgcatgcgcgggcgactaaccctggagaacatgctgggtcataagctttgcgtttgcttctctccctcttgttcttgtatgataggtaaggtatatgactcgtcgatgtcgttgttgcggacatgtggctggcagcgtgtaatgtctgtgattattcttcccctgagctgtaaacaagattcttgtatccccacagtatttgattctttctattggtgccgtttttacctatctcaaggcgcaactgctcaagcaatcatccaaacaggccctacaagtcaagttgagcaaattgcgggtaaaaggaatctaatttttttaaattcctctgaacagaatgcctccaggctccggtgaataatc

SEQ ID NO: 101985 - DNA, 443 bp, Zea mays
  Clone ID: MRT4577_24519C.1
acaaacaggcggaaggagaacatcgatcggtcgtggctgtttccacagccggaccgaatagcggcgcggccgggaaatggggagaaaaggcaagtggttcgacaccgtgcagaggatcctgatcacctctgaacctgatcccgtggagacgcagaacgatgatgccgccaaggactggctcgatcatcacgagaaggctgcgaagctgagagacaataagtcggccatcaggaggatatggcagttcggcaaatcaaactcgtccggtgcttccgcctccgcgacggcgccggaggacgcggaggttcttcagtttccgaagtcgccaaggtcggacaacgagtaccatgtcgtccaggacctcaccgaggaggtgccgttcatggagacgagaggcgaggaagaagaagaagaagacggcgagcgcatgaaccctggggatg

SEQ ID NO: 101986 - DNA, 721 bp, Zea mays
  Clone ID: MRT4577_2451C.1
tgtgcggcgctcgaggcggcggtccgggaactggatgaatgattaacactggtgggtccggtgtgatcttctaaactttgtagagacgacacttgctactctgagcttaatcagatagagagcatagtcgatcatgaagggtggcaagaaggaagtggccggtgcggtggtggccatactgctggttctgcagctcatggcagctccaccgacggccatggccgcccgctcgccgcgcggagccgtgccggatggctccctcgccacgacgcccaaggtgacgatgctgtcggccacgctgtgctacacgggggagacatgcaaatacattggctgcctcactcctgcttgctcctgcaactatagtgatcgtctatgctacatcatatttactcctgttgcttgaggccattccgcgaagccacaactctcacatgcatgcgccggccgacgacgacgcgcgctgcctctcgtgagcttctgttcaagtgatgcatgtttcaaggcatccatccatggatgctttatgtttatgcgtattaattagccgtgtgtcagggaaccgggcagaagggggtgctgttttatttacgtcttctggtgatcaaataaaggggaaatacatgttggatgtgtgcaaaaaaaaaaaaaaaaggcgagcgcgtcccgcggatccgagcctctacgcacgcgtgcgtgtgcagtcaaagctattgtagag

SEQ ID NO: 101987 - DNA, 749 bp, Zea mays
  Clone ID: MRT4577_24520C.1
ccgccgccgccgccccttccctccggcgccgccgccgcgccgcccctccagtgagcccccctctcctcccttcccccacccccgccccgccggcgccgctccccggcgcgcccgcccctcgccgcggcacggccgccccgccccgaccccgcccggccccggcgcgtcgccctccggcgagcccgcgccccggccgaccccgcctcgaccccgccccgccccggcgcgccgccctccggcgagcccgcgcctcggccgccccgaccccgcccggcccccgcgcgccgccctccggcgagcccgcgccccggccaccccggctcggccgcccccggcccgcccccgtgccgcctccctccgacgagcccacgccccggccgccccggctcggccgcccccggcccgccccgcgccgcctcacgcgccgccccggcgagcccgagtccgccccctccggcgagcccgcccccgtgccgcctcgctccggcgagcccgccccgccccttccccgtgccccggctcggccgccccgtgccccggctcggccacccccgtcgcgccccggctcggccgcccgcccccgcgcccggccgtgtcctcgcccgaccgcgtcctcgctcgcccgtgctcgcttgccccggcatgcttgcccgctcgccccgccgtgccttgctcgcgtcgtgacggtcccggcatggcctcgagctcggcccagcgtgcccatggcgcgcggccttgagctcggctag

SEQ ID NO: 101988 - DNA, 329 bp, Zea mays
  Clone ID: MRT4577_24521C.1
tttacagccgcccgaactccacctccagttgggtacttcttgactcttgaccggatctaatcactccgctccaggtccacctacaaaaacacctccacgccatgtcgaagcccgcgaatcagcaatcgtcgcacatgcatgtctacttatccatcgccaaggagaagccttccatcagattctccatcaacatgcttaagctcatgacggaagcacagatccagcatgttcttccccagtaccactacactcgaaacctgagatactgctctgcacgactcagaaggctatacaagtttatcaagtttttgcatggccgaggtaaatac

SEQ ID NO: 101989 - DNA, 1813 bp, Zea mays
  Clone ID: MRT4577_24522C.1
ccgagtctgcgctggggtcgcccgtgcacatctcccgctgcgccccaaaggcctcggagccggcggaccgggacgccggctctaggtgcacgacgatggtccccgtcctggcccgctaacgcccttcgttcggccgacgccccaagcgccacctcccgccgcggagacgctcccgatggagctggatccgtcggaggccttagttgccgctgcggtggaggcgaagggcgaggaggctgccaacgggaagagggagttcgtgatggggaggaacgtacacaccacctgctgaacagtgaaggggaccgaggcggactctgcctctacctccccctgggccgcaaggaagacggaggcttacagaggctaccagaaaaaggtcgtaaaatgctcgaagaacccacacggtccccaaaaatagccagaaattgagcaggagccggagaagcgcataaagaccttattagtttgatagcctgtgaaaacctagaggatgaacaatttgtgcgaacgtgcctgctagcttgaggatggaatacggcttaggtttgcgcgatgcccagagtcagaatagacagagtagtctgtatcctttattagttatttgagagacgggcaacttggtaggagtacgggagagaccgggcactccccataggcagagatgtaggcgtctggagctgtctctttggcaatcaccaatgccgaacctttgcaagtgagagagtgtttgagcgtgggtagagttagttgtgttgtactggactgtgttcattcgtgaggagagttaaagcagatccgatacaaacctgccatcatttatgtttacattggaacaactgtgaagggggcagttgatgatctagacttggttatcaaaacccttgaggaaaacggctttaaagatcggttttatattcattgtgatggtgccctttttggattgatgataccatttgttaagaaggcacctcaagtgacatttaaaaagcctattgggagtgtcagcgtctctgggcacaagtttgtcggatgccccatgccatgtggtgtccagataacaaggttggagcatataaatgccctttctagcaatgtggagtatctggcgtcaagggatgcaacaatcatgggaagcaggaatggccatgcccctatcttcctctggtacaccctcaacaggaagggctacagaggctttcagaaagaagtccaaaagtgcttgagaaacgcacactacctaaaagatcgcctcaaggaagcaggaatcggagcgatgcttaacgagctcagtagcacagtcgtgtttgaaaggccaaaggatgaagaatttgtccgaaggtggcagctggcttgtgaagggaatatagctcacgttgtggtgatgcccagtgtcaacattgacaagctagactatttcctgaatgagttagtggacaaacgggcgacttggtaccaggacgggataagccagccaccctgcattgccagagacgtaggtgttgagaactgtctctgtggccttcacaagtagcgagccttttgctttgcaagtgggttcactcttgagtcgagttaaaaagtgttatgttgtactgtgttcattcttgagttgagttaaaaagtgttatgttgtactgtgttcatgcgttctgcttctgtgtttctccacagtgtagcttatttgttgccatgggaataaaattccttctattaaattgattgatggaagttgcatcacggttggctttatccttcaaaaaaaaaaaaaaaaaaaaaaaaactcgagggggggcccggtaccctattcgcc

SEQ ID NO: 101990 - DNA, 397 bp, Zea mays
  Clone ID: MRT4577_24523C.1
gggaaagggctttctttgggcccctggggcggccccgggatattctgccccgttcccctaggggggcccccttttccttttggggggggtttttgaacttggggttattttgggcattggtttttcccttgggaaattgtttttcccttaaaatttcacccaaaattctgaacccctggggttaatttttaagcccggggggcccaatgagggggctaacctccctttattgttttgagctcactgacccgttttcccaggggaaaccttttttgcccccttcctttatgaatgggcccacccccctgggggggccggtttggtttttggtcccccggggggtttttttttcacccattggaccggcaacacttgattttccttaaaccccttgccc

SEQ ID NO: 101991 - DNA, 319 bp, Zea mays
  unsure (1)..(319): unsure at all n locations
  Clone ID: MRT4577_24524C.1
ccccgtcaccccactcactccgtaacaacctgcaccaactcctgtgaaagataaagggatcggtatatgggnnnnaactgnncctcaaattncaatgaaaccccatatagttctctaaccacattactttgttccagatgccctattttctcatccttttcaacttcatttgttccatttttacaatttcactacttctcttgttcaactnctaattttcctccactttctttcttttttttttcttcttcatcatctttttttcctctttattatccttgttatcttttccatattatttctttcttttttatttttt

SEQ ID NO: 101992 - DNA, 355 bp, Zea mays
  unsure (1)..(355): unsure at all n locations
  Clone ID: MRT4577_24525C.1
ggttcaaccgtgaagtttttttaaaactgtcttcattcatattaactagagctaaattttggtttttgtgttaattaaatttttcttatgtaacatcaaatttagattgttttcaatattttttattattatttgcctaatattcaaaaagtttatgatttcattcatgtgttgagtgtagcaagccttactggtagcgccccatgtgcccatccacaccagaagaaataatanctatgaaaaaagaaatcattttcaggacccnnnnccaataaaattgtacacatttgtaatggaaaaaaatgatttatttaaatttttatcaaaactaatggatttttcataacaaacaaag

SEQ ID NO: 101993 - DNA, 463 bp, Zea mays
  Clone ID: MRT4577_24526C.1
ggcctctacaacgagaccgccagcctggacgcgtcgctggcgtcgcgctgaagccgcgggcccgggcgcggccggcagcggcgacgacaacacgtcgccgctggacccggccacgtcctacgtcttcgacaacttctactacaggaacctgctgcggaacaagggcctgctccactcggaccagcagctcttcagcggcggcggctccgcggacgcgcagaccaccgcctacgcgtccgacatggctggcttcttcgacgacttccgcgacgccatggtgaagatgggcgccatcggcgtggtcactgggtccggggggcatgttagagtgaactgccggaagacgaactaactgatcgcgatcggtgtcaggcttcgacgtttcgtactgtcagctgtcacgatggagtgatcagtacgtgtctggtctgcgcagagttactgctccttctatgatggcgta

SEQ ID NO: 101994 - DNA, 355 bp, Zea mays
  Clone ID: MRT4577_24527C.1
tgcaaataatgcggctgcctactactgcccgcagcagcagcagcagcaggtgacagtcatgtaccagcagtacccaacaaggatggagatcgggcaggacaagacgacgacgccaccggccgccacgttccagcaggccgcagcaccgcgcggtgccgcgagcaccaccaccccaccgcaggtgctgcactcgcagtccccgcccgccattaataacggcgcccgcgggccagcggatcagcgcgtcggccgccccagccgcgaccgcgacctcgagacgctgcagctgttcccgctccagcccaccttcgctcagctgcggcgcgacaaggggaacgccgccgctggcagcagc

SEQ ID NO: 101995 - DNA, 485 bp, Zea mays
  Clone ID: MRT4577_24528C.1
cccattctttcgtcaagacccgtgggcttggagctggcaaggctggcgacctcacctactgggagagcgctgcccgcatgattgcggatgtctccaagtctgacaagattgttgttgagaagtacactgctcctgtcaagaccgctgtggctatcgagaagatcttgacccacatcatcaagggcatcaactaccagatcctttccaacccagagttccttgcgaggggcactgccattgaggacctgttcaagcctgacagagtgcttatcgtgggccggtagaccccttagggcaggaaggcctgccaggctctgaaggatttgtacgctcactgacctccttggtacaggatgctaagcaccaacctgtggtctgctgagctctgcaagctgtgtgccaacgcgttcctgtcacagaggatctgctcttgatactccatctgctggctctgcgaggccaccggctcgtatgtgactgacgtg

SEQ ID NO: 101996 - DNA, 452 bp, Zea mays
  Clone ID: MRT4577_24529C.1
gacctttgggctgatttagtgcttgaatgttcttgtcgtaactagtttttgtggccagtccgtttcgttttcgatttcgagcgtcagcctctgttgccatgcaaggtcctccggttccgtgcttcttgctccctgccgtcgacatactgaggcaccaaagaagtcgttcgaccttgggcagtagaggctgttgttgttcgtagtaacggttgatcctcttcggtctatggcgtccggcccttcaccttctatacctaatctaggtacggtgacccactggcttaatggcgatgttggtcttgctgtccctgctgcggcactccactctgattcggcggtttcgcctgttcgtccgtgtcatcatgagtagccggactagtagtatctttaaaagtgtgtgagggctaaggtcggggcccggagttctatgatttcctccatcactacgccta

SEQ ID NO: 101997 - DNA, 606 bp, Zea mays
  Clone ID: MRT4577_2452C.1
cgcgaagtgagatgtatggtctatgtgtgacactggcaatctttttgaaatatgactttactgataatgtctcctccataacacatgcatgctgacatcataccactgtcgtacaatattttccttacctcttttagatttgactcctagactgttgcaggaaaggtgactactaccgttacttggctgaatttagcactggaactgaaaagaaagctgcctctgatcagtcacttatggcctatcaggtgctaaatcttccaaatgttgtacgtaggctcaaatgagccttttggtaaagcctatcccttcctgttaaaatgacaaacatttgctgcagcatgccatggttgtcgcctccagtgagctctcacctgctcaccaaatccggcttggccttgccctcaatttgtcggtcttcttttatgagataatgaactctcatgagaggtcactcatcttcaatgccttgtttctccctttttattgatgtttcaaattcatagatattcctatacaatcatatttcattttttgaaacgtgggctttcttgccaagtggtgactattttcaaataaacaattcacctgctgtagatgctttct

SEQ ID NO: 101998 - DNA, 428 bp, Zea mays
  Clone ID: MRT4577_24530C.1
ctgtgcggcgctcgaggcggccggttcgcaaaacaaaaaaaaaaatcaaaacataatcatgccttctgctcaattcaatactgctgctgaagaagttaaaaatctttctaaaaagcccactgatgaccaactcttggaattatatggtttgttcaagcaagccacttttggtgacaacgacacctccaagcctacttttgatatcaaaggacgttacaagtgggatgcttggaacaagcttaagggcatgtcacaagaagaagctgaacaaaaatacattgaattggttgaaaatcttaaggccagccaataaatatccccaaaaggacttgatcctttacgtgtgaaaataataaaaaaaaaaaaaaactaaaaaaaaaaaaaaaaaaaaaaaaaaaaaggaaaaaaaaaaaaaaaaaaggccccta

SEQ ID NO: 101999 - DNA, 726 bp, Zea mays
  Clone ID: MRT4577_24531C.1
tgcgtacttgattggatctgtcccagaactacttccgtaccatgaagccgatatagcagagttggcactgaaggtggtgggagaacccacggaacaagaagacgacgctcggaatatcttccataaaggcatcgagctcggtaagcagctggagaggatggcggatggggatcgctggaaggcgctgcaagatttctgggccaagacaaccatccatgccgctaagtcgcactacaccaccaagcaacacatgcaacaccttgaaagtggcggggagttcctcacgcacatctgggctctgcttgctcatgcaggcattctctaccttaatcctgtgaacaatgaagatcaggaggaccaggctaatctaggctctggaccctcagctgctgcatgatagattcaagtcaatggcggagctatttttgtcggttttcccccacaagtttatgttccagatgctgttgttccatttcgttttcagtctttctagtgtctgtcaaaataagctttgctatctgcatgcatgtatctgcttgctcaggcaggcattctctaccttaatcctgtgaacaatgaggatcaggaggaacaggctaattctggaccttgttagataattcaggtgctgttcttcagttttttcagtcttctgttctttctgtcgaataagctcagagaactgagcgcgtttgtattggcctcatggcctgaactgttctcagt

SEQ ID NO: 102000 - DNA, 605 bp, Zea mays
  Clone ID: MRT4577_24532C.1
atccagctgctaggtgggggacgccctgtggggcctcctcttcttcctgtgttcgtctctcccctccctgcagcagccgcccgcccgccccgcgcgaggaaggtaaagtcttgccgtccagtccctgttgccgtcgacggcgcgacggaggcgacgggtcaaggcgccccgtcgacccccatcccccgtgcctgcgactgcgcccccttcctcctctgctccggcctccggcgttccccttcccccctcggcgccaaggaagagagggttcacagtcgtcggccgctcgctcctcgcctctacccatcgcgcgtggagccggtgaggggctcgtgggcgggcgcgacgttggaagaggacttggatctgcctccatccagcaacggaggacgggagacatcctcttgctctcccagttcggctgatccccactgttgccggcgaccggcttcttcagctgtccgtgagttgagtgcccgccacctgttcgacggaatactcgagatggctgcggcgagtgacagagattcttttggagacctccccgacgagctcttatggcgtgcgctgtccttcctgccggagtatgatgccctgtacacctg

SEQ ID NO: 102001 - DNA, 270 bp, Zea mays
  Clone ID: MRT4577_24533C.1
cgtttcctggtggggaaggcaaggagaaggataaggctgcttgcgtactgctccgataacccgatggaaaacaaagacaccggggtataggcactcgctctatactatccagcttttaacgcagttataatagcgagggcataccatgagtggacggcatcaaattcttctgctagcggaccgtctagaggaaacgacattacgaacgcctgcctactaccttatagatgctttataaggggacctaaactcaaccaactgcgcgaggcc

SEQ ID NO: 102002 - DNA, 367 bp, Zea mays
  Clone ID: MRT4577_24534C.1
aataataaaaactagcgaatccagggtactattactagtcgatacaaaattcatgagaacgacgatgattccggttcagactatccatcaaacattaagcatgcgatgaacaatgtccttcccgtcatcgcccaacagctagaattctacttctatcatcgaccctataacatcacacaacttaacgacataataacgggttgagccataattaccaagcacacacctcgtattactggtatttctaacttaatcgtatacgtatacaaagcgtcttattttacgatcataaaaccgtgagtaaaaatagcgaatcggctcaccacatcacaactcgatttggtagttgcctgagccacgacaggct

SEQ ID NO: 102003 - DNA, 382 bp, Zea mays
  Clone ID: MRT4577_24535C.1
cccacgcgtccgcccatcgcgtccgaaaaaaaaaaaaaaaaaaaaaaaaaaaaaaaaaaaaaaaaaaaaaaaaaaaaaaaaaaaaaaaaaaaaaaaaaaaaaaaaaaaaaaaaaaaaaaaaaaagggggggccggttttgggaggttccaagttttacgtccgccgttcttgcgaaggtattatctttttttttggggtcccctaatttaatttcattggccgactttttacaccgtcgtgattggaaaaaccttggggtaccccactttattcgctttgcagaaaatccccttttggccagttggtttattaccgaaagggcccgccccaatcgcttttcccaacggttgttcaccttgattgggaattgggaccccccct

SEQ ID NO: 102004 - DNA, 576 bp, Zea mays
  unsure (1)..(576): unsure at all n locations
  Clone ID: MRT4577_24536C.1
tcgagggccggccggggccggggatgtcgccgtacgcatataaacctcaaattaagtgcaccaccctctcctcctcctcaacgagcgagtaccaccacgcaacagcgagacagcgattgaggccgatcttgatgaaggggcacgagcgaccgctcacgtgtcctccgctacaaccgcgacgggcgacctcctcttctcctgcgacaaggaccacacccccacggtctggtaccgcgacaacgatgaccggctagttacctaccgcgcgcaccacggagctgtctggacctgcgacgtctcccacgactcggctggtctcatcaacgtatccgccgaccataccgacaacgtctgggatgtcagcacggagaacgagatcatcagcttccgcttcnacgaccccgtcatgtccgtccagaacgacatcgaggacgcgaatctcgtcgtcaccaccgaacaactttatggaccacgtgcccaccgatcaggaccagggtatcgtcgacgacatcgacgaccagaaggaggacactgcactcatcatcaacggcatcaagggcaagaacaacagggacg

SEQ ID NO: 102005 - DNA, 998 bp, Zea mays
  Clone ID: MRT4577_24537C.1
ttgacatgatactggtcttgtcttggagcagtagttgacatgatactgacccttttggttgtagcataagctgctatttatcttgatctgttttatttgattaagatcagcgagcaagctgcggccttcttttgcttcgatccatctccacttgtttttttgctggctggagtttcttttaattgtttgcttagctctgcagcttcgatttgttccgaaactttgttgatctatctgtgctgttgttgctcagatcagctcgcaaggaactaacacactttattttttagatcttagaattctgactccatatcttgatctcgatggcttgcacgccgtactacaacacctgcacagcccgccacgccacgaagaacgccccgtcatttccgcgaccgccggcgccaccccaggctccgcgcgccaaggagccacagccacacaagatggccgtcgctcctgaaccatccaagaagagggtggcgccggggactggactggaggagtggacggagacggcggactcgctctactccgtgtccccaccgccgagcagcgtaccgatgcctacgtccctgttgctcacagtcacgccgccgaccgcctgcgccgtggatgtcggcgccaccgacgagctccgacggatcctcaagctttagctgcgacgatgcggctatggcatcgcaacaaagatgtgatctgcgtgactgtccgttctctttagcgagcaagcgagcttcatggtctcgtcccaaagttgtactattctagtaatcgaatgttccaatgcgttgtgttttccattccaaccaaaccacgcattcgagtatgagatgttgcttttttttctttttttttgtaatcgaatgtgtccgtattgtgttccgaaccactaattaattccagtatgagatgtctccgtttgaattaaaaaaaaaaaaaaaaaaaaaaaaaaaaaaaaaaaaaaaaaaaaaaaaaaaaaaaaaaaaaaaaataaa

SEQ ID NO: 102006 - DNA, 249 bp, Zea mays
  unsure (1)..(249): unsure at all n locations
  Clone ID: MRT4577_24538C.1
ccgcgcatgagcgtacgaactcgaatcgctcacgactcgaatcaatcgccgcagggctcctatcgtgcgctgcctcgcgcgatcctcacgcgagcacaataggagtccgcggctgacaacgccgcgatgttggcacgctgcatcaaggacgtgccggcgaacgagaacgacctccagctccaggagctcgcgcgcttcgccgtcaatgagcacaaccantaggccaatgctcttctggggatcgagaag

SEQ ID NO: 102007 - DNA, 449 bp, Zea mays
  Clone ID: MRT4577_24539C.1
gtcgtcgcggcccctcccctccacccccgagtccccgtgcgctgcgcccccaattcccacgcgcccagacacgccgagaggggagaggaagcgacagccagcagccgaggcggccagcgcaggcatggccactcccacttccagtggcgacggctcgcccccgggctcctctgacctcgtgcccccctcctaccccgaggcaaccctacctactttccctctgctctgcgctgctcctttccgccagatctgtgccgatctgccgaattgactgacccgtgcgcctgccctggctgctgcagatgatcgtcgccgccctcgccgcgctcgccgaggagaacggctccagccaggccgccatcgcgcgccgcatcgaggcggaggcccgcggcgacctgccggcctcgcacccggcgctcgtcgcagcccacctctcgcgcatgtccgcc

SEQ ID NO: 102008 - DNA, 573 bp, Zea mays
  Clone ID: MRT4577_2453C.1
gggccgggataaccaaggaaccgatcagagagagagagagagcgcatagacgatcatgaagggtgagaagaaggaataggccgcagcggaggtggccatactgctgggtctgcaactcatggcagctccaccgaccgacatggccgaccgctcgccgcacggagacgtgccggatggctccctcgccacgacgcccaaggagacgatgctgccggccacgctgtgctacacgggggagacatgcaaatacattggctgcctcactcctgattgctcctgcaactatagggatcgtctatgctacatcatatttactcctgttgcttgacgccattccgcgaagccacaactcttacatgcatgcgccggtcgacgacgacgctgcctctcgtgagcttctgttcaagggatgcatgtttcaaggcatccatggatgctttatgtatatgacatgcgtattattaattacccgagtcagggaaccgggcagaagggggtgtagatttatttacgtcgtctggtgatcaaataaaagggaaatatatgttggatgtgtgccaaaaaaaacataaa

SEQ ID NO: 102009 - DNA, 654 bp, Zea mays
  Clone ID: MRT4577_24540C.1
ttcctcagagccgtctcgtcgcggcccctcccccctctcccgtgcgctgcgcccccaattcccgctccccacgcacccagacacgccgagcgggagaggaagcgacagccagcagccgaggcggccagcgccagcaggcatgaccactcccactcccagtggcgacggctcgcccccgggctcctccgacctcgtgcccccttcctaccccgagatgatcgtcgccgcgatcaccgccctcgccgaggagaacggctccagccaggccgccatcgcgcgccgcatcgaggcgcaggcccgcggcgacctgccggcctcgcacccggcgctcgtcgccgcccacctctcgcgcatgtccgccgcaggggagctcgtcgccgtcgcgggggggaagtacgcgctgcccccgccgccggcgcagccggcgccggagtcaccggctgacgacggcgaagacgacgacgacgacgacgagtgcgccgacgaggtggacgaggaagaggaggcgccggagcctctgctcgtgcctgtgcctgtgccgcagccgcccgccaagcgcgggcgtgggaggcccccgaagccgcgtcccgctggcttccccatcggcgtccccggagccgctgcgtcccccgccgccgcgccgcgacggcgcgg

SEQ ID NO: 102010 - DNA, 453 bp, Zea mays
  Clone ID: MRT4577_24541C.1
cgaccccgcgtccgcggacgcgtgggaaaaaaaataaaaataaaaaaaaaaaaaaaaaattaaaaaatttaaaaaaaaaaaacaaaaaagagggggtggggggggccttttttgtggcccctaccttgcttgcgcgtgccttgcttgttgttcgcttttttcttggggggcttattttcagttgtctgcccgggacttttgcacggccctcctgggaaagccctgtggtttccaccccttttcccctgtgctgggcgtccccctttagccgcctgaggttgtcccatccggcctcgccacgcgcgtctttccctaaagtggcccagccttattgtcatttgggtcgcgctgtgtctcggggccttttccgcggcggttgtggttttttctctcagtgggaccggtgcatttgccagtgccgttgcatccgttcctttcgttttttcccttctt

SEQ ID NO: 102011 - DNA, 556 bp, Zea mays
  Clone ID: MRT4577_24542C.1
cggccgcgtgggcgacagccagcagccgaggcggccagcgcaggcatggccactcccacttccagtggcgacggctcgcccccgggctcctctgacctcgtgcccccctcctaccccgagatgatcgtcgccgccctcgccgcgctcgccgaggagaacggctccagccaggccgccatcgcgcgccgcatcgaggcggaggcccgcggcgacctgccggcctcgcacccggcgctcgtcgcagcccacctctcgcgcatgtccgccgccggggagctcgtcgccgttgcggggggaaagtacgcgctgccgccgccggtcccaccgccgccggagtcaccggctgacgacgaagaagacgactacgccgacgacgaagaggaggaggaggaggctccggagccggagcctctgccgcagccgcccgctaagcgcgggcgcgggaggcccccgaagccgcggcccacgggcttccccgccggcgtgcccggagctgctggcccgggccccatcggcgtccccggagccgccgccgccgccgccgcgccgcgccggc

SEQ ID NO: 102012 - DNA, 770 bp, Zea mays
  unsure (1)..(770): unsure at all n locations
  Clone ID: MRT4577_24543C.1
cagnaccgcgtcgtcgcggcccctcccccctctcccgtgcgctgcgcccccaattcccgctccccacgcacccagacacgccgagcgggagaggaagcgacagccagcagccgaggcggccagcgccagcgcaggcatgaccactcccactcccagtggcgacggctcgcccccgggctcctccgacctcgtgcccccttcctaccccgaggcaagcctccctccctccgttccaaccctacctctttcgactcctctccgctactcctttccgccagatctgcgccgatctgcggaatcgactgacccgtgcgcctgccctggctgctgcagatgatcgtcgccgcgatcgcagccctcgccgaggagaacggctccagccaggccgccatcgcgcgccgcatcgaggcgcaggcccgcggcgacctgccggcctcgcacccggcgctcgtcgccgcccacctctcgcgcatgtccgccgcaggggagctcgtcgccgtcgcgggggggaagtacgcgctgcccccgccgccggcgcagccggcgccggagtcaccggctgacgacggcgaagacgacgacgacgacgacgactgcgccgacgaggtggacgaggaagaggaggcgccggagcctctgctcgtgcccgtgcctgtgccgcagccgcccgccaagcgcgggcgtgggaggcccccgaagccgcggcccgctggcttcncccatcggcgtccccggagccgctgcgtcccccgccgccgcgccgcgacggc

SEQ ID NO: 102013 - DNA, 2445 bp, Zea mays
  Clone ID: MRT4577_24544C.1
ttcttatctctcgcgtcgcgcctttccccttcgtatgcaaccgggtgtggcccagcgggcttcgacgcccgacgggtgtggcggtggcacctccctccccggcgtgataccctgagccggcacgaggccacgcgggcgcgcagaggcggggggcacgcgggggcaatgcgggaccgtggtgaggccggtcgggcacctaggctatagccttctagagcagtagagattgacaccacgggcacgcacgtcagcgcctccaccttcctccccagccgcaagcagagcaagaaccggagctggggatcgattccgcgccgcctgatctgcgatcgggactcgatcgtgcataatccgaggttcttcctctctgtcgtctccgatccagacgggtgtgcctggtctgcatcttcatcctctgcaagaaatcacacatctcgtggcgcaccttgcatcagccgcggccggcacctctactctcgcccgccccctatgtcgtaagcgcgcaatcagaactcccgatcacccgcacgctggtgcgccagtgtcgtcttcgccaccatgaactccatcgagcccttcaacaggctggtgaagctggcggcccgcgccttctacgatgacgtctcaatgaagggcgacaaccagcccaagacctcccgcggggacaaccgcggcatggccgtcgtcgtcctggacgcgctcaccagacgaccgtgggtccgagaggaagatttggctaaagcattgaagctccactcgaaacagctgcgtcgcattctccgtttctttgaagaggagaaactagtcacaagggatcatcggaaggagtcagcaaaaaatgcaaaagcacataatgctgcagctgctaatgacggtcaaacaattgctaaggagggagaagagaaagtaaagatgcacacacattcatactgttgcttggattatgctcagatatgtgatgttgtcaggtatcggattcaccgcatgaaaaaaaaattgaaggatgaattggacagcagaaatacaattcaacactatatatgtcctagctgtaataaaagatactcagcctttgatgcactacaactggtaagctacacggatgagtacttccattgtgaaacttgcaatggtgaactggttgctgaggatgacaagcttgcttctgaggaaatgggagatggcgatgacaatgttagaaagcgcaggcgtgagaaattaaaggacatgcagcaaagaattgaagagcaattgaagccattggttgcacaacttgatagagtgaagaatctgcctgcgccagagtttgggagtcttcaaacatgggaaagagcaaatattggtgcttttgcaattggtgaccctgctgcagctgattcttctaggaattcacaagggcagtatggtacaccaatgccataccttggacagacaaaggttgaagttgatatattgagtgatggtgaaaaagaaggtgctgaatcaggtaaagatggttctgaactcaaagtcatacctccatggatgatcaaagatggcatgaatcttacaaaggaacaaagaggagagaaaattgagtcacaaaaacttgaaaaatctgaagccaaagatgataagaaacatgacttgaaagatgatcaaagtgtacaggaagaatacataaaggcctattatgaggccttgaggaaaaagcaggaagaggaagaagcaaaaaacagaatgcagcaggaaggcaagatttctgtccctgattctcaaactgaacgccaagtgggcaagaaatacaagcgggacgacgatgatgatgaagacattgaatgggaagagcatcaacctacagctgcagggaatgcaaccgaaacatacaaattggcagatttgaatgcggaggcccaagaatctggcgatgatgaagatgataatgtgtgggaagagggctaatgctaaaaagataacagactattcctgtgcggctgcgcccttaggattttggtatcccaccagaggtcgagagtatttcactaatgagcttagttatgttgaacgcatgatcccgagaaacttgtcaagtgaaaagccagcccctatgcatttttagttgaagatgtacaaattatacttaaatactttatgagccggtcagcagtttcccctgttacttcgaagagctgttgtagtcttgtagactgttaatgtgtgggcaacttgcatgcctttgtttcgctgaaaggaattacacgtacatgcacgtttatgtcctgaaagtgaaaatgcaatcgttgtagttgccattcaaaaaaaaaagaaaatgcaatctttagatcaaaaaaaaaaaaaaaaaaaaaaacaatggacacatcaagtttttcctaaaacccaaaccggtgccttccggcccaccccattacacgggtggggctcccatattttctcctaaaaacaggg

SEQ ID NO: 102014 - DNA, 1884 bp, Zea mays
  Clone ID: MRT4577_24545C.1
ccggccggggccctttccccttcgatgcaactggtgtggcggcggcggctgcgggcggcgtgatacggcaccccctcctcccgcccccttatgcaagcgggcaatcagaactccgatcacccgcacgccggcacgccagtgtcgtcttcgcaaccatgaactccatcgagcctttcaaccggctggtgaggctggcggcccgcgccttctacgacgacgtctccatgaagggcgacaaccagcccaagacttcccgcggggacaaccgcggcatggccgtcgtcgtcctggacgcgctcaccagacgaccgtgggttcgggaggaagatttggctaaagcattgaagctccactcgaaacagctgcgtcgcattctccgtttctttgaagaggagaaactagtcacgagggatcatcgaaaggagtcagcaaaaaacgcaaaagcacataatgctgcagctgctaatgatggtcaaccaattgctaaggagggagaagagaaagtaaagctgcacacacattcatactgttgcttggattatgctcagatctgtgatgttgtaaggtaccggattcaccgcatgaagaaaaaattgaaggatgaattggacagcagaaatacaattcaacactatatatgtcctagctgcaataaaagatactcagccttcgatgcactacaactggtaagctacacggatgagtacttccattgtgaaacttgcaatggtgaactggttgcagagagtgacaagcttgcttctgaggaaatgggagatggcgatgacaatgttagaaagcgcaggcgtgagaaattaaaggacatgcagcaaagaatagaagagcaattgaagccattggttgcacaacttgatagagtgaagaatattcctgcaccagagtttgggagtctacaaacatgggaaagagcaaatattggtgcttttgcaattggtgaccctgctgcagctgattcttctaggaattcacaagggcagtatggtacaccaatgccatacattggagagacaaaggttgaagttgatctgttgagtgatggtgtgaaagaaggtgctgaatcaggtaaaactgattctgaactgaaagttttacctccatggatgatcaaggatggcatgaatcttactaaggaacaaagaggagagataattgcgccacaaaaacttgagaaatctgatgccaaagatgacaagaagcatgacttgaaagatgatcatagtgttcaggaagaatacataaaggcttattatgaggccttgaggaaaaagcaggaagaggaagaagcaaaaaggagaatgcagcaggaaggcaaggtctttctcccagattttcaaactgaacgccaagtgggcaagaaatacaagcgggacggtgatgatgaaggtattgaatgggaagaacatcaacctacaggttatgcaaccgaaacatacaaattggcagatttgaacgcggaggctcaagaatctggagatgatgaagatgataatgtgtgggaagagggttaatgctgaaaagataactggcgacccctgctccctctcgaattttgaactggtatcccgtcacacgggtcaaaattatttcactgatgagcctgattatgttgaacgcatgatcacaagaaatttttagttgaagatgtacaaaatatacttatatttgagtagcgggttaacatttttctctgttacttaaatatttgagtagcgggttaatatttgatgtgtgggggcaacttacacgcctctgtttatctgaaaggaatcagagtgaaaaatgacagatccaaacttctatacgtacatgcacgtttatgtcctgaaagtgaaattgcaatctttcgatacccacgtttgacat

SEQ ID NO: 102015 - DNA, 1995 bp, Zea mays
  unsure (1)..(1995): unsure at all n locations
  Clone ID: MRT4577_24546C.1
ggaccctcgagccgtgccggctagcctctatctatttccactccgactttcacgtgcagctgtcgggagcaggcaatggcgccggatctaagcgaactcgccgccgccgctccagcccgtggcgcctacctcgccggcgtcggtgtctctgnctctctgtcgtctccgatccagacgggtgtgcctggtctgcatattcatcctctgcaagaaatcacacatcatcgcggcgcacttacttttgtgcttgattgaggaagtcagccaaacagtttggaagaaaacaagaaaacatatatagctgcactgatgtaatattgtaaagctgacaggaacatccacctgtgacaagggtacattaccaccatgaacgtcaccaacatggctataacctttagagatcacacatttttttgatactgtaaatagaaaatatttcaacggtataaggacctgtttggataccaagggctgattgttagctagctaaaaattagctctaatgcatccaaacaagagggctaataggcatgcgtgagccaagccttcaactagttgttagtcaacttcaactaatttgggctaatttttaagccccgactagtgactagctgttggaagaggttagtgcatgcaatttaagttaataagaagatgtgtgcaattcacttatatccaacactagccatgtgtatccaaacatgccctaaaaccaactatttcatgtctttgattgtctgcttacagattatatatagtctgtttgcccagagtcaagaaaaaaattgtctgataccagtacaagtgctttggtgagaatttgagaatattagtcgctttggtaaaaaaagattatttggaaaaaatgaatcgtgtttatgcaacattttggaggtgattgcatgtataccaatatatcaacaactgtctcaggatcttgttcttggttgttaagaatgtgactgaggtatgttctttaaattgtttttccattacattaggagcaattgaagccattggttgcacaacttgatagagtgaagaatattcctgcaccagagtttgggagtctacaaacatgggaaagagcaaatattggtgcttttgcaattggtgaccctgctgcagctgattcttctaggaattcacaagggcagtatggtacaccaatgccatacattggagagacaaaggctgaagttgatctgttgagtgatggtgtgaaaaaaggtgctgaatcaggtaaaactgattctgaactgaaagttttacctccatggatgatcaaggatggcatgaatcttactaaggaacaaagaggagagataattgcgccacaaaaacttgagaaatctgatgccaaagatgacaagaagcatgacttgaaagattgatcatagtgtacaggaagaatacataaaggcctattatgaggccttgaggaaaaagcaggaagaggaagaagcaaaaaacagaatgcagcaggaaggcaagatttctgtccctgattctcaaactgaacgccaagtgggcaagaaatacaagcgggacgacgatgatgatgaagacattgaatgggaagagcatcaacctacagctgcagggaatgcaaccgaaacatacaaattggcagatttgaatgcggaggcccaagaatctggcgatgatgaagatgataatgtgtgggaagagggctaatgctaaaaagataacagactattcctgtgcggctgcgcccttaggattttggtatcccaccagaggtcgagagtatttcactaatgagcttagttatgttgaacgcatgatcccgagaaacttgtcaagtgaaaagccagcccctatgcatttttagttgaagatgtacaaattatacttaaatactttatgagccggtcagcagtttcccctgttaaaaaaaaaaaaaaaaaaaaaaannnnnnnnannnannnnnnnaannannaaaaaaaaaaaaaaaaaaaaaagggcggccg

SEQ ID NO: 102016 - DNA, 416 bp, Zea mays
  Clone ID: MRT4577_24547C.1
tttatcctttttaattgccaggccttatgatttgtcatttccattccttttgtggttgagcaaaacaaaacccccccccagtttaaattaaacggcccgcggccccccaagtttcaaatcccaaacctgaaaattaaagggggccccccacccccatttaaaaaaaaaaaaaaaaactttccctccaagggcccgtttaaccaaccccccttaacctaccataatcccccccccccaacattggcccatttttttaaactggctttccaagaaaaaaaaaactcaaatttttaaccggcccttttttttgcaccccccctccccccccaaggaaaacggggataaaataaaaattggaaggtcttccccatttaaaaaaaaccccctcagggtgggtggggaaaacccacttggcc

SEQ ID NO: 102017 - DNA, 444 bp, Zea mays
  Clone ID: MRT4577_24548C.1
ggctctgtgaccgtgacgagacacgtagccaagaggccacgcccgcttgggatcagtgaggtaaagcgtagatggcagcgccaccgaccagggcccgagccgactactactaccttataaaactgatcctcataggtgacaggggattaggaaaaagaagactcccgttacagatatcaaacggaccatttaccactagctttattaccactatgggcattgactgcaagataaggactgcaagaacagatgggaaacggattaagtcgcagatctgggacactgcatgccatgaacgtttgctgacgattactatctgattactacaggtgagcacaggtgcatcttgcttgggtgcgacgtcacatacaagtcatccttgaataacataagagactggatcagaaacaatgggcaacgtgcttctgataacgtgaacaaaat

SEQ ID NO: 102018 - DNA, 1833 bp, Zea mays
  Clone ID: MRT4577_24549C.1
tctaagcatctcctgttcgcgtcccctctctctcgttcagttctttctcccttcccatgtcttcctctgattccccacgctaacaattggtatcagattcgccgttccttggcgattctcaatctggagcacggctacttcacgcgttcgcagcgacgcgcgggtgtgatggatcccaatgtcctgttcatcgttgatgagatggagaagtttgcatctatggatgtcaagtgggagaagcgcttgtcggagctggtggcagctaaggaggagcgcctgatctccctcgagcgcgtcagcggggagttggaagcatggtagcccacggtggatgtagcgatggatgataccaagttgcagctccgcaaggtgaatctgcagttggatcatgccgttctggaggcggctggcggagattctagtctgttggggaaaccggatccatccttcggcaaatcggggtcgatcctgcatcaggaggatccgatcagtgaggatttcactctaggcgctccgattccgggtacttctggtgccgcgaagggtatgaattcgtttaccttgcctcatccgcccccaaagtttcacggttctctgtatgatggtcatccatttcatccgattgctcctgaattattggggaagttgccgaagctgccgtttccagtcttcgatggcgataatccacgtctgtggatctcgcgttgtgaaacatatttttaacatgtattttgttgatcatgtggcttgggtgcgtgtggcttttatgcatttgtcacctgttgttgcctgttggtttcaatttgtctagcgcaagtatatggatgtgtcctagccactgttgtgtaagttgctgaatgagtgttttgggagggatcagtatcagtttttgcttcgtcagttgtttcgcatcagacagagtggcacagtggcagaatatattgagcgattttccactttggttgatcagttgacagcttatgaagcagcgcatgatcctttgtactttaccacacgatttgtggatgggctccgaggtgacatacgtgccgttgtggtgattcattgaccaacagatttagacacagcatgcactttagcattgttgtaggaagaagtatctgaaccagcccatcggaaagaggtgcgcaagtttgagatgactccttggagcaaaaccacaacatctggcccactgtcgttaccgatgccactaggggttgacaagggtgttcggtctccatctcagcttgagaaacctgtggggagacctcaacgtcctgccgaagataagatgggagcacttcgagcttatcgtcgtgctaggggtctgtgtgataggtgtgccgagaagtgtgtcacacccggttttggaaggcaaaccgaatgtgaaacatgtacgtgacaggatcagaaactcacgtacacagtgattatataattggacgtcatcacacaatgctcaaagtaaatagcggaagagtattttattacaacaagatgtctgttgggggtatgcttcgtagccgaagatcctgaagaaagaaacaccttcagcagatcctctcaaaagcagtgctgaagctatcacctataaagctttggcatagcgacatgtctcaagacgaaggagtgaaccgacttaaagatgaaatgaccaataaacccatgatagtttgtgtcatgactgtaatcgattgtaaagggcttaaatgtaatttcacacaggctacgccctgtgcttataaatagatgaacagtacacccgtactgttcacgcaatcttgtaatcacttgcacgcgacatttgaattattgtcttctgtcaagacg

SEQ ID NO: 102019 - DNA, 245 bp, Zea mays
  Clone ID: MRT4577_2454C.1
cccgtacgcgcttggatcttaacacgccgcaccccttcagcaagcctgttttctccaaggcggagcttcctaactggtggcataaaaaaaacttgggaccacacaattgtgcccctccgacccacgcaccgctacccgtcccctacagctacccccttgttgagccctatccaagggccaccgccaaaaaagcaactttgcacgccggtgccagcacctctcgcaccagcagcaccacaccccgc

SEQ ID NO: 102020 - DNA, 421 bp, Zea mays
  unsure (1)..(421): unsure at all n locations
  Clone ID: MRT4577_24550C.1
attaaatgatgggtttaatcttaccatttgattgggtgagggttcgtttcatccaatctagacccgaattatttttttgggggaatttcatccctgtaaccgaccaagggttacaggttcaacttcacccaaaggccaccaaaatttttttgcgatagacgtgacctttttggacattttttcggcccgcgttttttttttatcaatcgggggcaacattccgcccacaacttcaaactttggttgtcgtgtttttctgtccggggctctcttttcgtcccgggccttnntcaaatcttgggcttaatttttttttggtggggaagtcttgctggcgggttcagntcttcccactggggntcatctttttttaagagtttttgctcttcttcctcggccggaacttgttccaaccttgggg

SEQ ID NO: 102021 - DNA, 1411 bp, Zea mays
  Clone ID: MRT4577_24551C.1
aagaaccagcatcctggttgtgaaaatggggggtgtgcgtactacttcttcatcatcgccgccgcggtcgttgccgtcgtcctcgcgcttctcccggccggcgtgaagaagagaagccggcccacgcgtccgggtttcccagccaaagaaccagcatcctggttgtgaaaatggggggtgtgcgtagctacttcttcatcatcgccgccgcggtcgttgccgtcgtcctcgcgcttctcccggccggcgccacaggtgccggcctcaaggtcggcttctacagcaagacatgcccgtcggcggagtccctggtgcagcaggcggtggctgccgccttcaagaacaacagcggcatcgccgccggcctcatccgcctgcacttccatgactgcttcgtcaggggctgcgacggctcggtgctgatcgactcgacggcgaacaacacggcggagaaggacgcggtcccgaacaacccgagcctgcggggcttcgaggtcatcgacgccgccaagaaggcggtggaggcacggtgccccaagacggtgtcctgcgccgacatcctggcgttcgcggcgcgggacagcatcgcgctggcggggaacaacctgacgtacaaggtccccgcggggcggcgcgacgggcgggtgtccagggacacggatgccaacagcaacctcccctcgccgctctccaccgccgccgagctcgtcggcaacttcacgcgcaagaacctcaccgccgaggacatggtggtgctctccggcgcgcacaccgtcggccgctcccactgctcctccttcaccaaccgcctctacggcttcagcaacgccagcgacgtcgaccccaccatcagctccgcctacgccctcctgctgcgggccatctgcccgtccaacaccagccagttcttccccaacaccaccaccgacatggacctcatcacgcccgcgctgctcgacaacaggtactacgtcggcctcgccaacaacctcggcctcttcacgtccgaccaggctctgctcaccaacgccacgctcaagaagtccgtcgacgccttcgtcaagagcgaaagcgcgtggaagaccaagttcgccaagtccatggtcaagatgggcaatatcgacgtgctcacgggcaccaagggggagatcaggctcaactgcagggtcatcaacagcggcagcagcagctctggattattccagcttcacacggcaaccgcctctgacgaggaattcgcccacgttgcaactaactagcagctactatatctctatccgtagaggatctagtgatctactgctactcagtgaccatgttcttcgatgttacaattagttccactacctgaatccagcttttacggagtgctcgacgctttgccgagtatattttgtcgtttttttttttt

SEQ ID NO: 102022 - DNA, 291 bp, Zea mays
  unsure (1)..(291): unsure at all n locations
  Clone ID: MRT4577_24552C.1
ggtggcgcttgccacacacacgctgtgtttctggcggtcgtgcggttttttttcgttccttgatcctgacctctgttttttttttttttttcnancatccaacctttcttggggtttgtattgggggtcctcnctcttctatattctcaccttaattcaatatactgaaccccccttttacaaccttntcactgccaaaacccttgcctttcccaacttagtccctttgcttctcattcccgttttgccagttggcgtngtgtcgatccggcccgcaccgttcgcccttcc

SEQ ID NO: 102023 - DNA, 161 bp, Zea mays
  Clone ID: MRT4577_24553C.1
aaatttaaggttagataggtataattctaatataatgttcatccaaactttcttaaatttgatcaaaattgtataaaaaagatatactaaaatttaaggttagatatatatcattacatttgtcatggaatatattttagttgcagtttagaatttcatcg

SEQ ID NO: 102024 - DNA, 365 bp, Zea mays
  unsure (1)..(365): unsure at all n locations
  Clone ID: MRT4577_24554C.1
gcggnnngggggnnnnnnaaggaaaacagnangggagaggagggagccaancgnnacagggacanagncacacacacnagcgcacagagancagagangcagggngngnaacgangccanacgannacaggcaccaacacaagcacaacagaacgggggggaagcangccnggcggagagccagagccagaccagacganggcnccanccnnnanncnggacacgccacaagcacaaagcagacagnacgnaaaaaaagggacaggcangcangccgcaaacgaaacaacgcagcaggancaggagnngcacgggcggcacnggcagccgncaccgcagcngcagccgggggcggccccgccgga

SEQ ID NO: 102025 - DNA, 389 bp, Zea mays
  unsure (1)..(389): unsure at all n locations
  Clone ID: MRT4577_24555C.1
ccggcacgcaggcagcacccagcaccacaccacagaccaaaacgaccacggcacccgcagcagcgaagagaccaagcggcggcagggcggagagcaaggcgcgaggcgcgccgaaccaggcggcgcncgcggcggcgagccggcgggcgccggccccggacggcgccgggacgacacgcgcgccgacgcagcagaccccgggcgcgcccgacaccgccgggaacgcgacgcccaccgaggcgagcaacgccaggcgcaaggcacacccggcgaccggcgcaagccagnacaagaggaaccgcagacngcacagcaacgaaaacgcccacaacagcaagaaaagaangaaccgacagacaggcgnaacagaccaggagccgaagcgaaca

SEQ ID NO: 102026 - DNA, 235 bp, Zea mays
  Clone ID: MRT4577_24556C.1
acaagctttttttttttttgttttttttttgcttctttagaaccaaaacttgtggtgaccttgctgttattatgggctattccagacataagaaagtggggagatttactgtattattccatttttatatatataagggagggatggaggaagattaccaaattattaagttagggatgaccaagaatggatgcgtggccccaacaaaggttggggtggatgttgggcagctgga

SEQ ID NO: 102027 - DNA, 842 bp, Zea mays
  Clone ID: MRT4577_24557C.1
ttcccttgcagccggttgtctgaggagctcttcctgatcgtcgccggcgtgctgcatgtctctgtagatggcaggctgggctccaggctgcaggtcctggctttggcttctgcttcgacttggccatggcgtcgcgcagattgtgcctcttgttcttggctgtcttcttgctggcagagtagggtcacgtccagctgagagtagctgctcgccaggctgaagtcgccatcttcttcaccttctgatgggctcaacaccacgttgttaagatctacattcctctccttgaggaagttcatgaactcctggaagttctgctccgtcggccggtaatgcccgctatgaggccacacagccttgagaattccatcctccacaaccagtcttcctgcagcagatgtggctccccctgcaaggaagcttgagtgctggaacacgcccttctgcttctggcctatgtaaagtgtcttgcatgtactgagcacgaatatccacttggtccccttgacgcttctggtcgtgtcgactatctgacggctcagcttgtacatcagcctcttgtcctcgactaccacctcataggtttccctttctttagggccaaggtacttgatacattgcttgtgtaacttgaatctagggcaatgctcctctaagttgacatctttcccttctcctacatccaaccaatagaagaatggctgcttgctctggcagtggagccagcggtggtagtagaagtgcaggttgtggccataccgatgccgagggtcaatcgcctcgagccagtgctgcagcgcaagtttctgggccttctcgtccttggagagaccctttccaac

SEQ ID NO: 102028 - DNA, 221 bp, Zea mays
  unsure (1)..(221): unsure at all n locations
  Clone ID: MRT4577_24558C.1
gagcanttacaaaacaggggggatttttggcacggggcggttagaagacccaatgagcccacggcctgcatacttgagggggtacacaaacacaacaagggacaacaaaaagtttgctgaatgtacctcagttcacgaccaaattaaggggtgtaggccttttttcaggatctgaagacacgagggtggccctgtaaatgtgcggggggcaaacggaagcc

SEQ ID NO: 102029 - DNA, 321 bp, Zea mays
  unsure (1)..(321): unsure at all n locations
  Clone ID: MRT4577_24559C.1
agccgcggtgtaccaaaccccacacgtagcaaaagcagnagcacacagcacaaacctctttcccctcccctgccccgcctcctcctcctgcctttcccctgccttgtccggggtgtcgcctcccggtgggggggtcttctcgtctccgggcgggcggcgctggtcttcctcccntcgcntnctggggggggggggggntcnccttntntcctttcnctnctggnncnggccccgnggtcggccccggcccctgtcgtgggtcttgttcttgtcggttccgccccggcccgctgcgccgcgccttgcccggggtgcgccgtc

SEQ ID NO: 102030 - DNA, 598 bp, Zea mays
  Clone ID: MRT4577_2455C.1
tcgaggccggccgggccggggtaatcgatcagagagagagagagagcgatagtcgatcatgaagggcggcgagaaggaagaggccggtgcggaggtggccatactgctggttctgcagctcatggcagctccaccgacggccatggtcgcccgctcgccgcacgaaggcgtgccggatggctccctcgccacgacgcccaaggtgacgatgctggcggacacgctgcgctacacggggagagacatgcagatacattggatgcctcactcctgcttgctcctgcaactatagtgatcgtctaagctacatcatatttactcctgttgcttgaggacattccgcgaagccacaactcttacatgcatgcgccgggcgacgacagacgctgcctctcgtgagcttctgttcaagtgatgcatgtttcaaggcatccatggatgctttatgtatatgatatgcgtattattaattacccgtgtcatagaaccgagaagaaggaggagctgtcttatttaggtcttctgacgatccaataagaggaaaatatatgctggatgcgtacaaaacaacaacacaaaagggtccctatggaccgca

SEQ ID NO: 102031 - DNA, 214 bp, Zea mays
  Clone ID: MRT4577_24560C.1
ggttgctgagattacgcgttttgccgagcaagaggagttggtccggtcgctggaggcttagctggcacagaagagccgccattggaggagcgtcatcgcggggtccctcctaggttacacggctttccttgtctactccagtttccatcatgcttggtctccctaagaactgatttggacaccttcagccatcaatctttatgcagagctaaga

SEQ ID NO: 102032 - DNA, 370 bp, Zea mays
  Clone ID: MRT4577_24561C.1
cacgggtaaatcccaacctttatggcaatctacgggggaattcccaaatccggggccaattggggggggggggagtcctttccaacataaaataggggtaaaatctaaacagggctcgggtttcccttggattccacggcccgaaacaatacggggaggacggggcaacctagtcgaagggggtgaagcccatataataatggtttttttcctttttttccacctttttttttttttttgcctaaggtggaggagcagttcccccagaagaaggggcacctgccgaaacagcaacaccgccgccgccaaatgggactgaagcaaacttttttttgcccggggaaatgagctcggggatgtccttaccgct

SEQ ID NO: 102033 - DNA, 1149 bp, Zea mays
  Clone ID: MRT4577_24562C.1
tgactcatttaagaacaagtccccaacggtgccggagctagagaccgagcgcgcgcacagggtgttcaagaagagagagacgcagggagatgggagggcgccgagttgggtccgagccagggacgcacttgcatggaaccagggagagggagagctcggtgagctgagcgcaggggaaagagaaacaaggcgcggtggccatggcgagcactctctctcctcctggttcactctgtgcgctcctcggcgcgtgcccacgtctcccacgcctccctccctgcattccccccttcagatccagtctggcccgccgccgccgatgtccgaggatcccgcgtgctcccgccgctcgcggtgcgacctcggcggcgacgagcgctggctctcgggggccgccggcgacgaccaattcgaccgcctcccggacgcgctcctcctcgtcatcttcaaccgcatcggcgacgtcaaggcgctcggccgctgctccctcgtctcccgccgcttccacgagctcgtgcccctcgtcgactccgtcctcgtccgcgtcgactgcgttatccccgacgagcccccctcctcctcgtcctcctcgtcgacgccgtcctctcctacggcgtccgtgcgcgcccgcggggtcttctcacagatcgcgcgcatcgtgctcggcggcatcgtgaagcccatccaggcgcttggtcagatcctctcacccgccaactccgcctccggctttccggcatcctccgcttcgtcgctatcgtcgtcctcgtcctcctcctcgccactgcctgctgcggacgtgtcgcaccactctccctcggaggtgctccgttccttcaaggagctccgccaccttcgcatcgaagctcccagcgggcgagctcggcatggacgatggcgtgatgctcaagtggaaggctgacttcgggtccacactgggcagctgcgtcatccttggagcatcctcagcctcgccgtcgccctccccctcctcagctggctcagatagtccgagcgccgctccctctgatgacagtggccacaccgagcctgatgaatgtgacgattcaggaagcatccctgagtcgttctacacaaatggggggtttaagctgcgagtggtttggtcaatcagctcattgattgcgg

SEQ ID NO: 102034 - DNA, 405 bp, Zea mays
  Clone ID: MRT4577_24563C.1
ctctgttctagtccagggggcacgagcaccattaccgactacttgaactagtgacagctggattacgcatcgacagtgactgaattacactcacacgaagcaccctacctttgctagttcttctacatctactcttaccttaatcttggtgatgtgattcttgacttgttgcgcgcattgcacagggtgctcggactgcatatatattaggctaaccagtcgagtgtagactatgggcttcgatatagtattactactgctctgttataatcagcggggaggaggaagatgacggtgacgccactgatcacggagagctactggcgtatgacggtgcacggacgtactgtgctcaccggcgtgccggacaacatgtcagctgtacacgcaggcgttgcggatctc

SEQ ID NO: 102035 - DNA, 1019 bp, Zea mays
  Clone ID: MRT4577_24564C.1
cttatgtaatactgggagggcggggcagcgtcctgccgacgcacacagccccgtccgcccccgcctaccacccttcctccaccaagccgccccctccccggcgccgctgcctctgcctatgcgtcgtcgtcacgctggctctcctcgccgcgctggccataaccctgcttgtcctcttcctgaccgtgctgaaggtccgggaccccacgacgcggctggtgtcgacgcggctggccgggatcgcgccgcgcctgacgttcccggccgtgtcgctgcagctgaacgtgacgctgctcatcgtggtggccgtgcacaacccgaacccggcctccttcgcctacgcgtcggggggccacacggacgtgacctaccgcggcgcccaggtcggggacgcggagatcgagcccggccgcgtgcccagccgcggcgacgccaacgtcagcctcgcgctcacgctccaggccgaccgcttcgccgcgggcctcgcccagctggtcgccgacgtcgaggccggcgccgtcgagctccaggccagcaccaggatccccggcgaggtcgccatcttcggcgtcttcaggcgccacgccgtcgcctactccgactgcaccttcgtcttcgccgtccccgagatgcgggtgcgctcccagcagtgccgcgaccgcaccaagctctagctggtttggttggttgttggttgctgcgtacacgtcacgtggaacgtgccgctgtccgtacgtgtcgcttgcctcgtcgcgcatcccctcttgcttgtgctttgcttttttgctttgcttccctgtcacgcccgcgtcggtgcttggttacggtgagatacgactagtctagtggatcacgggtcgtcttttgtacaatttgattattgcagatagagcagtagagacagagagatatatatgaccatgtacataatcacagaatcggttgtgaattgatggagcagcagctgctctgctcatcgttcttttgctttgtattgataataataatacttcacaaaa

SEQ ID NO: 102036 - DNA, 256 bp, Zea mays
  Clone ID: MRT4577_24565C.1
ctgtgattggcctgtaccaagttgcgggagatctggagatgatctggagcagtcggtgggtgcgaatctcccgtacgggtatgactcggtttccatgcagtcgctgttgaacactgaggatgacatgggacctgatctgtaccacttaccgcgttccttggtttgatgctatagaggtatgttatgctcggtgtttggtgatctcagcgggagctgtcgtttcgtgattacatacattgcatgggcttctacatct

SEQ ID NO: 102037 - DNA, 407 bp, Zea mays
  Clone ID: MRT4577_24566C.1
aatgcaaaaaaaaaagatccagactcctgtatcgaaagacccagtttcgctttagaccaagttgcacaatggtttattgcttataatatgatcctgactcctgtgcgggtttcggttcaacattcttggggtccggtggggtgcattgtgcctttgtctcatggctgatctttctgtgctcgggttcctatctcacgccggtgggccctcctggcctgttttgctgttccactgggagctttgtcgtggggttcttttatcttctcctcttccctgctcttggtctcggttcgggggttaaaggctttacctgccggtttcactttgcttcggtttccttctcccttgcctcgtctaggggatggagaactgctgcttttgctgtctctctcgttgctttttccttt

SEQ ID NO: 102038 - DNA, 254 bp, Zea mays
  Clone ID: MRT4577_24567C.1
attgggtctatctactacaaaacgcagaacttcccggtctacaccatgagggtgtagctcgggggcctggctctcctggctctcgctgcgagcgccaccttcacgcatacaatcggcggactgcggctgacagccaccgatgccggttcatctaccgccatacggtgcatctagccagctcctggataagctggcacatccagtgcatctaccatcgacgatccaccaggcgacggcagcacacatgtcaccat

SEQ ID NO: 102039 - DNA, 196 bp, Zea mays
  unsure (1)..(196): unsure at all n locations
  Clone ID: MRT4577_24568C.1
ctcttcaacacatgaggcggggatatccctcaaatccaccatcatccccagctagtttgtcccacaatcaaagacatcgttacacgatattatagttcattgggcatttttatttggaacaaaatttaaatactggggatncgtttaggggangacnnanggagtacattncacccctnagattaccccctactgt

SEQ ID NO: 102040 - DNA, 207 bp, Zea mays
  unsure (1)..(207): unsure at all n locations
  Clone ID: MRT4577_24569C.1
cattgggtacctcgaggccggncgggactgttttcgatgccggcctcccggatctgatttggttctcgctttcccttcgcctttctcggccggncccagntgctgntttttcttcgncgnaatccccgnccagcgagntgcagcgnaccacagnccacaaactggtgatcgatcctagntgctaggntggntggagnaggaattgaa

SEQ ID NO: 102041 - DNA, 712 bp, Zea mays
  Clone ID: MRT4577_2456C.1
gctttgtcgtcctctacacgacttttctccccatctcccacagccaagtccccaacccacctccacctccgcgccgaggaatccacacttgcaattgcaactacgagcccaccaaatcgagccgagccccgacggcaccaaatcgtgcggcctcggagatccagcagggtctagaagaaccaggagagacaccgtcagaagaggagggtcagcagcagccagaagaggagggccaacagcaggcaggcggtggcggcgaaatcgtcagcggctgccggggtatctgcgatgataacccggtcgaagctggtggagcagctgcgcgactaccagatccgatcccagcacaagcgtgacattatcggagctatatcgtggggcttgctgtgtagttttctgataatatcttcgtacatgatgttgtacttcaggcacttttggcttagtgctattattatctcactgggtattcttttccctgccggcctgtatattttgaggcaaagaaagctggctaagaaacgagagagaagactgttgttgcctctctctatgtaaggttgtttgtaggtttcttgttttttgcgcctattcttgtcttgatagaatccacattcttgtcttgtggcttgtctagcacacatccaactttttatacatctctgcccccccctaacacagatcttgtttttcaaaaaaacacccacacgcc

SEQ ID NO: 102042 - DNA, 372 bp, Zea mays
  Clone ID: MRT4577_24570C.1
ccggccgggatgctctccggtaccaccgtgccactccaacagggggacggtctgtcggagttatgcggtctcaggcagctccgcgtcgatgcccagcgccagaatgccacgttcgaagacttcatgttcgtcgtttccttcatgacccacgcggtcggtacgaggcggcgggccgtggcggtcgcccgccgaggcgaagcgtgaagtggacataaatgggataggacggatcgggggcaactttctgcggagctggcacgggcgcggtgaacccttgccccttgacgtaatcggcatcaacgacaccgagagcggcaaggaggcgtcccacctggttcaaggacaacttcacgcctcgggaatattgatgcc

SEQ ID NO: 102043 - DNA, 359 bp, Zea mays
  Clone ID: MRT4577_24571C.1
tatcatgagtcgaatcaatcatcgcatcacaccacacggactgcgtgactaatccgtccgtccagcgaccggcagtggcgctgatggagcgcgagtacctcagcgtggtcatgttcacgtggctcgcgcacgggcagttcacgccgtacctggaactggccaggcgattcacatccgccaaagacgcctacatcgacttgaccgtccagctcgtctctacgcccgtcaacctgtccgctattacgcggtaccagacccctcggatccgcgtcgcggagctccacctcccggcggcgccggacctgccgaccgagctgcacaccagcaatcacctggccgcgcgcctcatgcctgcgctc

SEQ ID NO: 102044 - DNA, 928 bp, Zea mays
  Clone ID: MRT4577_24572C.1
cggcctgaccgatgcagagcgtggtgacgggggagcggatgtactgcatggtatcgtagatggcgaggcccgcagtgacgacgccccccggggagttgatgtagaggtggacgggcttggcggggttctcggattcaaggaagagcagctgggcgacgacgagggacgccgtatcgtcagtgatggggccatggatgcatacgatgcgctccttgagcaagcgcgagaagatgtcgtaggcgcgctccccgcgggaggtatgctcgatcaccatgggcaccaggccgtactcgcggcgcggggtgtagcccgacgcagccagcggcggggcgtgcggggaagaggaggagaaggtccgctgggcgacggcggcgatttttttttttattggaccccttcctcggacgcgtgggcggacgcgtgggcggacgcgtgggcggacgcgtgggcggacgcgtgggcggacgcgtgggtgagtcaagcttgtttatctatcctctgaagattgtcatcaagacctgtggcactaccaagctcctgctcaccattccaagaatccttgagcttgctgaagagctgtctatgccacttgctgctgtgaagtactcccgtgggacgttcatctttcctggcgcacagccagccccccacaggagcttctctgaggaagttgctgcacttaaccgctactttggcggcctgaaatctggtggtaatgcttatgtgattggagatccagcaagacctggacagaagtggcacgtcttctacgccactgagtacccagagcaaccaatggttaaccttgagatgtgcatgactggtctggacaagaagaaagcttgtgtctttttcaagactaatgctgatgggaacacaacatgtgccaaggaaatgacaaagctctctggcatctctgaaatcatcc

SEQ ID NO: 102045 - DNA, 603 bp, Zea mays
  unsure (1)..(603): unsure at all n locations
  Clone ID: MRT4577_24573C.1
gccggggacctgctacgcaattgctttctgtagtttgtttggtgcgatgattacacggaaagtttgattacgcagcagtttattaacgacaaggaaggaaagaaagaaggtttactctaatataatcttctttctcacggccgggtggttaattacaaacagtatcttgtcacgcgcggcgcgaagcatctggtgggcctccgatccctctcaccaccgaacaaggagacaaaaactcgagtaccatttcgatttcgacgtgttctcaaaaaaaaaaaaaaagtcgcagcatgttctcgagcatttcgaatacgttacttccttgtgtttctctcttaacgatcgaagcaaagacctaaaatatacgtaaggtcacgattatattatatgagtacgcggttcccgccaggccctggtggccggtctataagcagcgtcataattgcccattagagcatgcatgtatatataggaggactagctgattcataagtactaaattctaagagccaatgataacaccgatcgatgcatgagcatgatcaaccagcggtacacaacaccaaacggaagcaattgcaaccccccccccccccccnnntt

SEQ ID NO: 102046 - DNA, 261 bp, Zea mays
  unsure (1)..(261): unsure at all n locations
  Clone ID: MRT4577_24574C.1
cccacgcgcacggcggaggcggacgggccaacaccggcagccagaagagggcgngacgcncgcgcgaaggacagaganaaaaaaaaaggcggagggggacganggacaagaagaccgggncaacaaaannanngagcgagaagcaaagangaggcacaaagacaaagaaagaacccagcccggcgagaagacaaacaggcccagacanngaagaaanggaaacaacacaggaggcagccaaacgaggaacggaggaaagaa

SEQ ID NO: 102047 - DNA, 822 bp, Zea mays
  unsure (1)..(822): unsure at all n locations
  Clone ID: MRT4577_24575C.1
tttaattcggcacgagggtcgacatgacctcggcgtgggtggaggactccgacggccccatcctcacgcantggctcnacaggttcccgtcggcgctggatggcggggacctgaacacganacanttcnnnggatccatcttcaacacctccctcccctgtncggcctctgatggcttccggctccancctccangtctgttgtctgacgccgtgcttgctggctgtggtgttccccccccncgcatgtanctatangngaatatttgaaccancccacccnnncccnnnnnncccnnnnnctccccncccccccccccccccccccccccnncccccccccccccccccccccccccccccccccccccccccccccccnnccccccccccnncccccccnccccccccccccccnccnccccccncccccncccccccccccccccccccccncccccccccccccccccccccccccccccccccccccccccccccccccccccccccccccccccccnccccccccncccccccccccccccccccccccccccccnnccccnccccccccccccccccccccccccccccccccccccccccccccccccccccccccccccccccccncccccccccccccncccnccccccccccccccnccccccccccncccccccccccccccncccccnccccccccccccccccccaacnnnncncncccccncncccccnncccccccccccccnccccccccncccccnccccccccccccncccccccccccnccccccccccccccccccccccc

SEQ ID NO: 102048 - DNA, 162 bp, Zea mays
  Clone ID: MRT4577_24576C.1
ctgcagcgcagcaaacaacacgaaccatgctacaactaatttaaagtactttattgatcaccggggatgggaaactcgccgagaatactggaccttaggctactagacctcctgttctctttcaaacgcccggccgactaacacaactacttcttgcagcca

SEQ ID NO: 102049 - DNA, 1354 bp, Zea mays
  Clone ID: MRT4577_24577C.1
accgccccctcccctgcgccctccgcacgccgccttcgaaccccatcgcccatcctcactacggcgacggctattgccacagccgccgccatcttgacgcgtacgagattctgaggccttgatctgaaacccgcctcgatcccacagccattcacccaccgttccactggtcacggtagcggcgatccctactctcaggccgtagctacgacctaggcggcgccatgcgacacggaggcggaggcatgggaggtggaggtaaaagaggtcgaggaagaggagcgggctccggacgcagagacgcgcgccccggcaacgattcgtaccgcggcgaccgtgtgtagcgaggaaatttctggaccttgatgcattgctatcacatgcttatgatacatgcaaggccggtttgaagacaaaacacttggggtttcacaaagcactgtgtgttctgatggggtggaattggcatgttgctccagacacatctaaatcacatcactccattccatctgaggaagtaaatgccatgaggggagacctcatgctgtggcctccagttgttgtgatacataacagctcgactggtcatgaggcaaaggatactgatgcaaagattgtgtccatagaagaaatcgaaggtgtattggcagatattggggtagcgcatgagaaggctagggttagccatggaagatcagccaatcagagcgtgttcctggtgaagttccagccaacaatatctgggttccaagaagccatgagagtgcatacccatttctccaccagaaaccatggcaaggaagagttccagctgatgaaaggcagcaaaggtaagaaggctacctccactgatagcctggaagagctgctgtatgcgcatattggggtcgtggaagacctggggctgctggatgagggaacaaagaagagatgcaaggtcatgaggaagaaggaaattgaggcaaatgcagaggcaacactgaatttagaagtttattaggtctagtactaggatccgaaccatttgaagtggtcctcttttgcttcatcttgcagctgcttgcttgtccttgcggctgtaacgtcaaaagaagaaaaaaagtgtaaattctgcttttgccattaaagagtgacgaaactcagttggcttctgtctgctggggaaggcctgcctcggtttgcatggcatggcaaggacataattttgtggctagatggggacaccttaacggcaaaagcagaattacctggtcgaagaaccgagtttaatcttttattatggaatcccttcttttttgggaatcccttcttttttttaaaaaaaaaaaaaaaaaaaaaaaaaaaaaaaaaaaaa

SEQ ID NO: 102050 - DNA, 323 bp, Zea mays
  Clone ID: MRT4577_24578C.1
aatttcttttatccgtcttgaagagttgcgggcgacattgtactaagattttatttatgtttactgtacgaagcccacaaactcgacggtggttgcgttctgttttaacaacagaaccacccggaataccttcaaaaatcaggctgtccgcttgcatttgtatacaataaggactatttacatggggggggcgacaacccatccacttgaattactgaactgtgtccactgtataaagataccttgaccggcagaagcccaccggatgggcaagcctgccctacccctggtgaactgggctccctcaagaaggttgagaaatg

SEQ ID NO: 102051 - DNA, 464 bp, Zea mays
  Clone ID: MRT4577_24579C.1
gcgtggggggttttttttttgatagaacgaaactagggctaataataaactaatggtattacaggacactcaaaatgatagccttttttattggatcaaaactggtaaatacacaagcacatgcgaatcacattatttccgaatctaaactaaaagcttagatggccttttataaggggcttgaaaccacatatgcaagagaacccaactgccaaagatagggttttaagtacgaacacaaccattatagccttaattagagcagaggccacagccttacgatcattctttttaaaggtagccagagactgggaggcgtgctttatctgcctaaaaaagctagccctgagctttccttaccttcagcttcttctacatggcaaagaacttgctatcaaacttggcgacatcaacacctgaaatgggaactctctgtgatttagcaaccacatatgcctggttca

SEQ ID NO: 102052 - DNA, 630 bp, Zea mays
  Clone ID: MRT4577_2457C.1
tcctgcgccgcggagcggtcgggccgccttccgctccccgggcagcggttacaccttaatcgacacgactctccggaacggatatctcgggtctcgcatcgatgaagaacgtagcaaaatgcgatacctggtgtgaattgcagaatcccgcgaaccatcgagtttttgaacgcaagttgcgcccgaagccttctggcggagggcacgtctggctgggcgtcacggcaatcagatagagagagcatagtcgatcatgaagggtggcaagaaggaagtggccggtgcggtggtggccatactgctggttctgcagctcatggcagctccaccgacgggcatggccgcccgctcgccgcgcggagccgtggcggatgggtccctccccacgacgcccaaggtgacgatgctggcggccacgcctgtgctacacgggggagacatggaaatacactcccctggttcactcctgcttgctcctgcagctttagtgatcgccctctggtaccgcatatttactcccgttgcttgagttgagggcattccgcgaagccacaactcttacatgcatgccgccggcccgagacgacgacgctgcctctcgtgaggttctgttccagcgatggatggttc

SEQ ID NO: 102053 - DNA, 452 bp, Zea mays
  Clone ID: MRT4577_24580C.1
ttggcatttgctatagtcccctggttttttagaatggagatcactgaaataaagctaaacaggatcaggaggcttgggaggggttttgttgaaagctaaccctgcttaaacaccaaacaggtggtccttgaaatcaagttttttaaggcgagtgcttgtccttaaggcctaaaacaatgcaactccaccataaaatcctatctttgtggttgagcacctgaaactttttacattcggaaaacgcttaaccttttaagcattatacatagcaccttcatttcccgtattgttgttggggaagtggaaaaccttaagcttttaagttgcaggaataagctaaaataaagctttcgaagtttcctttgatatgccataattaataacatatagtttttcaagggattcctgtgatttcgaacccgtgggcggacccttggttccgaacccgtggc

SEQ ID NO: 102054 - DNA, 1267 bp, Zea mays
  Clone ID: MRT4577_24581C.1
ccggccgggacaatgtctcgttctccccgattccgacacctcctctcccttccggcttgtagcccccgccgcctctccacgcccaggactccccacggtgcttccaggtacacgccctgccggagatcttcccccgcgctccccctcgcaggtctccacgttgagctcctcgcccgcacctggagatctcgtcgtcgagcgctgccgcgcgcccctcagagatctccctgccccccgtcgaggaaggctgcgcggccccgtcgagccctgtcgcgcgccccttggaggagatctccctgccccccccctttgtcgagagctgtcgcgcccccctcggaggagttatccccgtcgagcgctgctacgcgcccctgaaggtaaccccacgcttgacccttcgaccttcgcgtctcggaaaactccttcgacctgctcacgcgcgtgggggcggccacactcgagcactgctccggtccgcagttccgtcgcgaaggtacagattgcacccagtttttggctgccagctagtgatagtgagcacaacaacaccccttctctagtattaatcagccctagtattaatcagcgtgtaattcaatgaatttgtagatctgtagatttctaattgcagttatctagtgaatttgtgattagaactgggtgattccctgcgtagaagtgtttacaagttctggccccttgctaattctattttacagtgatctagtgaagcgatatgtattgtaattcaatgaatttgtgggctatgctaaactgtgttattagaactaggtatgaagcagaatagcgtcctctgtcggcctcgtcaagttttaaaatgtaacatgctagcagctcctacgatggaggacacagatggccttgttatggaccagtgccgctcactcgctgtcccgagtgcgaacggttggagccgctcgtgaggcttagatcgaagaggtcagagaacagcaattttggccgagagtttgtcaagtgtaaaagcaagccatgccctgtgaaggctcttagaaagtgcagctttttcatgtggttggatgactacatcaatatgatcgaaggggcaaagttgatgggcgatctagagaagatgatggcatccaaatttgggacagatgtcactgcaaactcagatgtgttagctgaattgaagaaaatgaatgacaacatgtgcaaaattattgatctgaaactgaaacacaattatatgcttggaatcttttatgttggaatgattcttattgcc

SEQ ID NO: 102055 - DNA, 322 bp, Zea mays
  unsure (1)..(322): unsure at all n locations
  Clone ID: MRT4577_24582C.1
cccgaacgaaagtttggaattcggcttgagcgtttcgaggagttggtgngtcgccgcagaagctccggcgaggagggttgcttatattgagagcgtgatttctcctttccatgccggcttgagctccccgcggcagcaatggaaacccttctctccccctccacatcgctcacgctaccaccccgtggatccagcaggagaccgactctggctgatagcgtctcgaccaggccccaccgtgtcctgctccagcgcgcttcaagaggccacaggccggcgccgtcgctgcctcccccccatggagacggcgtgggcaagcaaa

SEQ ID NO: 102056 - DNA, 249 bp, Zea mays
  Clone ID: MRT4577_24583C.1
ctcagaccgtgctctgtcggaccgagacatttggacatcctggggagtgctcgcaaatctcagctgttgctgaggaatgggctgggaccccttcccatcccaaccttgagccccaggagataccgcgcccacacccaatcttgggacactccctatctggttggaagagagtaaccagtttccagagagccagagagtgagagagagaaagagagtgagacagatagagaaagagagagaaagatgctg

SEQ ID NO: 102057 - DNA, 386 bp, Zea mays
  unsure (1)..(386): unsure at all n locations
  Clone ID: MRT4577_24584C.1
gccttccggttcgcgctttttctctctctaccaccgctctctctctccctctctctctcaactctctgaagccaccgtggagcggcaggatgccggcgtggtggaagagcaagggcaggagcaagtctagcaaggcggccggagcggcggcggcggcggcggcggcggacgaatcgatcgcggcggccgctgccatcggcgatgtgaaggaggagaaggggaagaagaaggcgagcagcttcgacgaggcgctcctcgccaagggcgtccgcgggaagcagcagcatgcgccggcggcggcggcggcggcgggggagggtatggggctcccgctccttttccgcgcccggcgtccttgncgacgccgctgccgtccgcgtccgcgt

SEQ ID NO: 102058 - DNA, 569 bp, Zea mays
  unsure (1)..(569): unsure at all n locations
  Clone ID: MRT4577_24585C.1
aacttgaactttttttaattattttttcaaccaaaagccgaaaattggggttggggttaccccccggggtttttctaaggggaacagggtgtccttaattctactccccccaaaggggacggctttttaaaacttgacggcgcgggggaatcccatgccaaccttgggggcctatgaatctttaccccctgtttggaacaagggggggtgtttcttcacccaatttttccaaaaggggtttttttctccccacccccttttaatctaaagaaattttctttctctttttgagaggcggaggggggtctccccagctccctttgttgggggtttttaaaaaaaaccgtttttgcccctggggacccccctattttttttttttttggcaatagaaaaagaaggggggccctttgttggggtttggcctggtcccccgtccttttttttaaaaaaaaaatattctcgccccccccccccaagantgcgcattttttatttatttctcccgcgggggccccctgggaaataaatatttttcctctgaaatttttgagtgggggggttttttt

SEQ ID NO: 102059 - DNA, 269 bp, Zea mays
  Clone ID: MRT4577_24586C.1
gctacggcggcggtggatgaggaggtggtggtgggtatggcggtggcacaaggacctaaaactaggtgccgtagcaatacaagctacacacgctgttacaattgcgacggcgcctaaaactactgaaagagctaatcgggcgcattcatatacagcatcacatcaattctcagtatcctactgtcattctgatacatatacagcagctcaaatgatatcaagctgcaaacactgctcttatcactgagcaagattgataatgactgata

SEQ ID NO: 102060 - DNA, 325 bp, Zea mays
  Clone ID: MRT4577_24587C.1
ggcccaagggcttttcgggtttcccccggggaaacaccccaagggatgccaatggggaagggtccaatgttagccctcctgtttttccacccccctggttggaaggctcagtcattggtcaaacccacaaacattttttccccccccccccaacctgttttcccccccacttttttttatggggtgtatgccctgccctgccggcttttaaactttgaacccaatatttgcggggcgcccgggttccttaaccccattgggccctctaataaccggcccggggggaaccggttgggcttcttctcttccattaccttgaaacccg

SEQ ID NO: 102061 - DNA, 795 bp, Zea mays
  Clone ID: MRT4577_24588C.1
taccctgcttccctcccttgttcgtccatctgtcacaatggtcacacgacggctcccaaaccctaaacagcacatcgctcctcctcccctacgcttcagcctcgactcagtattcccccttccccgcttcgacaagtctcgtcccccgccccttattccattacgagcaactccgccggcgccaccgctgctggtgggacgggctgccaccgccgctgctggtgggacctaccgcctcgcgctccgcatccagcgccgcctcatcccgcccaaccaccccaggatccgggacttcgtctacaggtactgccttcgccgagccccgctgtcgtgcgtccgtgctcaggacgctgtcggtcactgccagccaaacaggattagcgcgagcagccagtgcaggcacatctcctactcctacgccccgttcccgtcggtcactgccaggaggaagggtgtcttccgcgaggacattgcgcagctaatggttggatcaacattattcaaaattctgcccctgacgtctgatatgtggacagttgccattccagttttactctatcatcaacagtggaagttcttgagatgccaaaaaagcagggaagtgcggacataacagtcaagatgagctacttaaaagtgaggataattcaaaggagcgtggtatcccgagaatatgaacactccagagatgcaatatttgagtggtacttccaaacagtggccactaaccatcatggtgaggatgcatcatcagtagcagtgcagaattatttcggtgtttttgatggcatatgg

SEQ ID NO: 102062 - DNA, 824 bp, Zea mays
  unsure (1)..(824): unsure at all n locations
  Clone ID: MRT4577_24589C.1
cggatattttgaaatagattactgttataggtttaattctatacacatttaacctgtcatctatcgatgttgtttggtctaccaattaatacacaattgtatatttgaggttttatttcagtggcctaattttccttattattttgtaaaaaaatgggtaaactgtatatatgttataattctagattatccttacgtaatgcgtcattattttacaattacatttacttcactatatttatgtacttcacatgttttaggttatcctcatttccgttttgttggtcgaagcacttggagcaatacctctaggactcagtgtctgcatcagccagccacaaggttataaatgcatagtcactatttcacgactcatacaagatagcaaatagtggttcccagcttgcaccaaatgcaagaagtcttcacctcaaatttccactggatatcgttgtacatcgtgtggctgtacagacataaaattcagctataaactcagcttcattgccactgatggaacatgcgaagctgagttcttctgtttcgacaccatagccaaacgaatagtaggaaaaccatgtgacactcttgttacaacaactagaacttctcagggttttctccaccaaatctagccgccattgtatctttgaaatttacctttgcagtcacccttaacatgtcgtcattctcaatgacaaatagagtcttctctatcctatatgtggnaacaaatcatggaagacaaacaacctcaataccatctaccatgctgaattaccccccattacagctactaacacaagacgacgtattcgaaccct

SEQ ID NO: 102063 - DNA, 590 bp, Zea mays
  Clone ID: MRT4577_2458C.1
gtctacctcacatagagagagatagtcgattatgaagggtggcaagaaggaagtggccggcgcggtggcgtccatactgctggttctgcagctcatggcagctccaccgacggacatggccgcccgctcgccgcgcggagccgtgccggatggctccctcgccacgacgaccaaggagacgatgctgtcctgacacgactgtgctacacgagggtagacatgcaaatacactccctgcttcactcctgcttgctcctgcagctttagagatcgcctctgatacatcatatttactcctggtgcttgagttgagggcattccgcgaagccacaactcttacatgcatgcgccggccgacgacgacaacactgcctctcgtgagcttctgttctagagatgcatgattcaaggcatccatggatgctttacgtatatgcgtattacttacccgtgtcacgtaaccggagagaaggctgtgtcgatttatttacgtcttctggcgatcaaataaaggggaaatatatgttgtatgtgtgaaatgcatagaattgtattgctcagaacatctaaacataaaggtccctacggtc

SEQ ID NO: 102064 - DNA, 321 bp, Zea mays
  Clone ID: MRT4577_24590C.1
ggtccatccacgcgatccgataacacaataacagtaaaaaaagtcaaataaataaatcaaatgtattgcaatgaatttcgctcaaataagtcaggcagtagctcaacgtgattacaaatgtatcctgctgctagagtatcattgggactcacatcgcgggacttaacttgaaatcaccgggcttgggattgccgggccctcaaggggatcaaccggtatttacccaaggaagccaccttaaagcagttctatattgtaaaagctggtgtatttacgacttgtcctttttggatcacctttccgagaaaatgctagggttaa

SEQ ID NO: 102065 - DNA, 412 bp, Zea mays
  unsure (1)..(412): unsure at all n locations
  Clone ID: MRT4577_24591C.1
gagcggncgncctnnnnttttttttttgttttaatatcaagatcaatatatacaataactcagggggtatagactaatgtcataatctttattacataacaaaaatgtcttacaaaataacaaataataagtaaatcgaactaagataattattcatcgacgccagcagctgactcggagacgacacctacatctcgtcgtagtaattctcttccggtggtacctcctcttcaccttcagcgagctcctactcggaatcttcaacctgctgtgctccaggctcctcggtcacttgctcgttaaagatggaggtgtttagatgcatagccgcggcgcaaggcggattctttggcggagattcacgccggtgaggaattctgggcactctgattgaccatgcgcccgacggttc

SEQ ID NO: 102066 - DNA, 755 bp, Zea mays
  unsure (1)..(755): unsure at all n locations
  Clone ID: MRT4577_24592C.1
attataattgcaaaaatctcgttccaaccagacagaatttatgtactttcgtacatgtgactatcttatatgttcattcccctggtcctctgtccttcaaaactgcagggataagaaacccccgcccccgacatnctttgagaaacagcttctgtagccgccacgtgttctcattttctgctatcaaaatgcaaaagacctctagccaaacgttgaactacaaaggtgatatgcgatggtaggccatgcttgccagtgaactatgcttcaggccatagaagatgtatatgagggccccagccaccagccatatggaaacacgaatccacgtgtgactcccgacgttcataagcaggtataagttgaccataatgcaacagactggaagaaatgggaccaacgggcacatgaaacctccagtttgtcccaagaacttcttgtcttgtccaatgcacaaaagcacaatagaagaacccaacactgccagcccgcctacagtgcatgcgatcctttgcacataaaatggcaaaaaggagacagaaaccgcacaaatcaagatgatggctccaacgcatatcaacactatgcttccaatggctttctgtcgccttacttctctggctacctcactgacatcaagcgcttcttgaacattgctaaaaggatcttctgaattttgctcatcatgctctaagtgcccagagaatgaagctactgcaagggccacttccattggcatctcatacggaggagca

SEQ ID NO: 102067 - DNA, 311 bp, Zea mays
  Clone ID: MRT4577_24593C.1
gctagccgccggtctattgctctgatagcttgctccaggacgtacgtacgtacgtagggcgatgcatcgatcgctagctagctgactgaccatggcgtccatgtgctctgccgccatcaccgcccgttccttcacggccgggcccgctcgtgcagtggtcaccacgaggtcctttaccgcgcgtgcctctctacgcaaggccactgccaccgccgctacggccgatgccgacagcgtactgcttgccggtcgcggcgccatggcccaggaggagctgctgggcagcaacgacggctgactagtcttcgagc

SEQ ID NO: 102068 - DNA, 712 bp, Zea mays
  Clone ID: MRT4577_24594C.1
ctccgaggtccttggccgggccgggaagccgccattactcgctgtgtaggattcacacaggagaccttcgaagtcccttcgggcacgcgtgctcgcctagagatgaccaacacactggttccatcttgagcttctgtgcgctttttgcgctcgcaacacatgccgatattatcccacagagctacactaggtacaatctgcatcacttacacaggttctcgcaccagtcactttattgggcttgggcgcccgattggaaaggctatagagtacaagcaacgcatgcttggcatgcgcgttacatcaaccagtttcccagaccgccacaacaatctttggcatatgtaatagtataccaccagtcaggaactggaacacgcacacacactgtacactaccggccgtgagccacctatgcatggtgaaccgtggcggctactcaaaacaatggtctcttgcatcaaaccgagttgctctggcatacatatgatcaaaacagccacagcaccatttgagataggttagtaggggcagctcactcaactatccatggtgaacccatgacgtctacctacaagagcaccacgtgctttcatctatccaggtagctgtggacaatgctcctagatacctggaacaacctttgtatgagcagaggtgtaccagatctgactcatgtggctggggcacaccctggtgactacttgtaaca

SEQ ID NO: 102069 - DNA, 924 bp, Zea mays
  Clone ID: MRT4577_24595C.1
ttgggtacctcgaggccggccgggtggccgaaccgaacgggtggataacaaagggatagaggagcgcggccgggagaggcagagcgcaagagccatcgtcctcgcctcaccgagcctcaccccgtacctagcgcagcgaagccggcacaatgccagccgccgccgtagcctcccctctcctcctctcgctctcctcgtcctcctccctcttcctctcttcctcatccacctcctttttcccaccctcctccgctgccgtcgctccacacgccgccgtcaggacgaaggcggccgtctccgtcctccgcgcgctgcgcgccgaggcggccaccctccccgtgctctcattcaccggagagaaggtcggggaggtaaccctcgacctcaaatccgcgccaccctccaccgcgcgcgctgtcgtgcaccgcgctatcatcaccgaccgccagaacgcgcgccgaggcacggcctccacgctcacccgcggcgaggtcagaggcggagggaggaagccctatcagcagaagaagacggggaaggcgcggcgggggtcgcagcgtaccccgcttcgtcccggcggtggcgtcgtgttcggccccaagccccgcgactggtccatcaagatcaaccgcaaggagaagcgccttgccatctccactgccatcgtgagcgccgccaaggacgccttcgttgtcgaggagttcgaggaggccttcgcgtcggggcccaagaccagggatttcgtggccgctttgcagcggtgggggcttgacccgaagcagaaagccatgttctttgccacggacttcgacgacaatgtgcggctcagcggcaggaacattggttccctcaagatgctcacacccaggacgctgaacctgtacgacatactcgacgcacgcaagctctttcttactcctgctg

SEQ ID NO: 102070 - DNA, 303 bp, Zea mays
  unsure (1)..(303): unsure at all n locations
  Clone ID: MRT4577_24596C.1
ctttatttagttgttctctgtgggtgggtttttagagcaccaagaagcccattttttccttaagattaacttagaataaagcctgacgggggtaacagcattcatcgaaccgcagtccatgcttcttgncgcatggttctgttgtaactgagaagaactcacttctaacaacattcatttatggaccgtgcaattcaaaaactcagatgggcatcatcaaacactacatgaaccaagattaaccttttggattagggaaaacatcacggtggtgaacgggatatcttggcttggggggcccca

SEQ ID NO: 102071 - DNA, 468 bp, Zea mays
  Clone ID: MRT4577_24597C.1
gggtacctcgaggccggccgggcctggattccggccgccgaccgccgctggttttctttcttctcgcccaagccgcgccgccggcgcggtcctttgtaaaggcctagcggcacgggagcgggctgcgctccctctctctggattaggcaaagcatcctcctgtttggatcggcatggacaagacgacgaccacaccactgccggactgaacaaagctcaccgctaccgccctggaactgttgccctccgtgagatccgcaagtatcagaagagcactgagctgctgatcaggaagctgcccttccagaggctcgtcagggaaattgcacaggacttcaaaactgatttgcgtttccagagctcatgcggcgcttgccctccaggaggctgctgaggcataccttgttggactgcctgaggacccccacctgagagccatccatgatcaacgtgtgaccatcatgcccc

SEQ ID NO: 102072 - DNA, 1400 bp, Zea mays
  Clone ID: MRT4577_24598C.1
aggccggccgggctgcgagagcaagagccatcgtcctcgcctcttcgaggaggccggccggggaacgggtggataacaaagggatagagaagcggcagctgcagcggcagagcgtcagagccatcgtcctcgcctcaccccgtagtcccgtacctagcgcagcgaagccggcacaatgccagccgccgccgtagcctcccctctcctcctctcgctctcctcgtcctcctcccatttcctctcttcctcatccacctcctttttcccaccctcctccgctgccgtcgctccacacgccgccgtcaggacgaaggcggctgtctccgtcctccgcgcgctgcgcgccgaggcggccaccctccccgtgctctcattcaccggagagaaggtcggggaggtaaccctcgacctcaaatccgcgccaccctccaccgcgcgcgctgtcgtgcaccgcgctatcatcaccgaccgccagaacgcgcgccgaggcacggcctccacgctcacccgcgggcgaggtcagaggcggagggaggaagccctatcagcagaagaagacggggaaggcgcggcgggggtcgcagcgtaccccgcttcgtcccggcggtggcgtcgtgttcggccccaagccccgcgactggtccatcaagatcaaccgcaaggagaagcgccttgccatctccactgccatcgtgagcgccgccaaggacgccttcgttgtcgaggagttcgaggaggccttcgcgtcggggcccaagaccagggatttcgtggccgctttgcagcggtgggggcttgacccgaagcagaaagccatgttctttgccacggacttcgacgacaatgtgcggctcagcggcaggaacattggttccctcaagatgctcacacccaggacgctgaacctgtacgacatactcgacgcacgcaagctcttctttactcctgctgctgtagactacctcaactccaggtacggagccagtgtttccgatgactactatactgatgacgaggatgatggcgaggaggaactggtcgagcaagaagcagaagaaggcaccacagcagatgctgctccagatgcaactgaagagggcgaggcagacagcagctcctaggcgggaagtgtagatttgttgtttcgtttttgttatgttaccctcaggtgaggatggtggggaattctttcctaacggggagaccttttgtctgcttttattgtaagttgattatgttctcttactgaagcagtatactagatttccaaacctcacataagagcatgttttcaaatacatcatccgttgtcgaccactgcatataaagtgttctttcatctacgctgcaatggtgaagaacagcggacaattatcctggaaaaaaaaaaaaaagcggcc

SEQ ID NO: 102073 - DNA, 555 bp, Zea mays
  Clone ID: MRT4577_24599C.1
attaggactgtctacggatctgagtgagcatctctcgggcggaatcgccgagccgacgcagcttcgccaccaactccgcggcgttcgacgccgggcaccgccgtgcgcacggcagcgaacttcctctgctcgcactgatgctgccgctacacatcctcctgcgctccttcgacgaaccgctcgaaccaccatggtggccgcggcgttcgacgtcggccaccaccgtgcgcagggcggcgactgcccgtgctccaccttcggcccagcggacactggcagacaacgacgacatcacgcccttctatgttgttgcctcctccggcggacgtactcctgcgctccttctccgacgaaccatggcgctcgaccaccgatatgaagacaacaactctcctgttcgacgaaatgtctccaaagcaaaatagagatcaactatgttttttttgtccaataagagtttatgttacaaaacatacttagatagcattttcttcggaaaagaaagattaccaatgtcgattacataatgtaattattttcaccagtccataatcc

SEQ ID NO: 102074 - DNA, 570 bp, Zea mays
  Clone ID: MRT4577_2459C.1
cctcgaggccggccgggccgggataaccatcatatagagagagcatagtcgatcatgaagggtggcaagaaggaagtggccggcgcgctggtggccatactgctggttctgcagctcatggcagctccaccgacggccatgggcgcccgctcgccgcgcggagccgtgacggatggatccctcgccacgacgcccaaggtgacgatgcatggccgccacgcatgtgctacacgggtggagacatgcaagatacactccctgcttcactcctgcttgctcctgcagctttagcagatcgcctctgctacatcgatatttactcctgactgcttgagttgaggccattccgcgaagccacaactctgtacatgcatgcggcggccgacgacaactacgctggctctcgcgagcttctgatcaagtgatggatgattcaagggatccatggatgctttacgcatatgcgtattaaatagccgaggcaaggaaccggacagaacggggtggtgtcatatatacggcctctggcggtccaataaaggggaaatatatgctgcatgagtgcaaaaa

SEQ ID NO: 102075 - DNA, 325 bp, Zea mays
  Clone ID: MRT4577_245C.1
ttgtctcgtgggcggacgcgcgggcggacgcgtgggctgacgcgtggggtccataggccggcctcctctcttaccttcccacaccccttctggaccgtacgtaggctagatgtgcttggtagccaaccagacggtgggccgccgatgatgggaggaagaacagtggccccgacgctcgtgctcgcgctggtgaccataatcgtcatcgtggtggccgagggggacgaggccaagtgtggctgggtgctctccctgcggcggagatgactgtccggtgctggacccgtagccgccctcgtcgccagactactactacagtctttta

SEQ ID NO: 102076 - DNA, 302 bp, Zea mays
  unsure (1)..(302): unsure at all n locations
  Clone ID: MRT4577_24600C.1
gaacagcacnagcannggccnnggggaaagaaccgggacannccncccnganngagggnnncaccgccggnggnnncanggacggggggggcgcgggagncccaccacangagaacgaccagaaaacaacccncaagagcncaggagcncagcngacccccccggcaanggggaggcngggcgcncnaggcannncncngggggaanaancngaanccccannncaccacnngcagcgnnagggccaaccgcaggnaccccaagncgannnaaggcncnagcagcnccagaccagaagcagg

SEQ ID NO: 102077 - DNA, 231 bp, Zea mays
  Clone ID: MRT4577_24601C.1
gtacaggacgttcagcgcgctgctgcccgaggggggctggaccggcaaggtgctgtacgtcaagctcgtgctcgtcctcctcatgtgcggctccttcatgggcctcctcaactcgccgtccatccacctcgccgacgaacgccaccaccacgcgcagactgcagaggcgtggaatgcgagctggacgtcgcaccccgacgcggcgaactccgggtacgcgtcgagcctgag

SEQ ID NO: 102078 - DNA, 717 bp, Zea mays
  unsure (1)..(717): unsure at all n locations
  Clone ID: MRT4577_24602C.1
gggaccctgggccggccgggtccctcgcccaccacttccagtatggatgccacccgctacatcctggagttcctggtgctgctgcttctgctcctcctcccgaccattgcgggcgcatcctccgacaccaagcacctcatcgccgtccggtccgccctccgcgaccccaccggcgcgctcgccggctgggacgctgccaacagacgtagctcgccatgccgctgggcgcacgtgtcgtgcgccaacaactccgcgcccgcggcggccgtcgctgggatcgacctgtacaatctcaccctcgccggcgccttcccaaccgcgctctgctccttgcggtccctggagcacctcgacctctccgcgaacctactcgagggcccgctgccggcctgcgtcgcggcgctcccggcgctcaggcacctcaacctcgccgggaacaacttctccggccatgtcccgcgctcgtggggcgccgggttccggtcccttgctgtgctgaaccttgtccagaacgcgctgtcaggcgagtttccggcgttcttggccaacctcaccggcctncgggagctccaactcgcctacaaccccttcgccccgtcgccattaccggcggacatgctcgtcaacctggccaacctccgcgtgctggtcgtcgccaactgctccctcaccggtaccatcccctcttncatcgggaagctgaagaatctcgtcaat

SEQ ID NO: 102079 - DNA, 767 bp, Zea mays
  Clone ID: MRT4577_24603C.1
ggataaatacagcaatcatacttcgccttgttttaagtttggagcaactgaccaaagtaccaacctaagtacatgacttgtcaaaccaatcgccaggtcacactgacgtggtaatgccttaggctatctccaacacatcctcatattcaaactccactccgtgaacaatgcatgcagtgaactgctggtgtcttggttgtgcaacctgtattttcagacagtatgacggcctaagaacactggaaccctgaaacaatcctgaatccttagatgaccaagtttctgctgcaattccgcacgccacacatgcctttttccttcttccccgcaatctgcacccattgtgtttctgaatttatggtggagaggatgatggaatggcggcctctgagtggtcagttcaggaaaagctttcacagacattagactgtctttcccagggttaactatctctgtatcgttcattggcgtttcgtcttttgattgctaataagttcttcttgtgtttcagctgtgtgcgatggagcttgggaaacacaagataagggttaacgccgcctgccgcggcctgcatctgcaagacaagttccccgtgtccgtgggcaaggagaaggcggagaaggcaacggcggaggtgatgcccctgcggagatggctggatccggagaaggacctggcgtcgacggtgctgtaccttgtcggcgacgagtcccggtacatgacgggcacaacaatattcgtggacggtgctcagtcccggacgctgg

SEQ ID NO: 102080 - DNA, 1343 bp, Zea mays
  Clone ID: MRT4577_24604C.1
gatctcacatggcagaaatggacctataaggttggtctgaaaggtgaggctttgagtcttcattcacttagtggcagctcttcagtagagtggggagaacctgttcagaagcagcctctgtcatggtacaaggctttcttcaatgcacctgatggtgatgagccattagctttggatatgagtagcatgggtaaaggtcaaatctggataaatggacaaggtattggaaggtactggcctggctacaaagcttctggaacctgtgggatctgtgattaccgtggagagtatgatgaaaagaagtgccaaaccaactgtggtgactcttctcagagatggtaccatgttcctcgttcatggcttaatccgacggggaaccttttggtgatatttgaggagtggggcggtgatcctaccggaatttcgatggtgaaaagaatagcagggagtatctgcgctgatgtctccgaatggcagccatcgatggcaaactggcgaacaaaaggctatgagaaagccaaggtccacctccagtgtgatcatggacggaaaatgactcacataaaatttgccagctttggcacaccacagggctcctgcgggagctactctgaaggcagttgccatgcacacaagtcatacgacatattttggaagagctgcattggtcaagagcgctgtggggtaagcgtggttccagatgcatttggtggagatccatgccctgggactatgaaaagagccgttgttgaggctatatgcggctgagtcatatgatccatataacgtactggtttctacaataatgttaccctatatcaagctggcaagaggtgaaagtggcggcaactgcgacacacggattgccagggtttacaggaattagttgtatgttagatttaagcatcgtatgtgtatgtaacttaggtcacatgagacttgcatggaagaagtggttaggaccctagctgtgagaaactaagtcttgtagctctctacacagtagaattggtctggcaggtgagggtgcagatgagactctgctttattacctgagtccatgtgcgcggtggctcttgggttggagattgccaaaaggccagcaattggctttgcattatctggtcattcatttttttggtcattggagggtgcaatgtaaatgttcagggtcaatcatttatgaatttttctagctagtaatgaaacagtaaagaaaatgttggttcagattataaaacaccagttatcttcctctccaaaaaaaaaaaaaaaaaaaaaaaaaaaaaaaaaataaaaaaaaaaaaaaaaaaaaaaaaaaaaaagcacctgcccgggcggcc

SEQ ID NO: 102081 - DNA, 334 bp, Zea mays
  unsure (1)..(334): unsure at all n locations
  Clone ID: MRT4577_24605C.1
gccgggagccgcggccttctacataagacccacgcagngcaccttctcttctccgccgcgtcgccgccgttttccccacaaaatatatggcctctgcgggtgtacttggaagccgctacggagaggagcggcgtgatctcggcaccgagttccccgagaagatgcccgctgtctggagctgaaccctcagtcccactacctgagcttacagcagcggcgagttaatcgctaaaacgacgacgacgagcacccttacctcctgtacggtatacaagccaacctgcagcgcgagcgacagctaccagctgctggactttttttttttttccccccc

SEQ ID NO: 102082 - DNA, 800 bp, Zea mays
  unsure (1)..(800): unsure at all n locations
  Clone ID: MRT4577_24606C.1
tttctttccgaataacctgcgcgctccctccgacttccagcggtgcgcagtggcctttctttgtggcttccagcggctgtgactgggcgagcgccgacgctgctctactacagctgcccaggtcttcgtcgggcactttgccagcgacgtgcaccaaccagggtagaattttctgcaaaaccacaaaatggctcaggccgcaaggctgaatctgagaatgcagaaagagattaagcttctattggatgatccaccccatggggtttctcttaatctttctgaagacaaaaatgtcttgtcatcgttatcaagtatcgaagccaaaattgaaggacccgagggaacagtttatgccaagggagttttcattttgaagatacaaattcctgaaaggtacccttttcaaccaccgaatgtgacttttgttactcccatttatcatcccaatattgacaatggaggacgcatttgccttgatattctcaatttgcccccaaagagccgagaatacaaatacaatagacaagtatttgacacaactgctcagttatggacagataagtatgctagttctgctgctgttggtgctagcggttggtgttctgtagatgctgatgtcctggcacagaatacacagatggaggacacaaataacctgggatcactgccaaatgtttctaaaaaagtttgtgaaggaatcaaaggaagatgcggttactgggacaaagttatcactaaagtatngaagatctgaagagagtatgaaaactggtcagcaaagaccagntgctagctaccta

SEQ ID NO: 102083 - DNA, 858 bp, Zea mays
  unsure (1)..(858): unsure at all n locations
  Clone ID: MRT4577_24607C.1
ccgaataacctgcgcgctccctccgacttccagcggtgcgcggtggcctttctttctggcttccagcggctgtgactgggcgagcgccgacgctgctctactacagctgcccaggtcttcgtcgggcactttgccagcgacgtgcaccaaccagggtagaattttctgcaaaaccacaaaatggctcaggccgcaagactgaatctgagaatgcagaaagagattaagcttctactggatgatccaccccatggggtttctcttaatctttctgaagacaaaaatgtcttgtcatcgttatcaagtattgaagccaaaattgaaggacccgagggaacagtttatgccaagggagttttcattttgaagatacaaattcctgaaaggtacccttttcaacccccgaatgtgacttttgttactcccatttatcatcccaatattgacaatggaggacgcatttgccttgatattctcaatttgcccccaaagggagcctggcaaccatcactcaacattgctactgtgttgacaagtattggcttgctgctaagtgagccaaacccggatgatgggttgatggctgaaataagtcgagaatacaaatacaatagacaagtatttgacacaactgctcagttatggacagataagtatgctagtcctgctgctgttggtgctagcggttggtgttctgaagatgctgatgtcctggcacagaatacacagatggaggacacaaataacctgggatcactgccaaatgtttctaaaaaagtttgtgaagggaatcanaggaagatgcggttactggggananagttatcactaaagtatgaaagatctgaagagagtatg

SEQ ID NO: 102084 - DNA, 352 bp, Zea mays
  unsure (1)..(352): unsure at all n locations
  Clone ID: MRT4577_24608C.1
gacgccgccgnacgccgcgcagcaagaggcgggggggccggcgacgacggcggaggacgcggngggggacacggcganccgagacagggcccggancccgcacnccgaggaaaaggaccgcagcggcgngccccgcnacagaggcaccaagcgcaagcgcnccccggcgaccncacgggcacccgaccgggggggggnaaggaagggcaggnggacaacagggcgaggaaccngaggaccaacgcacagnacaacccggccaaggcnnacaaggcacgcaaggagaaaaacaccaacgaggaaaaggganaaccaganggagcaaaggaagacgcgcaggaggcagaggcag

SEQ ID NO: 102085 - DNA, 795 bp, Zea mays
  Clone ID: MRT4577_24609C.1
cagagcacgcaatctactagacgtgaaactgaatggcttcacacttggtaacgctagcctacatgagaggccaggcggaggcacagctgaccatggacatggatcaatccgaaccgagctgcacttgccattttgtgcgcagtgtgagcaccatcttctgcccttctacggagtagttcacattgggtacttggacaaaggaagtggagaaggcatcatcgaccggtcgcattttcaggcactggttcatttctatgggtgcaggcttcaggttcaagaaaggatgacgaggcagatagccgaagcagttcattcggtttcacacaacggggccatggtcgttgtcgaggccagccacatgtgcatgatctcaaggggggtagagaaaataaggagcaacacggcgacagttgcggtcttgggccactttttgaccgacccttctgccaaggcacgcttcctgcagaatgttttgcgtacagctggttctgcggtttgaatcgtatgacttagcaaaggaaaaaaaagtgtgtaccattactgtccagcaatggcaatttttttttgcgtatttactggtctagcatgatttttttcgggtgcaaatttgtcacctgtggggctgtaccgaggatgtcccccccaccccccaaaagggttttggttctctcgtgttgtaccatgtcccttgtaaggcccttcaaataaaaaagaaatagtaatagtttcaactgtgccaagaaaaaaaaaaaaaaaaaaaaaaaaaaaaaaaaaaaaaaaaaaaaacaaccccac

SEQ ID NO: 102086 - DNA, 494 bp, Zea mays
  Clone ID: MRT4577_2460C.1
atcccatctatagagagagcatagtctatcatgaagggtggcaagaaggaagtggccggtgcggtggtggccatactgctggttctgcagctcatggcagctccaccgacgggcatggacgcccgctcgccgcgcggagccgtgccggatggatccctcgccacgacgcccaaggtgacgatgctgtcgggcacgctgtgctactcgtgggagacatgcaaattacactccctgcttcactcctgcttagctcctggaggtttactgatcgactctgctactccatatttactcctggagcttgagtggatgccattactctaaggcctcactgttacatgcatgcgccgtccaacgacaaaaacgctgcctctcgtgagcttctgttcaagggatgcatgtttcaaggcatccatggatgctttacgtatatgcgtattaattagccgtgtcagggaaccggacagaagggggtgttgtcttattaacatctt

SEQ ID NO: 102087 - DNA, 226 bp, Zea mays
  Clone ID: MRT4577_24610C.1
cccacgcgtgcggtcttatgtgacatatctatccttggtatctagtacaagtgtttcggttggcgtgatggctcaattaacgtgtgctagtacgatgcatctagcagtacactgcagaagctcgaggttgacagaaccaacgcgttgaactgcgctttgaccatggtattctacgagctgcacggtcacgacagatgcgatatgcagacaacttgttgtgagcaca

SEQ ID NO: 102088 - DNA, 315 bp, Zea mays
  Clone ID: MRT4577_24611C.1
gatttacgggtgttcatgccgggccagacataactaaagggaacaggtgaatggatgatcatcaacacacttactaggactcctcgcggagttacacatgaaacgccgtctgaaatatagacatactttgttgagcctagccgttattgttatcaccgacaactacaagctctcaaagctgtcactgggaaaaaacattcttggacctatgtacttcacgacaggcgtgtctgctacttccggtaatcttgatatacatgagcacgtcaataataacaaatacatcgtttggattactgctgagagcgaccgatt

SEQ ID NO: 102089 - DNA, 1285 bp, Zea mays
  unsure (1)..(1285): unsure at all n locations
  Clone ID: MRT4577_24612C.1
aatgctgtcaccgcgcggtgatcgcgcccccatccctcgtctccctcctctaccattccccgcaacatcgcttggagaggaagataaaggaggatgggaggaaaggggtggtgcccgacgcgcttgccctcctgcaccgccgcctatcacttcctcccagtcgccttcttccctcgctcttccctccaccattccgcagcccgccgctggagccagcccgcccatagcctcgtgcccccctccgcatcctgtcgctggagcccagtcaggtcacggcctcgtgccccaatccgcctccgacagggaccagaacggcatgaagacgaagaccccaacgcctccgcctgcatgtttgtaaaggggcaaaagccacaaaacccatctaatttcgattcgattcgcctgtggtgctcgcaacggagggaatggcgaacggcgacggcgcggcggcgacggggacctgtcaaagcacatgggccacgtcgccacaaccgggcgattctggtcaaggccgatctctctcgctagcgaagcggcaacgcacgccactcgacccaccccacccgccgtctccactgctagggcttggcctgtccaaggccaccatggagccaccacaagccaccgttcgctgcagcacatcaggcgccttcaccgtctcagggttgggctcgcccagggccaccatggatccactgcatgccgtcgtcttcgctgcagcacagcaggtgccctcgccaccggtcggcccccgcgtcttccagctctcgtacgacacgtgtgggttcgaccagggatgggtcttctactggggcaccaccgactggtccgctcagcagatctgggccgtcgccaactgcctcaacctcatccgacccatcatcgagcagccggagtaacctcttctctagacacaaggtacatcaaactttttaggtaccgtaatttggacatctctccgcctggattagagcctgatcggggtttaacatggcagatggccaaaagaagagtctacgggagctaaacaaatgggtttaatgctaatcctgcacgaggacatctctttatttttggatgtcactcacagttaataagaggaagagaagtttactgaaattggtgcccnnaaaaaaaaaaaaaaaanaaaanaaaaaaaaaaaaaaaaaaaaaaaaanaaaaaaaaaanaaaanaaaaaaaaaannaaaanaaaaaaaaaaagggggcggcctttttaaggaaccaaatttttttcccccgggattggaacaaaaaatttttttt

SEQ ID NO: 102090 - DNA, 632 bp, Zea mays
  Clone ID: MRT4577_24613C.1
gtatacgcccaaaacaaaaacccaataaaaatctcgcctcacctctcgcagtccagccaaccccgtcgcccaccccaatctccacgcgtcgccgccgcttgccggcgagtctattcccctccgtcacgccgccgaggctacccggaccccgcagcggttcggataagactgccgcccgccgtccgccacctgccacccgccctcctttgactcccactactctcggccccgggaccgcttcggcctggatctagggttgtgtggggaggggttctggaagccttggccgcgatgggcgagtcagacgatgacgcccgcaccttcaaggtcgttttcaccaccaccggagaggagcagttccgggagctcgtgagggagaagctgcgcggattcaggaggggtctggacgacaccctcgtggtacgatttacttctctcaccccggctcgctagattctggtcttagcacttgatttcggttgtttggggacttgggttctctgcagctgtagattctggtcttagcatttagcatttgatttagatggaacttaattggcactccacagtatgtaaaggactagctagaattcaagatggtttgccaagtacgcgactgtggactgtatttt

SEQ ID NO: 102091 - DNA, 213 bp, Zea mays
  Clone ID: MRT4577_24614C.1
gtgagtttggatcctcggccgccctttttttttttttttttttttttttttttttttttttttttgagatgtttttttttttttttttaaaaaatttttatgcatttatacctaattgtttataaacgcgcgcaaggggcccgcttttgacttttgtttattacaaggtttaggtacaaatgtttttctaaaaattggtggtgaaccaagtac

SEQ ID NO: 102092 - DNA, 217 bp, Zea mays
  unsure (1)..(217): unsure at all n locations
  Clone ID: MRT4577_24615C.1
aaaaaaannaagaaaagcacgcgcgcgtacataagctttaatcctctacattccacattctcactatttacttttataccacccaataattactgaccgtttacatataaaaataccagcggtacttataaattaattatatcaccatcttttttaaatcttactcataacttatttcctatataatatatatatcctttcacaattccacacaaca

SEQ ID NO: 102093 - DNA, 502 bp, Zea mays
  Clone ID: MRT4577_24616C.1
aaacccccaagggattctgggtctctcacaaactggaacagaacaaaccatttttacggggagaggggggccccccttgggggccgccccccccgaactgggtttaaaaacggaaagagagggtttaggccggacaggtaaacgggccccgggcttttaaggcgggggggggacgaaaacatgttacacaaaacaaccgggcccatgggggaacatgggaaagggatccttttttgtcagcacaaaagaagggggttttacaacgctttctcgttccaaggggaaggcccaggcgggaacccaaacaaccctcaaatggggggcaaataggggcatcatctatcatggggggcagacaatcctcactgaacccccgcaaatttggaaaaaattaaacgggtaaatcctgaagcacccccaaaacacttggggggggggatattaaattcccattggggactgggatttgatcattccctaaacacggaaaccaaaaatgggg

SEQ ID NO: 102094 - DNA, 814 bp, Zea mays
  unsure (1)..(814): unsure at all n locations
  Clone ID: MRT4577_24617C.1
ccggccgggaatccaatccctacctgctcgggaaccacccgtcgggctcctcccgcccccctcgccgcatctgcatgcggcggggatctccgggctcgctccgtcaccggagccccaatcaccgccacctcatccaagcccccgaatcccccgggcgcgcagcacaaccttgccgcgatcgcgcgcgggaaccgccgctgattgggtcgtgaaagctcgattttgggcgattttgattcggagaacccgccgtcattcgattttggcgcgcgttgcgagccgggatggggttgcagcagtccaaagaggaactgctgtaccagcaggtcaactacggcaacgtcgacgggattcgcacgctccgggggcaaggcgctggtctcgagtggattgacaaggaagggaagacgcccctgatgcttgcctgtatgcgcccggatctgttcgacgtggccaaggtgctgatcgagttgggagctaatgtgaatgcctacaggcctgggtcacactgtgggacagcattgcaccatgctgccaagaaaggacttcagcagactgtccatttactactctcacatggagagggacggctttgtcttttttgtggatggatgagagagaactatgctcctgcttttttggatgcaattgctccacagttcatgacaagaaaaatttgngctgttgttttaccccgtgaagtgcgaactccaacccaggcctctaaagtagagatagctatatatccctgaatacaggcttctaaaccacgttctgtacttaaactatggaaatgtccaattgagcaaccaag

SEQ ID NO: 102095 - DNA, 2223 bp, Zea mays
  unsure (1)..(2223): unsure at all n locations
  Clone ID: MRT4577_24618C.1
cccgggtcgnacccacgncgtccgcgnaccattgcctcgaggccggccgggccgtccccgacccgaagcaccacgcattaaaatctgccccctcctgccactgccagcgaccaatccaatccctacctgcccgggaaccacccgtcgggctcctcccgccctcctcgccgcatctgcatgcggcggggatctccgggctcgctccgtcaccggagccccaatcaccgccacctcatccaagcccccgaatcccccgggcgcgcgcagcacaaccttgccgcgatcgcgcgcgggaaccgccgctgattgggtcgtgaaagctcgattttgggcgattttgattcggagaacccgccgtcattcgattttggcgcgcgttgcgagccgggatggggttgcagcagtccaaagaggaactgctgtaccagcaggtcaactacggcaacgtcgacgggattcgcacgctccgggggcaaggcgctggtctcgagtggattgacaaggaagggaagacgcccctgatgcttgcctgtatgcgtcccgatctgttcgacgtggccaaggtgctgatcgagttgggagctaatgtgaatgcctacaggcctgggtcacactgtgggacagcattgcaccatgctgccaagaaaggacttcagcagactgtccatttactactctcacatggagctaatccgttcataccaaacgatgattgcaatactgccctcgaattggcaagagaaaagggtcatgtgaatgttgtacgtgccatagagggacgactttgtcttttttgcggatggatgagagagaactatgctcctgcttttttggatgcaattgctccacagttcatgacaagaaaaattttgggcttgttgttttaccccgtgaagtgcgaactccaaccaggcctcttaagttagagatagctatatatcctgaattacaggcttctaaaccacgttctgtacttaaactatggaaatgtcaaattgagcaaccaaagcttaatcaggctgacccttccattatcatttttgacaaaggaacaaagactagatacaagatcttaccggcctatgaaggtgacaaacagcagcttcaatggttttataatgcatgttgtggcatggcacaggttttgaacacggctccagtagcaccagcaaatctccctatgccaaatccagcaccggcaatttcatctgtggcgccttcagaacaatctgcacccagcaaggaggatgttgaattagcaatggctatcaatgcctccattcaatcagctattgcagagggagtatcagtgcccaatgttcaaccaaatgcatccacccccaacaacaatggctgggctgcccctccaagtaattctcacaacggatggggaccaccagccactcctgcaccatcaaagacgagcggtcagtcccaggtccgggtagacgccccaagcagcagcacttacaatggatgggatgtgcccggaacaagctctagtcaaagttcatcgaaaccccaccaaacccaaaccaaccctcctccagtcttgattccacaggaagcacttcaggctctcccaaccccaaccgcgccaccatttgctgaagaaaccttctacaacggtcctgttcactatccatccatagactctacgcctgtcgatgtaaccatgccggctaccactggaggcggtagtacaacagtcatcgcaacggcagcacctacagaacagttagaaaatgaagctgatgcaagtgacagcggcaaaactccctctggtacttgcgttatatgtctggatgcccctgtggaaggcgcctgcatcccgtgcggccacatggctggttgcatgtcctgtttgaaggacatagaatccaagaagtggggatgccctatctgccgtgccacgattaaccaggttgttcgcctctatgctgtttgaggagttgaaacggtgggttcagaaagttggcaatggattggagggttctcgcaacaaatgttgatgggaacgtctctatctcaaaattgtgcaattatgctattttgcacttcgtactgcactacaaatatgacttccgtgtaatgtatgtgggctgacgcctttatgtacataggtagtactatacaagacaattttataaaaatctgggtattgttgcaagttgcaactcacgttcaaagttgcacgataaaaaaaaaagcggccacccccga

SEQ ID NO: 102096 - DNA, 261 bp, Zea mays
  Clone ID: MRT4577_24619C.1
ctctcctaatcataagggcacactgggaggtccccgaaggactgatgcctggatggctcctgccggatcaacgaggtaatcgtacgttggatgacaccctacatttctactaccgacaagatcgccgacactatcctcgcattccacgtacgtacggagatatcttccatacgcatcttccgctacatcatatccatagacacgggaccctcgtacctgctcggcgagaagctgcttacagaaccagaccggtttcagcca

SEQ ID NO: 102097 - DNA, 598 bp, Zea mays
  unsure (1)..(598): unsure at all n locations
  Clone ID: MRT4577_2461C.1
ccggccgggccggngactacaggaaccgatctgagagagagagagagcgtatagttcgatcatgaagggcggaaagaaggaagtgtgcggtgcggaggtgctcatactgctggttctgcatttcatggcagctccaccgacgggcatggccgcccgctcgccgtacggagccgtgccggatggttccctcgccacgacgcccaaggccgacgatgctgtcggacacgctgtgctacacggtggagacatggaaatacattggctgcctcactcctgcttgctcctgcaactatagtgatcgactatgctacatcatatttactcctgatgcttgaggccattccgcgaagccacaactcttacatgcatgcgccggccgacgacaacgctgcctctcgtgagcttgtgttcaagagatgcatgatgcaaggcatccatggatgctttatgtatatgatatgcgtattattaattaagcgtgtcaggcaaccgggcatgaagggagggatgttttattctacgtcttctggagatcaaatagaacggaagtatatgttggatgagtggaagaaaaaagaaaaaaaacggccctaaggcc

SEQ ID NO: 102098 - DNA, 411 bp, Zea mays
  Clone ID: MRT4577_24620C.1
tcgcgggagccccaatcaccgccacctcaggcaagcccccgaatcccccgggcgcgcagcacaaccttgccgtcattcgattttggcgcgcgttgcgagccgggatggggttgcagcagtccaaagaggaactgctgtaccagcaggtcaactacggcaacgtcgacgggattcgcacgctccgggggcaaggcgctggtctcgagtggattgacaaggaagggaagacgcccctgatgcttgcctgtatgcgcccggatctgttcgacgtggccaaggtgctgatcgagttgggagctaatgtgaatgcctacaggcctgggtcacactgtgggacagcattgcaccatgctgccaagaaaggacttcagcagactgtccatttactactctcacatggaggtatatgat

SEQ ID NO: 102099 - DNA, 365 bp, Zea mays
  Clone ID: MRT4577_24621C.1
cttggaaaagctccacaatcgtgcaactttgaacgtgagttgcaacttccaacaatacccagatttttatagaattgtcttgtatagtgcagatagggcatccccacttcttggattctatgtccttcaaacaggacataaaggcgtcagcccacatacattacacggaagtcatatttgtagtgcagtacgaagtgcaaaatagcataattgcacaattttgagatagagacgttcccatcaacatttgttgcgagaaccctccaatccattgccaactttctgaacccaccgtttcaactcctcaaacagcatagaggcgaacaacctggttaatcgtggcacggcagatagggcattcccac

SEQ ID NO: 102100 - DNA, 424 bp, Zea mays
  Clone ID: MRT4577_24622C.1
gcgactcgtacttactattcatttcacaccagcattgtcctgatgccttatcattgctgcgccttccaaccagagggacgaatctgagcctgggccaactaaccaactaaccaactgtctgatgtggcgatgcatggccgtctcaaagtcgatcaatagacctcttactttaccttatcctctcctgtgttattggtatctggcgctcctccttgtgtccctgttgtttgagcttactgctgtactacaccatgagcctccacatcgataggctttgagagaggaatcggggtacatagttatgcactaacaaggttaattggtgaggccagactctttcagctaggtcagtgttttactcatagaggtttgattgtaatgacatttaattatctctgacatgtagttatatggttatttaaat

SEQ ID NO: 102101 - DNA, 830 bp, Zea mays
  unsure (1)..(830): unsure at all n locations
  Clone ID: MRT4577_24623C.1
aggccggccgggccgggttccaaaatggggtcgccacgaaggaaaaattcagtctcgtctcgccttcaatttcccatccatttctcccttccccgacccgaaccaccacgtattaaaatctgccccctcctgccactgccagcgaccaatccaatccctacctgcccgggaaccacccgtcgggctcctcccgccctcctcgccgcatctgcatgcggcggggatctccgggttcgctccgtcaccggagccccaatcaccgccacctcatccaagcccccgaatcccccgggcgcgcgcagcacaaccttgccgcgatcgcgcgcgggaaccgccgctgattgggtcgtgaaagctcgattttgggcgattttgattcggagaacccgccgtcattcgattttggcgcgcgttgcgagccgggatggggttgcagcagtccaaagaggaactgctgtaccagcaggtcaactacggcaacgtcgacgggattcggacgctccgggggcaaggcgctggtctcgagtggatagacaaggaagggaagacgcccctgatgcttgcctgtatgcgtcccgatctgttcgacgtggccaaggtgctgatcgagttgggagctaatgtgaatgcctacaggcctgggtcacactgtgggacagcattgcaccatgctgccaaganaggacttcagcagactgtccatttactactctcacatggagctaatccgtccataccnaacgatgattgcaatactgccctcgaattggcaagagaaaagggtcatgtgaatggtgtacgtgccatagagggacgactttgtctttttt

SEQ ID NO: 102102 - DNA, 1260 bp, Zea mays
  Clone ID: MRT4577_24624C.1
gggatccctccctgccacactgccggtgccgctgctactggccagtggccactgccattgcttgcccttgcccataaattttttcaaacccctgacgctgcctccccacaccttcttcttctccccaaattcgcccggcccgtcgtcgggagcaagcaatgtgccccagagccacggaccagctctgcggcgccgcaatggctagcgtgtgttcgttggtggaggaggagtacatcgacctggatctcagttcgtgcggtgagctagagttccgggtgcgccggagcggcgcgtcggacgagctcctctgccggggtaggctgcagccgccggcgccaccgaggcctggcggcaaggcgcaggaagctgacggcggcggcggcggcaggatgtggtggcgccggcaggaggagcgccgcgacggtggcgccgctgcagcactcgcactccgcggggttccgcgacgacacgcagcccgtggcgaggctgcgcaccgagtgctcccgccgcaggaaggcggcgcggacggtgcacgcgaagctgctggcgtcgcgggccttcttccggtccttgttcgccaggactaccccgtgctccgacgagcaatgccgcggcgccgaggtccgggccagcaccagagcggcgccaccacccggcgagacgaagagcgactgctgcaaggcggcgtttgcccagatcaataacggctacggctacggctaccacagcggcagggcggcgccgaccaccctgcggagcagcatcgagcaggagaagctgatggacgaggaggagctcgccgccgcccggcagcgcaagtccttctccggcgtgatcaagtggcggcacgcggcatcggcgcctcccgccgcggcgccggcgaagcctctgtcgtcgtcgtcgtcggcgaggaggagctccggggctggcggcgggccggcgctgaagcggagcagcagcgcccggtcggagtcggaggggctgatccagggcgccatcgcctactgcaagcgctcgcagcagcagctggggctcgccaggaagagcgtcagcgacgccggcgcctccgcgccttcctggccggctcgatcggccgtaacagcagcagcctactgccactagccgtgagccccgtgacgtgtgctactgccactagccgtgagccagtgacttgtgggaaaacggatttaaaaaaatgaccacatcaataatgtcaagtttctcaaaaaaaaaaaaaaaaaaaaaaaaaaaaaaaaaaaa

SEQ ID NO: 102103 - DNA, 1227 bp, Zea mays
  Clone ID: MRT4577_24625C.1
cggccgggaaaacccaattctgttttcttggatccctccctgcgctgccctgccacactgccgctgtcgctgccatcgcttacccatacatattaacccctgacgttgatccccaatattatccgtcttctcccccaattcgcccggcccgtcatcggagcaagcaatgtgccccagagccacggctcagcactgcgccgccgcaatggctagtgtgtgttcgttcgtggaggaggagtacatcgacctggatctcagctcgtgcagagacttcgagttccgggtgcgccggagcggagcggcggacgagcttctctgccggggcagtctgcagcggccaccgccagctgccccgcacaaggccgcgccgccgaggcctggcggcaaggcgcaggaggttgacgtcggtggctgtggtggcgccgccgccggcaggaggagcgcggcgacggtcaccccgctgcagcactcgcactcctctggctgccgcgaggacacgcagacggtggtgaggctacgcgccgagggctcccgccgcaggaaggcggcgcggacggtgcacgcgaagctgctggcttcccgtgctttcttccggtctctgttcgccaggacctcgtgcaccgacgaccaatgccgcggcgcccaggtccgggccagccccagagcggctgtggcaccacccggcgagacgaagagcgtctgcaatgcggcatttggtcatatcaagaacggctacggctaccacagcggcagcggcagggcggcgctgagcaccctgcggagcagcatcgaacaggagaagctgatggacgaggaggacgtcgctgtgcccgccgccgcccgccagcgcaagtccttctccggcgtgatcaaatggcggcacccggcgacgaaggcgaagccgctgtcgtcgtccacggcgaggaagagctccgtggttggtggtggcggcggcggcgggccggcgctgaagcggagcagcagcgcgctgtcggagtcggaggggctgatccagggcgctatcgcctactgcaagcggtcgcagcatcagctcgggctcgccaggaagagcgtcagcgacgccgccctctgctccgcctccgcgccttcgtggcctagcaatccggctcgatcagctggagtagcttactgccactagccgtgagccagtgacttgtgggaaaacggatttaaaaaaatgaccacatcaataatgtcaagtttctc

SEQ ID NO: 102104 - DNA, 254 bp, Zea mays
  Clone ID: MRT4577_24626C.1
actggccaccacacgaccaagatgttcctattttatatcccttcatttcgcatttacaagaacaaaggccccagagtcccaaaaagacactgacccccacttatgggaggaaaaaaaaaggggggttggaggagggcaatggcgcccttgtaatttcaaaactcaaatctgtaacctctaaacacatgggaaaacaaatctactcgtggcacagattttattacaccaggcgggggggggttctgtgggggggg

SEQ ID NO: 102105 - DNA, 104 bp, Zea mays
  Clone ID: MRT4577_24627C.1
tccggtctgatcgattatccggaattctgaattcactgatttgtatgtagggatgtagttcagctgaaccataaactatgccgtgtgttggatttaaagctggt

SEQ ID NO: 102106 - DNA, 453 bp, Zea mays
  Clone ID: MRT4577_24628C.1
ccccagctgatattggacactttcgaaaagctctagctagcgcgctcgtcgtctaacctggcttctggcatggcttccaagcagatcggagtcttgacctgcttcattgccatcaccgctctcgccttccgtccctgcgcatccgccgtgcccatggacggcggctgctctaacggcggcgccacctgctccgggccggggcggggcgctgtttcttacggtggcgcgtgtggctaccagggggccgtccaccaacctccgttctcggcaatgatcaccgtcggcagccaattcatgttccacgtcggccagggctgcggcccctgctaccaaatcaagccccccggccacgagcctttcctcctcagcaccctgaccacccacattacctacctcctccccggctctccacccacatcaggatcacctgcactcctcaccttcacggcacgg

SEQ ID NO: 102107 - DNA, 205 bp, Zea mays
  unsure (1)..(205): unsure at all n locations
  Clone ID: MRT4577_24629C.1
ccaattcttttttatgggcacgcngggggggggggtncaaaagaataatgaggggccgggtaaannttggccccgcgaagattgttcgattgtccacccgcgnnaaccggtttcctcatanttggcaactcgaatcctagatgttttttttcactggattgacgaaaattgtggggtgtgggggttaatctttttcccccccccc

SEQ ID NO: 102108 - DNA, 461 bp, Zea mays
  Clone ID: MRT4577_2462C.1
gtgattaatgtaaaccaaaccatgttttattaacaataataataataatgttgttaaaccagaaaaaaatggattaaaccctaaaagagggggggggggaaaccagcggggaacgcagaaggcccacacccgttgacaaaaacaaaaaagaaaaagagggaaacaaaaaaaaaacaaggaaaaacgccaggcaagaggagcacgggaaaacgagcctaagaggggggggggggcaaattggggaccaagtacccaacggcaacaaaaaaacggaaacccccgaaaggctccaaggggagcaaaaacgggggcgtgaacagacccaaagggggggtttccagtttcgggggaaacaggcccccaccaaaaaaaggggagggcaccccgggaggggggaaaaaaaagacaaagcgggcgccggtaaaaaaaaaacctggaagactttaccgctaagaaccaaa

SEQ ID NO: 102109 - DNA, 677 bp, Zea mays
  Clone ID: MRT4577_24630C.1
cccccctcgagtttttttattacctttttttttttttttttttttttttttttttttttttttttttttttttttttttttttttttaaacacccttctttggacctttatttagagggacaacaaacagcccctgggaccctgttttttgcaaactagggaaaggggggctcaatcgtagccccaaccctttttggcccaaaccatttacccctcgaacaaagggttaacaacaaaaaaaaagggggggttttttttttgccccaaaacaatgttgaaaaactaacattgacaaacggggggttttttacttgcgaaacaaaaaaaacatgggggccaaaccataagggaaaattttttttaaaactggaaaacgttttccggcttccacaaaaacccctacaggcccgggatatcccccttttgctctggacgggaaaaaacaccccttctagtggcaatttttggacttaaaacccgcccttggagcaagcccaatggcattggaccctttcaagaacccgaccctggggaaaaagtcaacaaacatctcccaggggacatcgccaacaagcatccaatctccatccttggcctcggaaggaaaaacattttccccctccttgggggactcaaaaaacccatccttgccagtactgaacccactgaacattttt

SEQ ID NO: 102110 - DNA, 761 bp, Zea mays
  unsure (1)..(761): unsure at all n locations
  Clone ID: MRT4577_24631C.1
cggccgggctctgcacccatctctcttctcggttaccttgcattgagctggagtctaggagcattgtttgagcttcactaccgccacctacatatctcaattccgtcacaatgcaaagagctttcgcttcgcgggcgcggacttcggccctaaattcgacctctaagcttcgcacgaccagcttgagcctccagcaacagagatttgcgcacaaggagcttaagtttggcgtcgaggcacgagcaggactgctcaagggtgtcgacacactggcaaaggccgtgtcaacaacactcggtcccaagggtcgcaacgtattgattgagtcaagctatggctctcccaagattaccaaggatggtgtaactgtcgcaaaggccattacccaagacaagttcgaaaaccttggagcccgcctgcttcaggatgttgccagcaagaccaacgaagctgctggtgacgggaccactaccgctaccgtccttgcccgcgccatcttctccgagactgttaagaacgttgccgccggatgcaacccaatggacctgaggcggggtactcaggccgccgtcgagggccgttgtcgactacctcaaggcaaacaagagggacattaccaccagcgaggagattgcacaggtcgccactatctctgccaatggtgacacgcacattggcaagctcctgtccaacgcaatggagaaggttggaaaggnagggtgtcatcaccgtcaaggagggtaaagactaccgagatgagc

SEQ ID NO: 102111 - DNA, 266 bp, Zea mays
  Clone ID: MRT4577_24632C.1
tgtggcgaggatggtgcggagtttggaaacagcggcagcacacctgagggcctacgtcacgctgctcaggtttgctgtcgtggttgttgaaagtagataggattttactagtttcgtataataaaaaaaccgtaagcatacgtccgcaaccgcaccacaaacactaaacatgggttgtctcgaacgcttcgcggaaactattttcaagtaaaatgattgggttatcaaaaaataaagggaaggaacaatggtagaagtaagaaaaa

SEQ ID NO: 102112 - DNA, 214 bp, Zea mays
  unsure (1)..(214): unsure at all n locations
  Clone ID: MRT4577_24633C.1
ccacctnncctaccacctcaacaacaactcatggtcctacgccaccaacttcgtgcccggcaagtgagggggtcggatgcgccaccgtccaccgacaccggccaccgctgtctatatctaggagttctgatgcacgttagcgctcactgatttcagtttgtaccatgatgtaaattacttaccgtaccactgttcaatcggcatggaataattg

SEQ ID NO: 102113 - DNA, 187 bp, Zea mays
  unsure (1)..(187): unsure at all n locations
  Clone ID: MRT4577_24634C.1
ncccacncntccgcacgagcgcaacaccatccacccaccaattcnaagcgtatggtaccaacaatctgcgggtgggataaacaacaannncaannncntcaaggggctctnaaaaggcggcgctaagcgacaccggaaggggctgctcgacaacattcatgggatcaccaatccaacaatccgaaat

SEQ ID NO: 102114 - DNA, 306 bp, Zea mays
  Clone ID: MRT4577_24635C.1
ctactagcgagtacgccatggagcaaaccgaggctgcggtgagcggcgcacttgatagcggaagtggaaggtggtgtcaagaccgtgcatgaacgtgctgaatgtgatggcggtcgttgacacaaacgaagagagacttcactcgcattcgttggcgctacacaacggattgtggtgggatctgggcgacgagcttttaaaatgtaatgatgagaggacaggaacctgctgtgtatgctgtgatttacagattgattttttactgtacaggtgtgggcacatgtgttcttgttcgaaatgtttaaa

SEQ ID NO: 102115 - DNA, 332 bp, Zea mays
  Clone ID: MRT4577_24636C.1
cccgctcttcccacagcgcacacgtcgtgcgtgccgcccgttgcaatggctgggtctccaatcccctatccatcagatccctgcccgtgtcgcagctggcctcgcctctgcctatccgtctgtcttggtctcctgccgctcgggtatcagaactgatgaatcgttcggtccggtgagccccgcggtgcgacaggggcgtccctgtgagcatcgcagcattcttccttacggctatccctcctgccgcgacaagcctgtggggctgggtcgctcaggtctctggtctggggccccgttcgccgttggtttcgtgattcctatcatcgggagag

SEQ ID NO: 102116 - DNA, 649 bp, Zea mays
  Clone ID: MRT4577_24637C.1
gcccctcctcgagttttttttttttttttttttttttttttttttttttttttttttttttttttttttttttttttttttttttttttttttttatggggaaggggggaaaaacccctttaaacctttaaaattttttggttttgggggaaaaaaaaaacaaattttaattttttaaaaaaggcgggtttttttggttggggaccccttcccccggggggggggggaaaaccacccgcggatattaaaattttgggggggggggggggggaaggattccaactttgtgcccaaccccctgggggtgggggcccggaaaggttcccggggggcccccaccccgcccggggttttggtaaacccccctgcccgggcccccaagggggggcccgggggggccccccggaaacccgtttttcgaaaaaatgcccaaggggggttggccccccgggttaatccgggccccccaacccaggttggagggaggaaaaaaattgttcccttttcccgccgccgccgttttaccaaggggttcttgccaaagggaaacccgaaaccgggggccctcccctttccccggcggtttttgggccccagggaaccccggtgggaccccccccttgggaatctccgggtgggggcccccccc

SEQ ID NO: 102117 - DNA, 719 bp, Zea mays
  Clone ID: MRT4577_24638C.1
ccttcgaaagccgccccacccccaagcttctttccgagctgggtttcttccccagccggcgccaacccagccccatccggcttctgcaccaccggtgccgccaccactaggcaatgaccttaccgtgcctagctcctcctcctccccgtggtcatggcgccaccacgtcccgtccggtgcattgccccagcccggatttgcatccacagcggccagatccgccttccaaccccgacctccctaccggaaccttcatctcgcagccggcggaggccccgccgacggaaacgcccccggtggttggtcgtacatcgcaccaccaacaaccttggcttccagggtcccccgtctccttccatggcgacctctgctgtgtgggacttggaccaccccaccaccagatccgtccaggggaggcagaggagctccgggcaggggtgctcaaagccgccaccatcggccacacgcggtcaccacctccgtgcaggggcagatcccccgggtgctcttcccccctatcttcaccatcgtggtactcaagcgcaatagagacagtggtggcgaccttctgcctactcccctcttgggattccatggcgatgaaggtcagtgctggcgacgacccccgtggagttcataaggggcttttttcatcttcttttggattttagatgtgcagtgcagccggatcccacgagcagtgcaccccgcgccctcgt

SEQ ID NO: 102118 - DNA, 327 bp, Zea mays
  Clone ID: MRT4577_24639C.1
aacaacctacaaacatgtactctcccgcctgctccgactcttcccccgccgccgctagcagcatccgaagatggtgaagctccccaagcccctcacaggccgctatctctcctccaagtgcagcttcgccggcatgaaggcagtcatcgcgctcgtgctccaggatgagcacccgcggaccgcccctatagttcactgcgctcgtcgtcaggcttcaccaagaaccctagaacgtgatacgctcggactccaacaagaagactgcaatgaacgcactggactcgtgctccgtaaagctcgacaagttgcgtcacctcgtgcccaccc

SEQ ID NO: 102119 - DNA, 301 bp, Zea mays
  Clone ID: MRT4577_2463C.1
aaatgtaaagcatcggggagatgaagcaacagcgtagacattcataattattctcaataacccgctagcaacgcaagggaattaacaacacttacatcatggggtgttggaaaccacacaatactttagaacagacacacataacacgatagcatgagcaactctcggcagatcacggtatgagggtggcacactggcctgatgctgtggcatcatccaacgggtttaatactcgacacccttataaccatcctagtcctcatggtactcagcaccgatctcctcttgtgccttttacagc

SEQ ID NO: 102120 - DNA, 376 bp, Zea mays
  Clone ID: MRT4577_24640C.1
gaatcatcaagaaaggagcctgaaggagctcttgctctttcacaagagcctggcaacctggtaaaagttaaacaagaaagtttggagaatgaaaccgagatgtccattttcagggagaatgacaaagtttctggaaaagatcatgcatcagcagagtttataattgatccttcaaatacggatgaacggagggagaatgattttgggcggtccgatgaatcagcaaaaggctgcgaaaggttaacttctgattctatcaacacggctcactccaaatttgttaagtctagtaatgaaaaggataagagaacacagaacaccaggtttgcggattcaaaagatataaaggaaccattgggtagaattcgtgccgaac

SEQ ID NO: 102121 - DNA, 318 bp, Zea mays
  unsure (1)..(318): unsure at all n locations
  Clone ID: MRT4577_24641C.1
tgctggagctccccggtggcggcgttaactgggatcccccggctgaggaattcggacgggcatctgagggagagaggcgggggggcactgtgtctgagtatggagtcccgacggctggcgccgtcgcgcggagccggccggatggctccctcgccgacgcccaagggacatgctgcggccctggctacacggggagacatgcaaatacacntcctgttactctgttgtctgacttaggacgcttgctcgatattactctgtgctggtgagccatcggagcacactctacatgcatgcgccgccgacacacgacgctgc

SEQ ID NO: 102122 - DNA, 234 bp, Zea mays
  Clone ID: MRT4577_24642C.1
cagaaaatctccactcctcgccgcacctagcagaggatcacatgggatccgccgtttgtcttctcctctcgcccccgcgcctgctccaccgcgacggcacatcccgcctcctcagcatcccgcaccggcgggtcctcctcgccgcccccaacaactcgacccctcgtcggctcctggcccccgctccgcgcgccttctactaaaactacaacagcggtgccgtggaggctccct

SEQ ID NO: 102123 - DNA, 140 bp, Zea mays
  Clone ID: MRT4577_24643C.1
caacatagaaggcacatttttttaccaacaatggcagcacaaaatatgggggcgtgtccttattgctccttggggtctttctcgcaaagtgcctgcttacccgcaaactcatttttccccaccaaatgctttcacaaagc

SEQ ID NO: 102124 - DNA, 420 bp, Zea mays
  Clone ID: MRT4577_24644C.1
ccgggtcgacctattcttttttttttttttttttttttcccgttgggaagggagctttttttttttttttttttttttggggggggaacccctgccaaaaaaacaaaggggtttaaactctttcaaacaaaaaaacatccccctccccatcttgttgaagccccctttgttttttaaacgggtgaaaaaccagactttttccggccgtttgccatttccagccggaaactccctccctaacgtaaactggttgttcatgcaaacaacattggcgggaaacaaaagttaagccccgccccccctcccccctttttttttaaacattagcccaccccgtttctaaacattacactccaaacccttttggttccttcgttgtcccagggggatgccctttatgggggggtgtcaattgggctt

SEQ ID NO: 102125 - DNA, 344 bp, Zea mays
  Clone ID: MRT4577_24645C.1
gcacgcacactgaagccctgcaaggtcaccggcatgtgcagcccccgtcaccgagcgcatggtgccggtgcctagcgggccccgcattgtcgatgccctcgtgcacactagggtcctccagtgcgccggcattgaacatgtatttacctcatgccgaggatccacacaagacactgccgaacattcgtcaagccaacctcttgatagcctgagcaagacctactgaattcctcagctcctgagttctggcgccgacaccaagtatcccaagaccatgatacaggaggacaccgacctcttggcataatccgacaaagtgactttatcatcgaggctcccaccga

SEQ ID NO: 102126 - DNA, 328 bp, Zea mays
  Clone ID: MRT4577_24646C.1
gttcttttttatttaggaagatttaactcgcgagccgctgttgctaaggggttggataacatacaagctccattgatatcgccaacctattgggtggctggacagattatatatatcttggctacttatgtcatcacattaacagggttgtacaagagccgtcatgtcctgaacgtggcaacaaaaggcgctactgtgtctgccacatttgttatgaaggccatttgacattaagaggcactcatgttggatcagcaatattcaaaatttaaatacaaaactcgttccgtcatttgtacatattcctgtcgcatgtctatcatcatca

SEQ ID NO: 102127 - DNA, 305 bp, Zea mays
  Clone ID: MRT4577_24647C.1
ccctcattatgttttttaccacttatacataatttactcacatcctttttattctatctaccattctgaccatatttttctttatatccacaataatataaattttaaataacatattactcctatttcttaatattaatacaaactctaatcttttatttatttatactataactttttttaatttatactcactatcctaaaactatttatatccaattctcttttaattttcaatttcatatatctaaacattattcttcatactatactatccataaactatttaaacaattttttatatt

SEQ ID NO: 102128 - DNA, 429 bp, Zea mays
  unsure (1)..(429): unsure at all n locations
  Clone ID: MRT4577_24648C.1
aaaaatagcctcctctttttaaaacattttatgggtaaaccgggtttattttggaagtccaaaaaaaaagccctatccttgaaaccaccatctttggggacggggggctttttcacaccttaaaagaaacccttaaaatttggaacccccaaaagaacatgactgggcttcaacccaaagggggtaaacaacacaaaaaaaaactgggtacaaaaaaggatacccttacgggcaacccccaggaaaaaaaaacccctagggcttcccgagtttggcccaaaggctcccccctggtaaatgtaagggcaaaaagggtcccgggttccccaaaggggggcccaaggggcccccctttaaaaaaggagggctttttttttttnnaaataattgtccacctcttccccacccaaacaggccccaatgaaaaca

SEQ ID NO: 102129 - DNA, 1010 bp, Zea mays
  Clone ID: MRT4577_24649C.1
ctggctccgccctcctccccgctaataccacgccgcgcttgcacacgcgcccctccctgcgcccacgttgcacgctcgcctgtggatgtcgccgtatcccgctcccgccgtgcccacgcaccatcgcccttcccccgtcgtgcccctcgtcccccagatgctcacaactgccaacacatggctgtctccatggccgtcgctttcactcgctatctgtggctctcccttccttctaccgcatccaccggatctagaagcaaggcgtcgcgtggaagcccgtgcccacgccggcggcctcgcacaagccgccactgcgctccctccgatggtaaacgagagccctggaaatagcaggaattaattcaggaaagtacacgagcaagcaccaagggtcaatgagcttaccttaggaaggaatatcatggagagaaatgaaagcaagcatacttgcctatgggcaaacaggtagtggacttacacaatgatcgaaaggacagagtatagtatgcttgacatctatgactacatatataaggtatatgcacattttttacgcttttatcttttctggtggaaaatcgatatttatttttcaaccaggatgtttagatgaaacaaatacatattaggctgtgaattttagttatgtatgagttgtctgaaggagttcatgtttcaatgatgattagattttatattaccattaagatgtttaatattttaattgcaatgttagcctattttattatattaaagtttaaattctgttgtatatcaatctaatattaaaaagatcaatgctttatgtggcatacatgtcagtcattactattatcgtcttgttcgaagctattggatcctaggttcccacttggtgctatgctttgctggtaattggatacaccttatcatctgtaaattgcgtgagaaaatatatttcattggttggttttatttagcggcagttatgtccaataatcatggctaattttttaatcaaactccttggc

SEQ ID NO: 102130 - DNA, 995 bp, Zea mays
  unsure (1)..(995): unsure at all n locations
  Clone ID: MRT4577_2464C.1
atcccgtgcccaaccttcatcttccagccaccgcccgacgagctcttctccatctccctctgtgcccctggctcctctgctggccgctggacgcgcgagtgccagggagcgctccctcctcccttgtttccctggcgcatggacttctcttttccccagctccgtctccatggtcggcttcttctgctcggcctttgctcctccctgcgtgcgtctccctgcgcacgcaccgccgtcgagttccctgctgcgcactgagctttctgtcgcaccctggccccaacttcctctctatttcccagccgaagcgcgtccctggtcccagtgtggagctcgcgagcgcttctttgggctccatgtgtcgcgatcacctttggtccctgttaccctctaaaccactatcgcgtcgggttatgccccgatgcgcgcgtcatcagtcttcgtcgtgccactgttccctgatccgcgctacttccctggtcggtctcacgctcgcctttagcgtcgtgccgcacccaggttctttggccccgttctagctgcaacgacctctcctacggggcatctcgtcgtcggctggccatcagccttgatgtccattacactctccagtaaacctatggcagtagatgagagacctcggaagttggttagatgaagaaaagaaaagtaaagtttgtacagcgcccgtctggtgttcggcaaaatgagtggaccagtgctcgtcgcgtgttgggaagatcggcaccgaggttcttgccgaatattgctttgatttgttttgaggacaatgacgcacacatgatgttcaatgaatggttcaaaccggatagcctcgtcaaaatcttggctccgagccaattcgaacatggtacgttaaataaatgtgntgaatgtggaggacggccaagtcgacgcgggaaaaaagggcgaagattgaacatctccgcagacgtcgtcatcagtcggaccaacctgaagatggacagacgaag

SEQ ID NO: 102131 - DNA, 233 bp, Zea mays
  Clone ID: MRT4577_24650C.1
cggccgggccgggaaacctctgagatgagggcgacgcacagacggactctacttcgacgcctctggggcccaaggacaggccaacagtcctgcaggaggcaatggacgaccaggctaaccaacccactggggttcatacccaacgcgcacagctccaccagagctgaaaatgctccgaaggcgcacgctcccgccaaatttgacctctctcttacacctcatcaaaggagaat

SEQ ID NO: 102132 - DNA, 373 bp, Zea mays
  Clone ID: MRT4577_24651C.1
ggattcgagcggccgcccgggcatgttatttattgagagacagacagattaacaaaaagcttatggaaagaaagatggtttgaacttgtaacaaccgtatccattttcaaactatttttcttattttagtcgtcttcacatcttcttcattcacagagtcagtttcagcggcaaggccagtatccggatattcaaattctgagtttataataacatcatgcaaatcaactacatatccaaacctctgtttcatttcattatcaagccgtgcatctggtattggggtttccccttaacttctaatccatgaatccctcaccgtcagcctcgaaacatcgcactcttcatctgttacgatggtggagatggcaca

SEQ ID NO: 102133 - DNA, 481 bp, Zea mays
  Clone ID: MRT4577_24652C.1
cacgcctgcgtgtaccgggccgctatagcacggtcgacctcagcgttcgtagttacctacaccgcatcgattggcacaactacatttagtgacaacatctacagcaactagcgctaacccaccttggtggactctatgagcatcagaagctactaacgttcaacctaattgctgggtagcaccatgcttcttataagaaacatcaacaacgaccattcactcatataacagctgactacggccaccccttatgttgcattgaaccaactaacgctattgaactctcctgattagttacaggaatgcaactactaccattaatgcagatagggtgccgtgagccctggcaccttgctgatacaaccacaacagctgccgttgtatcaagacgctgcgcctaacactcgaactctcttacaactgggacaattgctgtgattcaaccaactagcttggacaaacacagctgccatctaccaac

SEQ ID NO: 102134 - DNA, 293 bp, Zea mays
  Clone ID: MRT4577_24653C.1
agcagttgaaagggctgaaatggatggagggcttgagaggaatggagtatcatcagtagcagatatactggcccaagatgttcatgagcttcatacgagctcaattgttcatgaagatggcgttgagaataacttattagctcagataccgagcttcactattaatgtccaaaatgcatggcaatcctttgttgcatatgatgcatgcttcaggttatgtctgaatgcatgggcaagaaactgcatggaagctccagacttccttcgggatgagtgcatggtactgcgaagtg

SEQ ID NO: 102135 - DNA, 347 bp, Zea mays
  Clone ID: MRT4577_24654C.1
tcctcgcgtccgccctagcgccctggtccattgtaagtcggcggcaatcccttcccgtgctccagatccggtgagtgagacgaagagatgggcgtctagggcgacggcccggttatcggtatggatctggggacgaggtactattgcgtcggcgtgggtaatgacgaccgcgtcaagagcatcgccaacgaccagggctaccgatccacggcctcgtacgaggccttcaccgactgcgagcgcctaataggagatgcggtcaagaaccaggtcgccatgaaccccatcaacaccgtttttgatgccaagcgtattatcggctggaggttcagtgatgcgtctgtcca

SEQ ID NO: 102136 - DNA, 2771 bp, Zea mays
  Clone ID: MRT4577_24655C.1
attcggacatgtaaaaaaaatttatcctccaatgtcactagcacatagaattttctcttgttcctgttgaatacagtatgtatactacacgtcctcgagaattcgcgcagctgagccgagttccatgccttctcgggaaacaaagcagtagatggatgaggcacatcgcgtcagcggcaaccgcctgcggtacgcgccagaaataataattaggggatcctgataagtgttggcacaagtagcttgccagcacccaactccaagcaagccataactgcaagaaagcaacggcagcaagaaaccttgtaaacatcggagcatagatcgcggcggtgatggcggccaaggtgaggacggagctggacgtgggcgccgacggcgtggccgtaatcaccatctacaatccgcccgtcaactccctctccatcgacgtcttacatagcttaaaagaaagctatgaagaagcacttcggagaaacgatgttaaagctattgtcgttacagggaaaggagggaaattttctggaggatttgatattagttcctttggtggtgttcaaggaggccaaacaatgcaaccaaaggttggctacatagcaatagatattctcacagatactgtagaagctgcgacaaagccatcagtggcagcaattgatggtcttgctcttggtgggggtttagaagttgccatggcatgccatgcacggattgcaactccaacagctcaattaggtcttccagaacttcagttaggaattattccaggatttggaggaacacagcgactcccacgactggttggtctgacaaaatctttggaaatgatgctgttatctaagccaatcaagggcggtgaggcacaccaactgggtctggttgatgccttagtttctcctaatgatttggtgaatactgctcgtcaatgggctttggatatatatgaatgtaggaggccctggatcaaaagcctttataagactgacaagctagaacctcttggggaggctagggaaattctgaagtttgcaagagctcaagctcaaaagcaggcagctaatcttcatcacccacttgtttgtattgatgtcattgaagaaggtatagttgcaggaccacgggctggactctggaaggaagcaacttctttccaggaactgcttttctcagatacttgtaaaagcttagttcatgtgttcttttctcagcgggcaacgtctaagattccaggtgctacagacttggggttgatgcctaggaaaataactaaagttgccattctaggtggtgggcttatgggttcaggaattgcaactgcgatggtattaagtaactatcctgtgctacttaaagaagtaaatgagaagttcctaactgctggaatcaacagaatccaagccaatttgcagagtcgagtaaagaaaggaaaaatgaccgaggagcgatatgagaaggctatgtctctcgttactggtgtccttgattatgaacgtttcaaagatgtagacctcgttatagaggcagttattgagaatgtgaagttgaagcagcaaatattttctgacttagagaagtactgtccttcacattgcatccttgctactaacacatctacaattgatcttaatctgattggggagaaaacaaaggctcaagatcgtattgctggtgcacacttctttagtcctgcgcatgtgatgccacttctggaaatagttcgtactcagcacacttcaccacaagttgttgttgacttgctggatgttgggaagaagattaaaaagacaccaatagtcgtcgggaactgtactggctttgcagttaataggatgttctttccatacactcaatcagcactcttttatgttgatcttggtatggatgtttataagattgatcgtgcttgtaccaaatttggaatgcctatgggtcctttcagactggcagatctggttggttttggtgtggctgtggccactggtatgcaataccttgaaaatttcccagagagggtctacaaatcaatgctacttcctctgatgatggagggcaatagggcaggtgaagccacccaaaaaggattttacaagtatgagggcaagaggaaagcgactcctgatcctgaaattatgaaatatattgaaaaatctaggagcatggcaggagttacaccagatcctgagctgatgaagctaagtgagaaagacatagtcgagatggtgtttttcccggtgataaatgaagcctgccgagtccttgatgagggtatcgccgtcaaggcttctgacctagacatcgcttcaatctttggcatggggttcccaccttataggggaggtgtcatgcactgggcagattccatcggcgcaaagtacatccatggaaagttggaggagtggacaaagcggtatgggggcttcttcaagccctgctcttacctcgctgaaagagctgcaaaagggattcctctgagtgcaccaacaaagaaagttcaggctcggctataagatgatttccttgtggatggaggagactacgttgaataatggattccggtgaagcatttggaatgcgtagagctgtaggctaccactatcacatgcatgtaacgcaatatactactgtgaaaataaagtgcactgcacggcggtttttttatatataaatacaaggatttttttcttgtcacctgtaaaaatttaaacagattttttgtggaatctcatgagaactgaggcaccaaaaaaaaaagactaagttctagatcgcga

SEQ ID NO: 102137 - DNA, 397 bp, Zea mays
  unsure (1)..(397): unsure at all n locations
  Clone ID: MRT4577_24656C.1
ggcgctccttgctgccggccgcgtccgccctgccgtcggccacggcgctgccgtctaccttcatggacgcgcccttgttctcgccggccagcgtgatgatggtcgttccttcggccgccgccgagccagcgcgctcgtggccgccgccggacgacggggccggagtgccgatctttctcaccatgtcggcgacgcccgccttgagctccttgtgcggctggccgccttccttctctttatccttctcctgcttctcttcgtgatccttctccttcttcatcttgtgccccttgnctttctccttcgtcttctcctcctcccttttctccttggcttctttctcttttctctggggcctgtggctggcggtcttggatgctacgagcggccggttcct

SEQ ID NO: 102138 - DNA, 770 bp, Zea mays
  Clone ID: MRT4577_24657C.1
tagtctcttagcaagctgagaagcaccagcaagtgggagtagccggctaagattcactcattcccctggtgtaccacatcgtagcagaggagtggtcgttgcggtgttgctccaagcactgccatttcgctccttccaaatggtccaagaggccaagagcccaagataaggttgcttctaacactgaaatctttggtccttgtaccagctgatgaagctaagtgagaaagacatagtcgagatggtgtttttcccggtgataaatgaagcctgccgagtccttgatgagggtatcgccgtcaaggcttctgacctagacatcgcttcaatctttggcatggggttcccaccttataggggaggtgtcatgcactgggcagattccatcggcgcaaagtacatccatggaaagttggaggagtggacaaagcggtatgggggcttcttcaagccctgctcttacctcgctgaaagagctgcaaaagggattcctctgagtgcaccaacaaagaaagttcaggctcggctataagatgatttccttgtggatggaggagacaataatggattccggtgaagcatttggaatgcgtagagctgtaggctaccactatcacatgcatgtaacgcaatatactactgtgaaaataaagtgcactgcacggcggttttttatatataaatacaaggatttttttcttgtcacctgtaaaaatttaaacagattttttgtggaatctcacgaaaaaaaaaaaaaaaaaaggccccta

SEQ ID NO: 102139 - DNA, 799 bp, Zea mays
  unsure (1)..(799): unsure at all n locations
  Clone ID: MRT4577_24658C.1
ctcgaggccggccgggatatttattatcacttacatagcctacacaaccaaaacttaacttactgcaagttaccaaaccctactcctaacgtactttacgagatacattattagtcgagtattcagatgaacgatcttgtttatcttcttcaaaatagacagcttagtgctgacactttgtacgcacacgtggttgagcttttcgactgcgagaaaattgatgtcaccagattatattccgaattatctcgcatttctgctgtaacgactttcgcaaacgcccacgatcctggtattactagtgcttttaccgaaagaacatttgaactattggctcaatatcgttccacgcgagaaccttcgtttagtcttgcctcgttgcttgagtgcgagtttgatcacgccgaaattcaatcgcccggatttctttctactatagttgtttcttctaatggtcatcgacgcggacatactgacgatgctatagtctcagatcttgattcaaattcagagtgctcggatatagcgtataacgccaataatacaaatttggttgacaccaaagatgtcggagattccgagtccgctgcgtctcacgtcattctgtcaactaagcgagactgcactgnacctacgtcgtgtcgagcaaatggcgaacgcgcagaaatctggaattgttcaatcgccatcgattgatcactaatggtgtttgatcctgaaaacccggataatatttctgacgattggtaagatcgatcacgaaattcgaatcaagcaaaagctacgaaatcgatcactg

SEQ ID NO: 102140 - DNA, 150 bp, Zea mays
  unsure (1)..(150): unsure at all n locations
  Clone ID: MRT4577_24659C.1
gggggggnaaaaccagaggccctccccgaaaattggaacaagaaaacatttgttggtggataaaagacccctttttcctgaatcctttcaaaaaaacaccccccaaaaaacatgtttatgaaggccggcgggttggaatccctcaccagg

SEQ ID NO: 102141 - DNA, 252 bp, Zea mays
  Clone ID: MRT4577_2465C.1
gtagcccaaaccaaaacgcaataccagctgcatgatgctccacacgatggcgcaaaaggagactgatggcagcaagagagatgacatttccaccgggccggcgacgaccccgttgcacatccagtattacaagctctattatgctaacctgcggatactggacactggtggggcggactgcatcggctggcacctcgtagacaaggctcatggtataacgtagaagcaagaagacacagctgatgataactt

SEQ ID NO: 102142 - DNA, 331 bp, Zea mays
  Clone ID: MRT4577_24660C.1
ataaaactatcaaataaacccgtcgtccactcacgtggcaaaactaattaaatctaggtcctgagtttcacagtttagaccctgtgttttctagaaattgtgttcgcaggccagaattaatagggatattcataatctaaatcgagaaaatgatttttttataaaaataaatctaggaacttgtttaattcatagttaattcattttagctgcagattgagttattccagttgcaataattgtgttttaatattatctatcatctagtgcttctgtttagccatcaaacttgaattaaaaatgctcatttcagttaatctatcctaggcgc

SEQ ID NO: 102143 - DNA, 385 bp, Zea mays
  Clone ID: MRT4577_24662C.1
aacatactctatttacatttattgaatcgggatctgctttggtgtcttcatttcttcctttggttttgggatagtgatttcaagtgctccatcattcaatcgagccttaatatcactttcggttactgcagcaggaacagcaaaagagcgttcgaaattgccgaagaaacgctcagatctgtagtacttttacgctttcttcctttttctccatagagcgatttccagagattggcatgattccattctctaggtcgatggaaatgtcatcctttttgactcccggaagttcggcgtgtacaacaatgactacgacatttgtctttacatccacaacaggtctccaattggcaagttctctaggttcgttcattacaaggctatt

SEQ ID NO: 102144 - DNA, 334 bp, Zea mays
  Clone ID: MRT4577_24663C.1
gaacacccaaagccgtacaaattcacacagcaggggaagcaaggggtttccatgacccaaatggaaataaggggggcagcaggggggctcaaaccttcaacaactacagctaggacgggtttttcatggggaaaaccaaggaaacaagacctgcattgcctttctaatatgcgaggcacgggtggggttcctccttcaattcccgcgggggggtataccggtaccggaggctttactcacttggccatcatgaccttgacgaactccttggaggtgatctgaccatcgccatcgacgggggcctcgggggtaatttaattaacctccttggggg

SEQ ID NO: 102145 - DNA, 316 bp, Zea mays
  Clone ID: MRT4577_24664C.1
aaaacaagcaaaaaggcctcgtttttaatcatgcaggggatcagctacaaagtccttggggggagaaggatttggctcaaattcaagtaactttggggcaaaacttgacgggaaaaagggtctttcactaaattaggccttggaggggtccttcctcagggggaaatacttctgacgctttttttccctttcggtcttaaaggagagctggggcttggggaggcccctgcggatggcgcgggtctttttggggcgggggtcgagcggaaacaattttttttttttggacgcccaacgcagggttgacttttgtttt

SEQ ID NO: 102146 - DNA, 283 bp, Zea mays
  Clone ID: MRT4577_24665C.1
aaatattgtgaccacgtaaaaattttcttggggcgaaggcccaacaggcaccttactgatgctaacagtttttttttttttttttaacaaaacgccctacttgaattcccttaagggtacattacacaacgggcaaaaaaaaaagtgaaaacatttttgaacaaaacgtgggatttttcaaacaatttctccaggagcaagtttgttagttttcccaacctccttgacaggggggggttaataacatacattgggccccccctatcaattgactgccccaaaa

SEQ ID NO: 102147 - DNA, 297 bp, Zea mays
  Clone ID: MRT4577_24666C.1
taatatttttttttttttttttttttttttttgggggttctttattttttttttgggggggggccaaaaattgccaaataagaaccgggagaaaaaaggaaaccaaaggcacccttaaaatgggacaaaaaatgttatttaacccggggtaacacgggacctatttaaggccagatacgggaaaatgattaaaccccccgaaaaagaatatttacacctgggtttattggcggaaaaaaagttgcgccccccaggccagggtttccaaatcaaggctggaacgggaaaacaacccca

SEQ ID NO: 102148 - DNA, 276 bp, Zea mays
  Clone ID: MRT4577_24667C.1
attcggctcgagccgcgcgcggaggccaggttttttcacacctcgaccgcgccaccaccaccggtccgttgtgcccgccagccgtcacgcgtgacgttttccggggggccggtggagagagaggcataaggaggcggctctgagaggacgaaacacgatgctcgggttcaggccgatgccgtggtcatttgctcatgagctggagcatgcgccgtcttagcagctgtgcaagggggtgtccgcctgctgcgcatgtcgccaggggatggagaagcc

SEQ ID NO: 102149 - DNA, 611 bp, Zea mays
  unsure (1)..(611): unsure at all n locations
  Clone ID: MRT4577_24668C.1
ttgggtacctcgaggccggccggngagtaatgttccctgacagggacattctgttcgccatgtgggtgtgcgtggacgccggttctacatgccatcctgcaagtagggcacacggcgccgcttaggcgggtcttccagctacgcagcggcagggaccaccgcgaccggcttcaaaagaacgtctccctctgcgcaggaagcgtgtccaggagctcaatccctctgcggtgacatgctcttgtgcggagatcagcgaagagatcgatgagtgaggagctcctgataggaggatctaccagccagatgctctctggcatcgtctcgtaggtaccggagcacctcatcgctcacggccctgcagactatggataggatccttctgcggtgcgctataaggcatcaggacttcgccaagtaccagggctgctattgatctgatgccacatgcgccatgctcgatgctgctggcggtgtcatcccagaggcgtgcaagaagttcggtgctaactgctgatccgacgccgtctgattcaagaccggtcgcctgctcctggacggaacagcttcagctatttccgggacagcatctccatcaacctgtgggccgccgg

SEQ ID NO: 102150 - DNA, 533 bp, Zea mays
  Clone ID: MRT4577_24669C.1
agcccacgcgtccgcccacgcgtccgaacctcacaagtggaaggcatggttatcgctggctgaattctggtacaatacatcataccatacttccctggattgttctccattcaaggccttgtacggctatgatccaccatttgctgctgcccctattattccatctgatactgatcattcagtggcccaggtgttggctgagcgtgctcactttactgagatgttgaaagaccagttggctgttgctcagaacaggatgaaactcaaagcggatcgcttgcggtctgagcggcagttccaggtgggggatttggttttgctcaagttgcaaccatatgctcagcattcggtggtgaaccgaccctgtcccaagctcgcgttcaaattttttggcccatacaaagtgctggaacgtattgggtctgttgcttatcgtttggatctccctttatcagcccaggtgcatccggtttttcatatttcccaactcaagccttttactgctaattactcgccagtgttttctactcttc

SEQ ID NO: 102151 - DNA, 207 bp, Zea mays
  Clone ID: MRT4577_2466C.1
caaaggccttgcccctgatcttcctgaggatctctaccatttgatcaagaaagcagttgctgtcagaaagcaccttgagaggaacagaaaagataaggatgctaaattccgcctgattctaattgagagcagaattcaccggctggctcgatactataagactaagcgggtgctcccacccaactggaaatatgagtcatccacagc

SEQ ID NO: 102152 - DNA, 239 bp, Zea mays
  unsure (1)..(239): unsure at all n locations
  Clone ID: MRT4577_24670C.1
tccgcatcccggtcgcccccgtccgccgcgccanacgccggttcaagagccttcacctcttcgcaaggacggcgacggttgcatcacaaccaagagctggaactgtcatgcacactggtagaaccaccgagctgactccagacatgatcaacagtcgtgcggacggacggaccatgacttcgggttcctcacctcatgccccagatgaagcccgctccgaggggagctaggggcgttcg

SEQ ID NO: 102153 - DNA, 358 bp, Zea mays
  Clone ID: MRT4577_24671C.1
ctccttctcctggttgcccatggccgtgccctttgctcctccccatgacgtctccttctctggttgcagctatggaacaacagctgccattgtccctccctggctctagctctccaagccgatgctgctcgctgccccttctccaagctgacaccccaaccatggctgcctcccccacaccagaaccttccccatggccgagcttatccctgcagcatggatgttgtccccctccccacactagcagcaagcagtgccctcccctttttgcagcaagtggatgcccccagcccctcccttgttcccatggccgtttccagccatcttccatggctgaccccaactcctcccatgaacg

SEQ ID NO: 102154 - DNA, 256 bp, Zea mays
  Clone ID: MRT4577_24672C.1
aaacaaaaaccgttttgaacggggccggggctaaaacctaatggcttttcccggatggggaatcttctgcccaatgttttttccgcttttttttaaccggcttaaagaaagcaaaggggtcctaaaaggtcaaaccggcccctttggaaaccccaggggttttttttagcccccaaaaggggggggtttcccccaatttcgtttccccggattggaatcatctaaaagggggaaattttttgtgccccaatttttt

SEQ ID NO: 102155 - DNA, 492 bp, Zea mays
  Clone ID: MRT4577_24673C.1
cttggcttggaacctttgggctgatttatgtgcttgtcggtccgcactttctctctgctctcttagtcatggtagttggtgaaggccatttgaaagttgaattgaacaaccgaagttcaagttggaagtaccggttccaccgaaaagttcaagacttccgcttcccaagaattttccaccgtgggtcctccgtccaccggccgaacttgctccccctccctaataaccggcttggttacctccgaaccaacggaaaattgcggataaggcctccttatctcctccaaagagacgggccttaggcgctattggtaagaaaaagccgcgaatctgtacggcccctctacgttaacgccgttttatacccctccttttgcgcccccctcggtgattagaccggaaggtcccctttaagagctatggctccgaatctcacacggcacttgtggaacaactaccgcattcgaactacacatcgtaacgcggtagccc

SEQ ID NO: 102156 - DNA, 531 bp, Zea mays
  Clone ID: MRT4577_24674C.1
tccgcagagacactatggcagcaatttgtttctcgccggtggtaccgcatcacaggctgccaacggttcagttcctgctgcgggtgcaacccctctagctgatggtgccacggctttcggcggcggcgctcccccctccgcagccactagcgatagcccagctggcgcctctccatccggtaatgctgttagtgctacttccaagcccgctcgaccgctaagcgacggcagctcttctccgaacgacccttatgggccctccccctcaggcacctccactagcccgaccgacaaacccgacagcggcaagggaggtgaccaccctgatggtggcaaaaacagagacggtggcagcggtagttttgctgccactacttttgccgacgtaaacattatcactgggctgttcgccgccgcgcttgccgccattaccctctaaactgattattagaagccttttgtaacctagttgtaccaagagtctcttttttgtcgcaaacaaccgcatattgagcatcctgctagatcacc

SEQ ID NO: 102157 - DNA, 504 bp, Zea mays
  Clone ID: MRT4577_24675C.1
ctgtccttctatcgctccatcagatcacacccacagtccaggctctctggagcggtgggcatggccatctgtcgtcataatgcgtatgcgctggcggcggcaaggtcaaggcggcaatggtgcgctgccgaaaatcgaccataaatccacgtacgggagcgaggctgacatttatgtgcttgcaccgtgtgttatttgtttgcaagtgcctaatggcaagaacctgctctttgatccaccaaatactgtgtataatggacaaaaacccatgaggaggggaattgcacattagatttccacacccagggcgacgtaccatgcaagatgatgggttagcaccgaatgagaattgacctatcacacattaagacgtacaacatgagatccagctgaaactgtggaactgatagagacactatagccattcatgtatgatttgaggttagatgcactagccaagggaagacgtgcttatgctataattcatcgactgcagctaccttg

SEQ ID NO: 102158 - DNA, 478 bp, Zea mays
  Clone ID: MRT4577_24676C.1
cggacttttgggcttgccccttatatgcgacccgcgaatggcatgctgaaggcagacggcatgtgcatgacgcattttttgctgatcggttgtttctggcagatgtcaacatgctcttagctacttgatgcttgtttcaaaggactgttaataattaacctgaacaagacgagactggacaaggaagatacgactgatgtgaaaatggctaacatggagagccacgttcgaaggactgagggtgctgactagaatgtcaatgcctcaattgatgacatagtccctttgtacaactacttggacaccgagtgcttgggacagatcagaattggctcgccaccacagaacgtaacagtgatattcgacactggaagctccaattagtgggttacctaaaacaattgctacttttggttagcgtgctatttacactacacttacaagacaaacaaggcgtagacttacacagagaatggag

SEQ ID NO: 102159 - DNA, 606 bp, Zea mays
  Clone ID: MRT4577_24677C.1
ttttttttttttttttttagcaaaatccagtccatgtcgtggaaacttttgatctttgtgtttttttcggagcgtttggcccctctgcatcactctctagcaggcccggaccaggtatctagaccctctcctccggagcagccagcgctcgcgcaacccaaggttgactgggagacgcggcctagacctctcacgaactcatcacaacattcttcatgcgcctcatcctacgttacctgttcttgacctgggacttgagattctaggtaccaggatgatcttcagatgactcgtgacctcacaggtaggtgagcatgtagacaccggccatgagggaggtggtggcggaccagcgtcggcgcgcgaggatgtcgtagaggttggcgaggctgaccggccagaggaaggcgatgtcgagccagacgaggccgcggaagaacggcggccggtcggccacgatgtagttgtcgaaccaccggaacacgtccaccagcggcgccgggtagaggctgagcgggagcacgacctgcgagtcgaacagcggcgccccgacggccatgaccagcgagaagagagccgccccccgtccccgccaccgccattagg

SEQ ID NO: 102160 - DNA, 937 bp, Zea mays
  Clone ID: MRT4577_24678C.1
gccggccggtccgggaggccgcctgcgctccttgcccctaagcctcgtttccggtgtacgactccaacgacgacgagatggcctccccgctccgtcggagcttcccctccctcggccgcgcgcttctcacgccggcgccggcgcggatgctctccgcggaggcctccgatgccctcgttgagatcaagcccagggagattgggatggtctccggcatccccgaggagcacctccgccgtaaggttgtaatttattcaccagctaggactgcatctcagcaaggttcaggcaaagttgggaggtggaaaattaactttttgtcaacccaaaagtgggagaacccattgatgggatggacatctactggggatccatatgctaatgtcggtgaagcaggacttacattcaacagtgcggagtcagcaaaagcatttgctgaaaaacatggatggaattatgtggtacggaaacggcatacacctcttctgaagcctaaggcctacgctgagaacttcaagtggaaaggccccccgaaggcggagcaagcatgagctcaaggcctccaccagcatgtgaccctgacactggaatgatgttattttcctcctgagctctagagtctagacctcttgtccgtgagccttttctttcaacagtgtccgtcgtgaaagtacgagctagaatacgcatctatcaaacttgtaataagcatgatctgtaatcaaacaaaaatccttccaaaacgtttgttccttgatgacattgtatctcaatcctgtgtgcttccttggccggtatcttaaaagtggcattttgagttgaatgatgatgcatacttgcttttggctgtatcacacatgagcttgccagtctgctaagcatgaccgtgtgttcatgggcaacctatagtcaggtagtaccagaaattaacactgtc

SEQ ID NO: 102161 - DNA, 349 bp, Zea mays
  Clone ID: MRT4577_24679C.1
acgcgtacgcctgtgctgacgcttgtgaaaaattataattatacatcaacaaaataaatataaagtaatggaaaaaaaataaaaaaaaaaaaaaaaaccaaaccttttaaaaaatccaaacattcatactactttctttcaacctcatatttttactttactattacctactttcatttaactactcccgctttttcaacctaattcactggtaaaacccttcttttccccaatttaatctccttctattacatccccttttctcaatttggcctcttttctatcaacccctctcctttcgactttcccaccctttccccactctaattcctcaattgtactccccctt

SEQ ID NO: 102162 - DNA, 117 bp, Zea mays
  Clone ID: MRT4577_2467C.1
agacaacccaacgatcatttattcgtgttctgagcattatcccacattacaagtcacagtgtttaagcaaacaccttcagcttctagatacctgtcactgatcaaaactacttttgt

SEQ ID NO: 102163 - DNA, 931 bp, Zea mays
  Clone ID: MRT4577_24680C.1
ggtacctcgctcccggcggggattgggtacctcgaggccggccggccggagcaggccgcctgcgctccttgcccctaagcctcgtttccggtgtacgactccaacgacgacgagatggcctccccgctccgtcggagcttcccctccctcggccgcgcgcttctcacgccggcgccggcgccggcgcggatgctctccgcggaggcctccgatgccctcgttgagatcaagcccggggagattgggatggtctccggcatccccgaggagcacctccgccgtaaggttgtaatttattcaccagctaggactgcatctcagcaaggttcaggcaaagttgggaggtggaaaattaactttttgtcaacccaaaagtgggagaacccgttgatgggatggacatctactggggatccatatgctaatgtcggtgaagcaggacttacattcaacagtgcggagtcagcaaaagcatttgctgaaaaacatggatggaattatgtggtacggaaacggcatacacctcttctgaagcctaaggcctacgctgagaacttcaagtggaaaggccccccgaaggcggagcaagcataagacctccagcagcatgtgaccctgacactggaatgatgttattttcctcctgagctctagagtctagacctcttgtccgtgagcctggcattgggacggtgttgttttcttcctggacagccttttctttcaacagtgtccgtggtgaaagtacgagctagaatatgcatctatcaaacttgtaataagcatggtctgcaatcaaacaaaattagtgtccttcgaaaacgtttgttccttgatgacattgtatctcaatactgtatgcttccttggccggtatctgaaaagtggcatttgagttgaatgatgatgcatacttgcttttggctgtatc

SEQ ID NO: 102164 - DNA, 390 bp, Zea mays
  unsure (1)..(390): unsure at all n locations
  Clone ID: MRT4577_24681C.1
aggaaacaacagaggagcagcggggcanagcncggaaaggacaancncaagnnccncgacgaccaaaanagcangagcngcnagcaaagacgananccaggccagaancgcgcagcngaagagagagcnnncncagacgggcgggacgnangacncngagaaggnggcagagagaanngcaaagcnnncnggaggagnngcagaggaaaagggaggagcancgaccgaggcagagcnagaggaccgcaagcaccgcanagaggacgcgaagaangcgacannngcagcaagagaggaaggnaangccccaggaggcggcgcagcacaaagggcagcgaacgacaaacgcacccggcaacaaggaagacgcgggaagacccagaggagcgc

SEQ ID NO: 102165 - DNA, 1309 bp, Zea mays
  Clone ID: MRT4577_24682C.1
gacatttacagacgcaccctcgcagaccccgctaattctcggaaacgcacgcacacaggcgtgcggggatctgtctggcggcagactggaggcatctttttttggcagaatacccccctgcctcttattcggcccccgcccgcccctgcagtgccatccgctgctcttctccgttcgaccgcccgcccgcccgcccgcccctcccctctctctgtctcgccgcccggggagaaggagggctccgccgctcccggggaagagcgcgccattgccgccgccgcgctgactggggaagatggttgtccaggagttcacagttgatctcaacaagccccttgttttccaggttggccatcttgaggaacggtaccaggaatgggttcaccaaccgatcgtcagcaaggagggtccacgctttttcggaaatgatgtcctggagttcttgactcgcacgaagtggtgggctgtgccaactatatggctgcctgttgtctgctgcctgctcgtgaaatctattctgatgggtcatactgttcaggacgtagctatgatggctctgtttgggatatttatttggacgctgatcgaatacactttgcaccgcttcctgttccacatcgagaccaagacctactggtggaacaccgcacattaccttcttcacgggtgccaccataagcaccccatggactcgctcaggcttgtgtttcctcctactgcaacagcaattttgtgtttcccgttctggaacctggtcgcgttcttcgcaactccgtctaccacacccgcactgttcggaggcggtctgttgggatatgtgatgtatgattgcactcactactacctgcaccatgggcaaccatccaaagacccagcaaaacatctcaagaggtatcacctcaaccatcacttcagaatccaggacaagggcttcggcatcacctcatcgctttgggacgctgtctttgggacattgcctccatccatgacgtctgggaagaactgacgcacgtaactcaattcttggcatgagagattctaggggacctgtaatatatattcaagctagggataatcctggatctgtcttcgtgcgatgggttgacatgttcattcagttctcaaagttcttgtagtgtactgattgtctgttgatctattctgaatgtgatgatagtacttcgctgcctcaaaaaaaaaaaaaaaaaatttgcggccgccttctgtgcagtgccagctgtcccgaaaacggcatgttttacttaactctttttgtctagttcttaaaatcagagcatcagactcttgc

SEQ ID NO: 102166 - DNA, 232 bp, Zea mays
  Clone ID: MRT4577_24683C.1
aacaattatcgcttttgaaaatttttctccaagtcatgtttacacagtttttggaacaacacacgttcccggaaaatttaacccagggcggggtgccctgtcttggggtgcccacctacaacaacatgttaacccgcgccccctttaaactttcaaaaaaattaacctagagacaaaaggtttacccgggctttttttacctttaccaaccctgcttttttttacaaagggc

SEQ ID NO: 102167 - DNA, 469 bp, Zea mays
  unsure (1)..(469): unsure at all n locations
  Clone ID: MRT4577_24684C.1
gcactacaacaacttagccctgggggggccgggcgtgcctnactctcagcaacagcagtgtggttccattcaaccaactgggtgcgtgtgaactctgctgcttatttgcnncaacaactaccattcagtcagctagctgctgcttttccctcgcatttcttccattcaaccaactgggggggggggggggggctgcttatttacaacagcnccagctaccacctttcagccagctagctgatgtgagccctgttgccttcttgacacaacaacagttgttgccgttctacctgctcgctgtgcctgacgctggngccctnttacgnctgcgncaattgctgtccttctnccaacttggtttggcgtacccttctacgttcttccatcatcccattcttggcggtgccctgttttggattgcttatgtgttgtcggtgcgtnntgncgttttttggttgttgtttgtggt

SEQ ID NO: 102168 - DNA, 415 bp, Zea mays
  Clone ID: MRT4577_24685C.1
cccacgcgtccgcctggtgagatatctagctttccttgcaggtaccttgggctgcccctgtcgttacataaattaagaagggagcaggtgcagcccattgtggataaaatagctgatcaactacctgggtggaaagctgatttgttgactaaagcaggaagaagtgtattggtgcactctgttgtgacaggagtgctgatttatagtgctatggctggagacctgccttctacttctttgaaggacattgataaaattcgaagagggttcctttggcgtggtcgtaaaaatgccatgggtggtcattgtgcagtggcctggggcagagtgtgcagacctcgagagcttggtggattgggtattttcagcatcactgaactgagttgggcccttaaaatgcgttgggcttggctgc

SEQ ID NO: 102169 - DNA, 407 bp, Zea mays
  Clone ID: MRT4577_24686C.1
acccaaaagtatttccttgatggaagtattgctgtgtctctattgtccgtacaagcatatctacatgggcatacaacactatgtttcatatagacgaagacgaagactgcgaatcaatgcgttggccacgatgaagctagacaacattgagacgggaatatacatgctgcattgtttacctctcagactggttggagccgagggtgcaccgaccagatgcatcctcatcaagtgatcacccccctgctcttgctggaggtgacattgtatcatgccagctgagctgatgcttcatcgtggccaacgcattgatggaagtattgctgtgtctctattgtccgtacaagcatatctacatgggcatacaacactatgtttcatatagacgaagacgaagactgcgaatc

SEQ ID NO: 102170 - DNA, 925 bp, Zea mays
  Clone ID: MRT4577_24687C.1
ttgctggtccctatagtgagtcatattatcgcgtccgcccacgcgtccgcggtcgcgtgggttggctgccacgggggcccattcctcgtcgtcgtcattggcgcctacgaggaagatactctcaggtgggcgagcgtctactcatcggagactggcgtatggactacgtcatcctccattcaaattgatgcctacgtcgagcaaaggcccagcctccttgccggtgacgcgctctactttagcgcacaggaaggcaaaataattgtcaaatacgacctcaatggacagagcctacatgtgatcaatgcgccggatatgtttgagccaacagagggcattgctgtgaccgtggaggacggtggtttgggactcgccggagtgaaggatggcaacctccacctgtggtcatggcaggctggtcctggcggcattgcggaatgggtgcaaggcagaatcgtaaagttgaggacgctcttccctattcttaaaccgctggactcacttgatgtgattggcttccaagagggcacagataccattttcattagcatagatatggaggtctttgcagtcacgctcagatcggagcaggtgaagaaggtaggcaagacgggctccaaatatgccatggcaccctatgtgagcttctacactccagatcttgcaaagggcagattgctatcaccatgaagatgcagtgatccatccattaacatggccgtgacactattgacttcttaaggagatgatgagttaaagtgtttttccagtttggacggttatggaaaaaaaacaaatcaccatgttcattcagaaaagtttagtttcttacctgtgcagtttaagtaaggaactgtaagaacaggatatcatcgtcaaaatgtctagtctattagttaagctgtttaagggattggtttgtttt

SEQ ID NO: 102171 - DNA, 277 bp, Zea mays
  Clone ID: MRT4577_24688C.1
cggacgcgtgggtggagcgtgttaatgtctactacaatgaagcctcctgcggaggctttggtgcccgcgctgatctcatggatcttgagcctgggacaatggacagtgtccggaccggaccctatgggcagatcttacgacctgacaactatgagtttgggcaatctggtgctggtaacaatcgggctaatggccactacaccgagggtgctgagctcattgactatgctctggatgatgtgaggcaagaagctgacaactgtgactgcttgcaagg

SEQ ID NO: 102172 - DNA, 725 bp, Zea mays
  Clone ID: MRT4577_24689C.1
ggataggattggtaggtaaagatcagccgcttcacatggatttcttacgacgaagatctcagccatccttcgcctatggttaacaacatataggctcgctgaagcagcagggtgcgccaccgtaggctgtctgtaactgtcgcttgcaccccctccagtgctgaccagctacaccctgcgtgccgcaccgatgctgtcgtcgactggggcgcattgcaactcctgggtgtggtgaattctttgatttgacctgtactagctgaactgatcttctctgttgctgcttgctgatgatggtgtataataggtgtctctggacagttgtcagtcgtgcattgctgaagatttggtgtagctgttgtttgttccccccctctccattgtcttcttgtctccaggccaggagaggggtataggttaaaaaagggtaaaaagggatgggcgttattggacaagtatttcttttatttctgccccccattttgtaggactcatctttgttaaagtataaagcaaagtaaatcctccaaaaaaaaaaaaaaaaaaaaaaaaaaaaaaaaaaaaaaaaaaaaaaaaaaaaaaaaaaagaaaaaaaaaaagaaaaaaaaaaagaaaaagaaaaatcaaaatcaatgaccggtatactaaatgtaacatgaatggggaaaaaggtgaagaaaaacaatttaatgacccaaaaaaaaaagcacaattttgacacaaat

SEQ ID NO: 102173 - DNA, 420 bp, Zea mays
  Clone ID: MRT4577_2468C.1
gggggaaccaattccgggggacggatcaagcggactatttctagcttgcgcaggcattagtttattttacagaggcgaaaactattttacagaaaccagaaggttttaggaaggggcttgcgaaaacattaaaaaaactattaacaaaataactacctactgattagtttaccacgactcgccctcggggttctaagttaacgaccaaaaaccaaaagaagggatactatcctccacattttgcatactgacttttcagctgcacattaagttaactggttcccgggtcgagggcttttcagcctgcacagggtgatttttttcccaggccgacgagtcaatgggcaaattctgagtacaactacaggggggccccggcaactaatctgcaaaaaaccgcaagcctttttttgccaacgg

SEQ ID NO: 102174 - DNA, 440 bp, Zea mays
  Clone ID: MRT4577_24690C.1
gctgccagttttcatgggcatgttcaccttcgccgggctcgccatcacctcggccaccgaggccatcttcggccacgtcatatccgacccaatcgagctcctcggccgcatcggagggccggcgacgacgtttcttgccatcttcggcatcggcctcgcaaccatcacgaccaacatcgccgccaacgttgtcgcaccggcgaacgcgctggttagcatgagcccgcggaggttcacgttcgccaagggggcgttcgtcaccgcgttgctcggcattgccttccagccttggcggctgctcagctccagtgagagcttcgtctacacctggcttctcggttactcggcgctcatgggtcccatcggaggggttgttctcgccgaccactacattgtccggcgcaccgctttggacgtcgacgcgctctactccgaagaca

SEQ ID NO: 102175 - DNA, 1012 bp, Zea mays
  Clone ID: MRT4577_24691C.1
tttcacggcaattgcagctatcatattcggatcgatattttggaatgttgggatgaaacgagacacaacagaagatttgatgcttgtcatgggatctctttacgcggcatgcctgtttcttggtgtaaataacgcctcatccgtgcagcctgtagtatcaactgagaggactgtctactaccgggaacgtgctgctaaaatgtactcatcgttcccatatgctgcagcacaggaaagctgcttctgtatcttcttttcatgttccttactttcacctacttcacgttctacgggatggtggcggtaggcttgaccccaacacaacaagttgcagcagtagtgtcatctgctttttactccttgtggaatcttctctccgggttcctcatcccccagtctaggatccctggctggtggatctggttctattacatctgtccagtggcctggaccctgcgaggcatcattacatctcagctgggcgatgtgcaggccaggatagtcggccctggtttcgatgggaccgtgcaggagttccttgaggaaagcctggggttccaacaggggatggctggtgtcacggttgcggtgctcattggcttctcccttttcttcttcgccgtctacgcgacttctatcaaggttctgaatttccagagaagatgaccagctgcctgagctaagtaagcctccgtggtttgcttttgctactgtgtggtgccaacatcaaagtctacttgctagctactcggcggatgccggatggatgaagcacccgttggtcgtaggattgaagttttcacacgtagagaggatggtagataattaaaggttcatgtctgtatatgattactatcgcaaatataatgagcaacagtagtgatgcatttgtgctgtacgtaagatatacagaagagtatgcctcatctgttgccttcacaataggcaaccacgtgactatttatctggtttttctatatatatatatcaacagagaagtaaaatgtcttct

SEQ ID NO: 102176 - DNA, 375 bp, Zea mays
  Clone ID: MRT4577_24692C.1
gagacgaaaccagtggtttaacttcaccagtggtaaattaacaacagtggatggagatgcagaaaaaagcggtatacatacaaaacataaatacacctcacagcattggataaataagttactccttctgcagccttaatagaatgccatacatatatatacgcacgaggggatagatgcagcactgaaagacataatacggggttcaaattgtggaaagtgttggagcggtggaagtatattactagaagatttaacgtagctatacacttgagtctacaacttgacatcattgacggcattgaaatacgcttgtgaggaacttgggtgccttttctacttcactacagcattttagggggggggatgaatgat

SEQ ID NO: 102177 - DNA, 724 bp, Zea mays
  unsure (1)..(724): unsure at all n locations
  Clone ID: MRT4577_24693C.1
gtccggaattcccgggtcgacccacgcgtccgggtgtccaaaaataagcaagaaatagcattctatagtcttcccgagtttgaagaatggaaaagttcgactccgaatcataaaaagtggaaagtcaaatactacaaaggtttgggcaccagcacatcaaaggaagctaaggaatattttgcagatatgaaacgacatcgtattcagttcaaatactctggccctgaagatgatgctgcgatcagcctggcctttagtaaaaaacaagttgatgatcgaaaggaatggttaactaattttatggaagacagaagacagcggaagttacttggccttcctgaggattatttgtatggacaaagcacttcgtacctgacctataatgacttcataaacaaggaactcatcctcttctccaactctgataatgaaaggtctatcccatccatggtagacggtttgaaaccaggtcagagaaaggttttgtttacttgtttcaaacggaatgacaagcgagaagtgaaggttgcccagttagctgngtcagtggcagaaatgtcctcttatcaccatggtgagatgtcactgatgatgaccattatcaatttgncgcagaattttgtgggtagcaataatttgaaccttttacagcccattggtcagtttggaccaggctgcatggtggcaaggactcagctagtcctaggtacatctttacaatgct

SEQ ID NO: 102178 - DNA, 378 bp, Zea mays
  Clone ID: MRT4577_24694C.1
aacttgaataccacggcttttctttgcttatatcttttcccgtttgcaaggaatctccacacgttggagcctcttgcccttacaacaaagatcacaatgtaaacacaagagtaaggttgggagcaacacacacaaatccgcagcacaacacacgcacacaatccaagacttgagctcaaatgaagcatagagagttcacaacaagaacagagctcaaatcactaacacgatcaatcaaatgcgtggagacggagtgtggagacttagaattgcttagtgaatgcttttgtgtctcctccatgcacctaggggtcccttttatagccccaaggtagctaggagtcgttggaggcattcttggaaggctaatcttgcctt

SEQ ID NO: 102179 - DNA, 248 bp, Zea mays
  unsure (1)..(248): unsure at all n locations
  Clone ID: MRT4577_24695C.1
aaaaaagagacgggcggcaagggcganggcccggctancggcancgancncggcacgacgnacccnngcgncggcgngnggcagcacgaccgcgncgagancancgccaacgaccagggnaaccgcaccacgggggggggcgncgccnncaccgacnccnaccgccncancnnananncnnccaaaaaccannncnccangaaccccancaacaccgnccccgangccaagcgncncaccggcaggag

SEQ ID NO: 102180 - DNA, 312 bp, Zea mays
  Clone ID: MRT4577_24696C.1
ggggggggcaaaccaaattttccaggcacgccattgaaagaaagatacaaatattggaccctattacgcgcgcgggagctagtgatcaagggaactgagcgatggtacgggaatcggcattgccccttcagttgatcgggatgacctcgtaggccaccaaagtcttgccggagtcgctgcggacgcccaccgagaggggcgccttgagcgggtggccggggtcgattcttcagacggggccccacgacttgtagagcgggattcatgccggcgagttggccctcttgtgggtcacctgtacgacggggccat

SEQ ID NO: 102181 - DNA, 405 bp, Zea mays
  Clone ID: MRT4577_24697C.1
gcttatgcctatcgctctagccggtttacagggccgccgctcgcctctgagaccgctgcgagaatgccgctcaagaggcacgtggtgatcgggcgcgtggccctggtgaactacggcatagactatcgccgtctcgtgagcatcgtgagatgtgagcgaccaaagcagcgcacttgtggacgcaccagatttgcgagtacccagactaacttcaaacgggtgtcacttactgacatcaataagctgatttgacagaataggtgggctgcgctcactgactttgacaggttcaaggtcatgctcgcaaggatcaagatgggtggttctatcaggcaacagctcgcacagcttaagaacgcgttcactgcttaagtaccttttggtgcatgagatgatagctttttg

SEQ ID NO: 102182 - DNA, 459 bp, Zea mays
  Clone ID: MRT4577_24698C.1
atcctctataccgtacagccttcgccctttttttttttttttttttttttttttactttatatactttctttttttttgtatatggttatatttattatataattacacatcatataaaattaattccatccaaaccaaaaaactacaaccaacccttttttttttttttccccaattctttaacaacccccctttatacattaaaatttttactacaccccaacacttttatcaaacctttgcacaattcttattcccctaaatttttctgcaaaaacatattatcctaaatactcctttaccacaccttcttacatatttttctaaaccacataccatgtcaacatttttaaccctatctttacgccaagaatatgccatggcacaactcttgccaaatcacttatgacattaaacatgtccaccatcatcattcttttgaccggaaaaactctttg

SEQ ID NO: 102183 - DNA, 358 bp, Zea mays
  unsure (1)..(358): unsure at all n locations
  Clone ID: MRT4577_24699C.1
agcagtggtaacaacgcagagtacgcggggagccattgacgctctgtatcccccatgaactatgtgcaatttggagtggagtaaaaatgtatggcaaaaaaaaaaaaaaaaaaaaaaaaaaaaaaaaaaaaaaaaaaaaaaaaaaaaaaaaaaaaaaaaaaaaaaaacaaaaacaaaaaaaaaaaaaaaaaaaaaaaaaaaannttcttttgngttgtaacaaatgttaaagggcaaattttgaaaaaatcaataaaattggcggcccttcaaccatcaattaaaagggcccaaacccccctataaggagcagaataaaaataaactggccgttgcttaaaaattagcgaaccgaaaa

SEQ ID NO: 102184 - DNA, 136 bp, Zea mays
  Clone ID: MRT4577_2469C.1
cacatatctgtaaggcatcctatggcctgtctactaatcttatccggactcgtctggccgcgtagactagtctagcgtgttcttctaatgcactggtcgtcagatataaaaaagtgaggaggaggggaaagctccg

SEQ ID NO: 102185 - DNA, 477 bp, Zea mays
  Clone ID: MRT4577_246C.1
agagataggcgtcttcctactcccctacctccgcggctcaaacctttcccccttctcccaattccctccggcgggcggcgctccatcccgtacgacgacaccatgagggagtgcatttcgatccacatcggccaggccggtatccaggtcggaaacgcgtgctgggagctgtactgccttgagcatggcattcaggctgacggtcagatgccccgtgacaagaccattgggggaggtgatgatgctttcaacaccttcttcagtgagactggtgctgggaagcacgtgccccgggctggttttggtgaccttgaacccactgctctcgatgaggggaggactggcacctaccgccagctcttccaccctgagcagcctcctcagtgggaaggagcacgccgcccaccccctttgccccggggtcccctaccccccttggcacggagattcgcccacctatcgccttgagtcgcctca

SEQ ID NO: 102186 - DNA, 246 bp, Zea mays
  Clone ID: MRT4577_24700C.1
cctactccaccgacgcttcaactccaccgggacgaagctcatctcatacacccaccggggggcaccacacggccccaaccaaccacaccgcagcgcagcaaaggcgggcaacggcgccaccgaggagagcgacccgctgaacaggggcgcggcggcggcggagctggccgggagccacctggacgaggagcagcgcatggcggcacacgcccaacaccccgatagcaacaccgaagaatataacac

SEQ ID NO: 102187 - DNA, 549 bp, Zea mays
  Clone ID: MRT4577_24701C.1
gcacacagcatactggccatctgggcgtgccaggtggtgctaatgggcttgtcgaggctaccgcttggggggtccgctcgggaaggctcaaaggtgtaccccggcggtgccttcgacccataggcctcgccgaaacccggacacgccgcctacttaagggaatgagctcaaaaacgcgccgccttgccatgttctccatgttaggattttttgttcaagccatacccaccggaaaggaccccatccagaaccttttcgaccacgtagccgaccccgtagtcaacaacccctgggcataccccacaaacttctttccccgcaactaactgactgagcaacctcgtacatgtgtactaccatcacatccatccattcttttgtgcctccttcgagtgaacagaggggtcttctctgtactctacttgtctagatcgtcagcagctagtaaataaaccagaccccgtatgctcattatcgatgtgtcctcataaattaatgggaacggctaactactgctaccggtcgatgtaatactaagcacagacgcat

SEQ ID NO: 102188 - DNA, 287 bp, Zea mays
  Clone ID: MRT4577_24702C.1
gagacacaagagtgtctcagtcaactgactggatgggcagggctgatatgcaatccggtgctgagaatgaagtgcgtggactgcctaggcgtggcagggtaggatgcaagctagaacagttttcttgtgacaagatggtgatggaataatagaaggaggatatatatacttatgcacgcctgctcttgtgcgtgcccatgccatatctgcattagacatctcaaattgcgtacacaccaatgagtttagagaccggtagggttgcgttcctgattccgttagaaacc

SEQ ID NO: 102189 - DNA, 550 bp, Zea mays
  Clone ID: MRT4577_24703C.1
gcgagtacaagcttttttttttttttttttttttatttttttattgtttttttatctttttttttcatcaactgttgttattacaaaatacaactcgccagttaccaatgatgaaccaacccatgatgccaccgatcacaatgatgccgatggcgaatcacaagccatccacgacggggccgactatgaagtgaccaataacgatagactagtataaaagcgcaccgaggatgcatgccaaacatgacatgcaccaatgaagacgcagagcatgaagcctgaaacaatgacgccaaaggatgatgccaccgaaaaagatgccaagtaagataccaccagatgatagaggccgaacatgcaagtcatcacagatgctgccaaacaagatgacagagccacaatgtgacactgattccatcacgcacattatacaacaacaacagtgaccattcatgtacaaccccacaaacaagtgacctacccacgtttccaaggagacatttgtaagcgctgaaatccagcaataaacatgaagtgatgaacctagaaa

SEQ ID NO: 102190 - DNA, 298 bp, Zea mays
  Clone ID: MRT4577_24704C.1
aaaacaaaaacttttttggggagggttttttttttttttctaccctttctccacccaaaaaaaatactcaaaatctctaaaatgccccccccacctttaactcattaccattaacataacactcccccactcttgacaaaaatatcacactaaaataaagaccacctcctcctccatataggacaaacaatgcattttatacctctcccccatccttatgtatttattgccctgaaatacatctgctttctaaaaaggaccaaaaccatcctaattaagccacgcaccctcaagttct

SEQ ID NO: 102191 - DNA, 353 bp, Zea mays
  Clone ID: MRT4577_24705C.1
aattccgacccacgcgtacgcggacgcgtgggtaccatctcggctgcgactgtcgtttgaagctgacggtcttgtgtttgggggcgattaagtagctaattctgagattggccatctgatttctgagatgagctcccatgttcataatatttgcgctgtgctaaatgaggtataatcaataagtgcttatgctccaattcttttatggtgaccatctaaaatagaaaacagtatgacaattgctatgtcatcaaacatgatcatcatggcaaatcttatatcccaagctgtttatatgctcaacaggccgcacttgaagaaatctatatcagtttgaggaaaactccagctga

SEQ ID NO: 102192 - DNA, 311 bp, Zea mays
  Clone ID: MRT4577_24706C.1
cgggcacgacgccacgcgctacgaaagcactaacgctctcaagtattgcggtttatagatccaggacgacgacagccttcggggccatggactgcatcgatatcaaagtggtctccttactcgaaacgccgatcaccatgcgctaagaccgatggcaagaccaacggatccgagctctgatgccactgcttcggcccccgcactgtataacaactatgacagtacgtacgtgatcccaggagtaaccatacgtactagcaccacagctcataggactaggactaaccaggacttatccactaaaccgacac

SEQ ID NO: 102193 - DNA, 1138 bp, Zea mays
  Clone ID: MRT4577_24707C.1
actctcttcagagtctcggcctcccctaccggcaagcacaggcttttctttttctttctcgcccttttttcgccctcattgtgtgtgtgtgcagcacatataatccgctctctctcccccggtttctcttgtcttcttgctgcggcgatggaccaagaaacctcacgggaaccccactccttgaggagccgtccagtgccgcattagtgggttccattcttctttggatcgctgctcgcgatcgcattgcccgcgtttcttttggccgtcttggttcgttcttgattcttggacgaggtgggatttggagagccgagagcggcgcggcagcggcgggtttctcggtcgggctagattgtttccatcgagatggtgggcggcggagggcattcgtcgatggaccacactggcgccaaggacctcgagcgcggcgagctgcgccgtggcgcgcctgagtttgcggacggcgacgatggagacggggaagaaagccagtacttctcggacgcggaggaccggtcgtggccgtcgcactcgcgccacgactccaccgcctacgaggactacgtctcgccgtgcgtgtccgcccgcgcgagctccgtcgacgccgacgccgatgccgacggcgaggccgtcagacaacactgcaggaagtcctcgtgcgtgtcagagggctcgctggacgacgttgacctggaggccggactgagcgagatcatcaaggccagccctgagaaggccgaacagaactgtcgcatttgccaccttggcctggagagcacggcggccgagtccggtgccggcatcacgctcggctgctcctgcaagggggacttatcctacgcccacaagcagtgcgccgacacctggttcaagatcagaggcaacaagtgctcgacatgcaaatatgtgatctcctctgatgatccggaagattgggactataggcagttggataatccacgtcacttgctgcatggtattgtacatgacaatgggtttggtcaccttgttcggataaatgtgtgttagggtcaagaaatactttctatatgtagatatggatctaattctctaacctcctaacaaacctgctacttctcttatccaaaatcttgtaaatagaattagtgtaagt

SEQ ID NO: 102194 - DNA, 279 bp, Zea mays
  Clone ID: MRT4577_24708C.1
tcggggttagatagtaatcaaaaaaactaatgttcgaaaaccagcggctggcgtaagactgataatgtgctgaatacaaatttgatggtaaagcgcaaaaggttgcagatagagtaaatattaataatcatatgaattagcacaaggttgctgctaataatattcgtcgagggtttgggttgctacattcccaatgcttataacacaaccttctaagggctgtgcttaattgccctacttacttctaaccgctaagggtgttaaaaaaaaatgcttttt

SEQ ID NO: 102195 - DNA, 1380 bp, Zea mays
  Clone ID: MRT4577_24709C.1
gtcagcctagcaattagctcatcgactccagattggagaactcgacaccatgaaggtgctgatcgttgcccttgctctcctggcgctcgctgcgagcgccgcctccagtacaagcggcggctgtggctgccagacaccaccgtttcatctaccgcctccgttctatatgccgcctccgttctatctgccgccgcagcagcagccgcagccatggcaataccccactcaaccaccgcagctaagcccgtgccagcagttcggatcctgcggcgtcggcagcgtcggcagcccgcactggtccgcggctgctggagcagctgccacggctggcatcgcagtggtcttgtttaacctcaagaggtaatctggtggtccgatgcgcgaaagttttgatatgctgctatggcctatatgagaataggcctacatgtatggcctatatgagtcgtgaacacaaacatgaggtataattgagttcttgtctgatcttttgagttgcacctgatcttttgagttcttgtcttggttcgttcttgattcttggacgaggtgggatttggagagccaagggcggcgcggcagcggcggatttctcggtcggactagattgtttccatcgagatggtgggcggcggagggcattcgtcgatggaccaccctggcgccaaggacctcgagcgcggcgagctgcgccgtggcgcgcctgagtttgcggacggcgacgatggagacggggaagaaagccagtacttctcggacgcggaggaccggtcgtggccgtcgcactcgcgccacgactccaccgcctacgaggactacgtctcgctgtgtgtgtccgcccgcgcgagctccgtcgacgccgacgccgatgccgacggcgaggccgtcagacaacactgcaggaagtcgtcgtgcgtgtcagagggctcgctggacgacgttgacctggaggccggactgagcgagatcatcaaggccagccctgagaaggccgaacagaactgtcgcatttgccaccttggcctggagagcacggcggccgagtccggtgccggcatcacgctcgactgctcctgcaagggggacttatcctacgcccacaagcagtgcgccgacacctggttcaagatcagaggcaacaaatgccaatcggtaagcaaattctatcaaacgagatgatgattgttatggctggagaatctcaataccatcgccttttcttttacaatttaataggctggagtagaaatactttctatatgtagatatggatctaattctctaacctcctaacaaacctgctacttctcttatccaaaatcttgtaaatagaattagtgtaagtaattctgcatttttataagcttcttctcatggtcc

SEQ ID NO: 102196 - DNA, 762 bp, Zea mays
  Clone ID: MRT4577_2470C.1
cagccaccgccccgccgcaccggaggcgcgcccgcctaggccttcgcggtggttccccctctgccaccgacggcggcggcgatccagccgagccgaccgatcctcgtgtctcgcctgcccaccaggtctttcctcctgacgttcacgtactacgtgcctctcgtccccgctccggccccttgcctgcctgcctgcccgccgtcgccgccgccgctgacgctgacgctcgccttgttgtgcccccgtgtggcgcttctcgcttttccagatcccggccctccgatcacatcaccggctcggctacctacagggaactgggactgggagaggggcagcaggccaggccatgggcgtcgaggcgaagcgagatgcctggtgcggcgccaagaaaacgctaaggtgctgcatcagaacaggctggagatgcgcctctcagcactggcctctgttcagcctagtgctgctgctctacctgctgcacaggcacgcaccgggcctcttcgctctcctgctctccgcttctccggtgatcgtatgcaccggcctcctcctcgctgcgctgctatgccacgggagcgcacgccttccggaggcccgtgaagacgggacggctcctgaacaagtttcagctggaaggtcttctagaaatgttgatatcagagaagaacagcagaggtttttcggtgcctacgttggagaagaacgtagccaaggaggcaagctgtggcacaagggactgtaacgggcatgctggtctggatg

SEQ ID NO: 102197 - DNA, 294 bp, Zea mays
  Clone ID: MRT4577_24710C.1
tcgttggaagcacaatgttggtttcctttgggtctttatgctaggaaagctggctgagcgactgcaattgccaatagaaagcaatcgtattctcggaagcagcattggtggcatgatcttatttttccagtaaagttcctgatattggagcattgtgataaaaggatctccagaaggggaactcaaaagcatgcagagccattggctgaacctatatgagcactcaaacttatttgaagactgttagattgttctgaacactgaagctgctgttgactctaaaaggagattcta

SEQ ID NO: 102198 - DNA, 1071 bp, Zea mays
  Clone ID: MRT4577_24711C.1
aattctcaatggtaataagagtcgtgaacacaaacatgaggataattgagttcttgtctgatcttttgagttcttgtcttggttcgttcttgattcttggacgaggtgggatttggagagccaagggcggcgcggcagcggcgggtttctcggtcggactagattgtttccatcgagatggtgccatggtgggcggcggagggcattcgtcgatggaccaccctggcgccaaggacgatggagacggggaagaaagccagtacttctcggacgcggaggaccggtcgtggccgtcgcactcgcgccacgactccaccgcctacgaggactacgtctcgctgtgcgtgtccgcccgcgcgagctccgtcgacgccgacgccgatgccgacggcgaggccgtcagacaacactgcaggaagtcgtcgtgcgtgtcagagggctcgctggacgacgttgacctggaggccggactgagcgagatcatcaaggccagccctgagaaggccgaacagaactgtcgcatttgccaccttggcctggagagcacggcggtcgagtccggtgccggcatcacgctcggctgctcctgcaagggggacttatcctacgcccacaagcagtgcgccgacacctggttcaagatcagaggcaacaaatgccaatcggctggagtagacaccctgtttgtggaaggaggtaccatttcataattcggaatgaatacaaaacctgcaagcattgtgaccattgtgggcttatggcccagtcgtttggaacacggtgctcgacatgcaaatatgtgatctcctctgatgatccggaagattgggactataggcagttggataatccacgtcacttgctgcatggtattgtacatgacaatgggtttggtcaccttgttcggataaatgtgtgttagggtcaagaaatactttctatatgtagatatggatctaattctctaacctcctaacaaacctgctacttctcttatccaaaatcttgtaaatagaattagtgtaagtaattctgcatttttataagcttcttctcatggtcccatgacta

SEQ ID NO: 102199 - DNA, 2345 bp, Zea mays
  Clone ID: MRT4577_24712C.1
cgagagagggtgagtactgaggaggagggtttccgatggagaacggcgaggatacgttcgcctcccccaccgccgccgccgcggacttctccaccaacggcggggacggcacgcccaagctccacgacgcggcggacgagatcgagtccctccgcgcggcgaagcgcgacctggaggagaagctcgatgccgtgcgccacgagaaccagttcctgtcctccgagtcccgccgccttgaggttctcgtgtcccaggcccgcgaggaggtcgccgccgccgagcaaggtgctgccaccaacgagagcgaggccgccacgctccgcagcgaggtcgagcgcctccaggatctcctcgccgcggagaaggctagccatgaggaggagatgcgcaggggtgcacggctcggggaccagctgcagaccgcgtaccaggagaaggccgccctcgaggaggagatcgagaccctgaagggttccgccactgccgagggcaagggcgtggaagagggatgtgattctattgctgccagggccgggacgcctaaggatcagggcgtggtgcctcccgcactggtggctgccgcggctgctggagcagctgccacggctggcatcgcagtggtcttgttcaacctcaagaggtaatctggtggtccgttgcgcggaagttttgatctgctgctatggcctatatgagaatgggttaaccgttttgttagtgtcactggagtcgtagtagtagtatctttactatcagctggataatagactagatgaacatgtatggcacgtacctttactttctgaagttttcaatggtaataagagtcgtgaacacaaacatgagggataattgagttcttgtctgatcttttgagttgcacctgatcttttgagttcttgtcttggttcgttcttgattcttggacgaggtgggatttggagagccaagggcggcgcggcagcagcgggtttctcggtcggactagattgtttccatcgagatggtgggcggcggagggcattcgtcgatggaccaccctggcgccaaggacctcgagcgcggcgagctgcgccgtggcgcgcctgagtttgcggacggcgacgatggagacggggaagaaagccagtacttctcggacgcggaggaccggtcgtggccgtcgcactcgcgccacgactccaccgcctacgaggactacgtctcgctgtgcgtgtccgcccgcgcgagctccgtcgacgccgacgccgatgccgacggcgaggccgtcagacaacactgcaggaagtcgtcgtgcgtgtcagagggctcgctggacgacgttgacctggaggccggactgagcgagatcatcaaggccagccctgagaaggccgaacagaactgtcgcatttgccaccttggcctggagagcgcggcggtcgagtccggtgccggcatcacgctcggctgctcctgcaagggggacttatcctacgcccacaagcagtgcgccgacacctggttcaagatcagaggcaacaaggtctgtgagatatgtagctcgactgcatccaacgtggtagtcttgggggatcccgagttcagcgaccagtggagcgaaacaaacagcgccgccgccgcgcaggcgccgccgccaccagccgaaccccggaggttctggcaggggcatcggttcctcaacttcctcctcgcctgcatggtgttcgccttcgtcatctcttggctcttccacttcaacgtccccggctaacaagttctttggccgcacatacatggcccccgaataaaaaaagctccaaaaaagccattactccggacgccgggtcggtaagttagcggatctggaagaacaggctggtggatgctgggttggttgaagtaaaagctcgacatgggtggggtgggggggccgggggaacgatgatactgcatttttgtttatgatgaatgcctttgataaagatcaagaaggtggcgatcccgcgagaaaaaaaaggagcatgattgcgcggcgtttctctgacagtctaggtgtagtttggaagcaagtagtagaagatgattgatgtgtgctggtgttttatcatcgcgagggttgctgctagcctagccatttttttttggttctagctttcgaaaggttatctgtttgttcctttgcgtgttgtttcggcgtgtgtgatggatcatgttgagcattcctcgcgctttgttccgatgcttctgatccttgtggactcgtcggttcttgcttttgatgtagcgtgtctctggaggtaataaagaagaaaaaaaggcttgtcaaaaaaaaaaaaaaaaagggcggccgccaccgcggtgga

SEQ ID NO: 102200 - DNA, 1698 bp, Zea mays
  Clone ID: MRT4577_24713C.1
ctcccctaccgttaagcacaggcttttctttttctttctcgcccttttttcgccctcattgtgtgtgtgtgcagcacatataatccgctctctctcccccggtttctcttgtcttcttgctgcggcgatggaccaagaaacctcacgggaaccccactccttgaggagccgtccagtgccgcattagtgggttccattcttctttggatcgctgctcgcgatcgcattgcccgcgtttcttttggccgtcttggttcggtcttgattcttggacgaggtgggatttggagagccgagagcggcgcggcagaggcgggtttctcggtcgggctagattgtttccatcgagatggtgggcggcggagggcattcgtcgatggaccacactggcgccaaggaccttgagcgcggcgagctgcgccgtggtgcgcctgagtttgcggacggcgacgatggagacggggaagaaagccagtacttctcggacgcggaggaccggtcgtggccgtctcactcgcgccacgactccaccgcctacgaggactacgtctcgccgtgcgtgtccgcccgcgcgagctccgtcgacgccgacgccgatgccgacggcgaggccgtcagacaacactgcaggaagtcgtcgtgcgtgtcagagggctcgctggacgacgttgacctggaggccggactgagcgagatcatcaaggccagccctgagaagaccgaacagaactgtcgcatttgccaccttggcctggagagcgcggcggtcgagtccggtgccggcatcacgctcggctgctcctgcaagggggacttatcctacgcccacaagcagtgcgccgacacctggttcaagatcagaggcaacaagctggagtagacaccctgtttgtggaaggaggtaccatttcataattcggaatgaatacaaaacctgcaagcattgtgaccattgtgggcttatggcccagtcgtttggaacacggtgctcgacatgcaaatatgtgatctcctctgatgatccggaagattgggactataggcagttggataatccacgtcacttgctgcatggtattgtacatgacaatgggtttggtcaccttgttcggataaatggcagagagggtggctctagtcttctgacggggattcaacttatgggtttctgggattggctctgcagatacctcagagtcagaaaggtctccttgatggatgtctctaagaagtatggaacagattaccggatcttacatgccatcactactggtcattcatggtatggccaatggggattcaaactcaacaaagggagctttggaattacatcagaagaatacttaaaagctatggacaacctttccttaactccattatcacacttcttcccgcactcccgatatcctcgaaaccagctacaagataccatttcattctaccggtctctttcaaagcaacctctcaccacaattcgtgaactgttcctctatgtgctgggccttgccaccagcaagagttcaaatatgcactatggatcaatgcataaggagcactcacatacccatgtgcaagacacatggcctgacgaggaaataaaacgtgcaacagaaattgctataaaggttcttcgtgctgttgagaaaacaaggtgggtgagcatgcgaaccctaaaggcagccatgtaccattcaattg

SEQ ID NO: 102201 - DNA, 136 bp, Zea mays
  Clone ID: MRT4577_24714C.1
attcggctcgaggggagtttgcttgcaagctgttttaaacgggcagggcagactgatggacccggaagagttatagatttcctccaggacatgcataagcgcaagaacaaacagcccatcctccactgcgcggctc

SEQ ID NO: 102202 - DNA, 197 bp, Zea mays
  Clone ID: MRT4577_24715C.1
gcggcgcagcacggaggcgaatgaggaggaccagcagcagcaggcagcgccaaggagcggcatcccactcaatgcttgcagccatggctagggggttgaagaagcacttgaagaggctcaatgcgcccaagcattgcatgctcgacaagctaggcggagcttttactcccaaggcatcttctggacctgacaaatgc

SEQ ID NO: 102203 - DNA, 733 bp, Zea mays
  Clone ID: MRT4577_24716C.1
gggaccctcgaggccggccgggccgggaaggagagaggagcatatatatccaccgatcatgatgaagggtggtatcatggtgaagggtggtagcaagaaggaggtggtggtggccatactgctggttctgcagctcatggcagctccaccgacggccatggccgcccgctcgccgcgcggagccgtgccggatggctccctcgccacgacgcccaaggtgacgatgctgtcagccacgctgtgctacacgggggagacatgcaaatacattacctgcctcactcctgcttgctcctgtaactatgatgatcgtcgctgctacatcatatttactcctgctgctgcttgaggccattctgtacgtgaatgaagccactacgatctcacacagcatgcgccggccgacgacgtacgtacgtacgtatatatatacgctacctcgtgagcttttgttcgagtgatacgtgtttcaaggcatccatccatccatggatgcttatgtacgtatatgtgttagtcgtgtgtcaggcaaccgggcagcagaagggggtgttgtattatatatatttacgtcttctggtgattaaataataaaggggggcatgttggatgtgtgcaagacaaaaaaaaaaagcaattttattgctcgcactgccataatggcaaaaatccaaaaatcttatgcctggattttattcaaacgaaaaaagcaacaccaaaattgttagcaagc

SEQ ID NO: 102204 - DNA, 326 bp, Zea mays
  Clone ID: MRT4577_24717C.1
aatgaggacgcgcgggcgacgccggaggaagccagtactatgccggggagcgtgaccggcgcaccccaggtccgaggaagccggaggactgcaagagaagcgggaggaccacacagaagccgcctaatagcacaacagagcctagatcaagctccaaggaggctcaacgagcaatggaagggcgaacgcaggggctacggctgaaaatagaccagcccagggcgctacggaacgagaaaagacgcctgaggactgtaagacaagcctggtggtccccacagcatcagactcatagcacaaacggagaccaccagaagctccaagga

SEQ ID NO: 102205 - DNA, 663 bp, Zea mays
  Clone ID: MRT4577_24718C.1
acgcgagcggccgctcgcgatctagaactagccccgcgtccgcccccccggtccgagcatatatatccaccgatcatgatgaagggtggcagcaagaaggaagtggccggtgcggcggcggtggtggccatactgctggttctgcagctgatggcagctccaccgacggccatggccgcccgctcgccgcgcggagccgtgccggatggctccctcgccacgacgcccaaggtgacgatgctgtcagccacgctgtgctacacgggggagacatgcaaatacattacctgcctcactcctgcttgctcctgtaactatgatgatcgtcgctgctacatcatatttactcctgctgctgcttgaggccattctgtgtacgtgaatgaagccactactactctcacacagcatgcgccggccgacgacgtgcgtacgtatatatatatacgctctacctcgtgagcttttgttcgagtgatacgtgtttcaaggcatccatccatgcatggatgcttatgtacgtatatgtgttagtcgtgtcagggaaccgggcagcagaagggggtgttgtattatatttacgtcttctggtgattaaataataaaggggggcatgttggatgtgtgcaaaacaaataaaaaaaaaaaaagaaaaaagaaaaa

SEQ ID NO: 102206 - DNA, 328 bp, Zea mays
  Clone ID: MRT4577_24719C.1
tgtgatgatattgcagatcgcttagcgtggcgcggcgagtcgccgagtgtcagctattttaatgtttggggggtgtttttttttaaagtgttaaggactgttttattgttatgagggaatcgcggtggacggaagcttttcatccgcgtgggtcatctctacaatttgtgaattatggcctgagggccgcgtaaatgttggcaggtttagttttttattgaaatggtttttgacccaaatgctcaaaatctctgagttgaggttgttaaaatgtgtcaaccttgggtttgttaaaaacatggtatgtttttaaaattggatttttgaa

SEQ ID NO: 102207 - DNA, 138 bp, Zea mays
  unsure (1)..(138): unsure at all n locations
  Clone ID: MRT4577_2471C.1
ctattatcttttttagttattttttgaagtggtacgaattatcgaggctccttaacatatcaatctatcgctgcaccattatcnacattatcatgtttgaggcatcctacctacaggaaaattgatttaagtcatcca

SEQ ID NO: 102208 - DNA, 483 bp, Zea mays
  Clone ID: MRT4577_24720C.1
accgggctattaaaacttggtcccgcctgtttttaaggggaaaccattaccattaccctttacggtacattttttttaccaaacagcccctggggtaattacataaaacaggggttaaagcacacgtgctccgggggggcgggctacggggggacacaaggatgcctgttttttttaacggttaacgacaaaccggttaaaacgggccagggcctgggcctaacctaagggaagaagaggcagcctatacatacttattttacaaggtttagcaaacaaacccagaaaaccggaactgggggggattggttccaacttttcaaaaaaaacctggcatcaggataccccccagggggggcacttacaggggcttttttttaaaaaagggggaaaaggtccaggtaaaaaacgggaccctagcttccttgggggctaagaacttggaggaaaaactggcccttgacccgggggaccctgttttgg

SEQ ID NO: 102209 - DNA, 325 bp, Zea mays
  Clone ID: MRT4577_24721C.1
acaaaaattggggggtaattttgataaacaacaactccgggttttaacgtcaagccccacataactaaagatggccccctgcaacattattttttgttccggttaaaccggggcacaaaaatttaacgtcgggcaaaatttaaatttgacaacaggggacaacacaactcttggggacagcaacaaatgggccccctttatttcccacccagggttgggaactgagcttgatctttaatggatggagcaacaacaggtgggccaccactgtgttccccttcctatccccctttaaaaccaccacgattcccacgggccctttcac

SEQ ID NO: 102210 - DNA, 442 bp, Zea mays
  Clone ID: MRT4577_24722C.1
atgtactgagttatttctgggactccacatacattttgcaaaggacttctttacagaacaataactcacaagcatgctcatagaggccaccaccaacgatggactgtctctagaacactggtgagctgcatcaaaccatgttgtctgaatgatagcgatcgctgccactgtatcagggagccaccgttaggcataccgtacacgtagaaaggcgacaactgctgttgtctgaacatggcggtaggtctaacattaaatagcgggatgaatggcaatagttggtgctactggaaataagcagcacagtgcaatgctgttacttggccaaatggaagaaattgctgggggtaagctggaactatctgggtggccgaaaaaggaagctgaataaaagcactagagttaaacgcagtgagatgtttgaatggaagaaaccgatgct

SEQ ID NO: 102211 - DNA, 238 bp, Zea mays
  unsure (1)..(238): unsure at all n locations
  Clone ID: MRT4577_24723C.1
taatataacancctatacttacaccttccatantacaatctctaaattccccactttcaatatcttacaatttaaattctattcctacatcaatttttaaccttctttaccattaaaattctttataaaccattcattattttctcatcaaactctcaactcaaaaacattctcttctttccattaatctttaaatctcaaatccctgttcccaactattttcccatatcacttcttt

SEQ ID NO: 102212 - DNA, 268 bp, Zea mays
  Clone ID: MRT4577_24724C.1
gtgcaatagacacatcgtctgtacttttaaaaaataagagaacaaaaaaaaaaaaaagaaaaaaaaaaaaaaaaaaaaaaaaaaaaaaaaaaaaaaaaaaaaaaaaaaaaaaaaaaaaaataaaaaaaaaaaaaaaaaaaaaaaaaggggcggccgccaataagtgagcttgtaaacccggaaataaattccggaccggaccttgaaggggtcccagttttccttatagggagacctataaaaacttgggaaaaacatggcaaaaccg

SEQ ID NO: 102213 - DNA, 377 bp, Zea mays
  Clone ID: MRT4577_24725C.1
gcgcagggacaagctttattgttttggagccgttagttatctacactatcttgttagtttacttatttttcggtgatgagtttcgttttgttacccattaccttgggtggttgtgttgtgcttgtcctgtttgtttcctttgtaatgggtgggggtggggtgttttgttttttgttgtttggtttttttttttttgtttttttttttttttttttttttttttttttttttttttttttttttttttttttgtttttggccccacacctgtgttctgccgggccctcggcccccccgcccccggcggccgcccccgggggggggggccccccccccccgccggtgtgtgggcgcgctttccgtctcggggcggttgg

SEQ ID NO: 102214 - DNA, 325 bp, Zea mays
  Clone ID: MRT4577_24726C.1
gaggaattcattacagtcggccgccttttctttctccctcacgtcatctggtcaactgggcggtgcctccatacgcactagcgagctgcctcgacctaatcactggtgccttacctgttgcagctattgcgatggcaaagatggacaagctttccaatgcaagggttaaaacagctggatcaatggctgcctggacagcacacacttctctacatgtggataccagcggcacatatgttgacaaattaccttaacccacgtaacactaaacggctgtcagctttcagcatgtcgattgcaatgctagccaacggacatatgattt

SEQ ID NO: 102215 - DNA, 441 bp, Zea mays
  unsure (1)..(441): unsure at all n locations
  Clone ID: MRT4577_24727C.1
ctcggcgtccgcggncgcagaggcccgacgcgtgggcgtttctgcacattcttttttttttgggtgctgaatagtactgtacagtttatgatttgcttggactcatgatcgagagtgtaaaaaaaaaaaaaaaaaaaaaaaaaaaaaaaaaaaaaaaaaaaaaaaaaaaaaaaaaaaaaagggggggggggaaaattttttttttttataaaaaaaaaaaaaaaaaaaacataaaaaaggggaaaaaaaaaaaaagggggggcccttttttgagggtccaaattttaggcccccttctttgcaccctttcacttttttttagggggccccaaaattaaatttttgggcggcggttttaaaaacgtttggttgggaaaaacctttggggttccccaattaattggtgtggggaaatacccccttttccccggcggggggtaa

SEQ ID NO: 102216 - DNA, 287 bp, Zea mays
  unsure (1)..(287): unsure at all n locations
  Clone ID: MRT4577_24728C.1
ccaaccncaacccggctcaaattgattttttcaggtaccaagatgcctcggtcgccatgatcccaaatttgctgcactagcaattttatttttcaatggccgacaactgtttggtcagccgattaaagtcaattgggcatttacaagtacttccagggagggcccctcagggcattttaatatttttggtggggatctttgcccggaaggcactgatgctactttggttggatttttctttgggtactttacttgctcaaaagcttgggttatgggggacccaaaaa

SEQ ID NO: 102217 - DNA, 267 bp, Zea mays
  unsure (1)..(267): unsure at all n locations
  Clone ID: MRT4577_24729C.1
atattttttcagccccaaaaactnccggggcgcgagttgttttattaacaagccgggtacaggacaaccaaggtatttatcacacgcgaagggttcacttgtgacacctaggctccaacagattaattcagaaaaccagactgccgcgggcaggacccaaaaaaattgacaccctgctgtgcctctagccgctaaaaagcgctaaaaccaatgaacccgacactagaagggctagacccaacgtgtggaccccatggggcaccaaaa

SEQ ID NO: 102218 - DNA, 3094 bp, Zea mays
  Clone ID: MRT4577_2472C.1
ggtacccttccctcactctcccggttctttcccggcgctggattcagactcgcatgcttctccatgtccgtacagctccgtgcctcctactcgtcccttcactccaaatccagcgagccctgcttctgaggctgacgaatttttagcagtttcttcaaagcctttgcaatcgctaccatgtgattctcctgggcagacctttgtggcttttgaaaatccagagggtgtcattgccaccggcaagttctcaaatatcctgaaattctttgttaaggaggttgatccatccacgggtgaagctgaagatgatggtgtcgaggatgagtaccagcttgaagatcttgaaatcgtttctgctgattatatgttgaaggtgggagtatccaacttcctaaatgccagggaaaaagctggttcagtcgaaagatgggggtcttaggaaggtgctggaagtcaggatcaagtaactcgaagctgcagctgatgagatcatcatcctaacaatctagttgatgaaggacacggacagcaaaactgatatgtaccgtgcaaatgctattagagttctttgtcgtattattgactcaacccttctcacccaaatcgagaggtatttgaagcaagccattgttgacaagaatcctgttgttgccagtgcggcccttgttagtggcatctacttgcttcaaacgagtccggacgatgaaaatagatggagcaatgattttcaagattctgggcagtgaagaggttcttgagggcgatttcatgctcttagttgctttgaagacattagaatcaatgatcggatggctgtccgcagccttgttacgagcttttcgagaggttcagtgcgctctttgttggccccaagccttcttattcgctacacttcattgttaagtaggttgatccatccacgggtgaaactgaagatgctggtgttgaggatgagtaccagcttgaagatcttgaaatagtttctgctgattatatgttgaaggtgggagtatctaacttccgaaatgcctgggaaaacatggatccagagactgagcgagttgatgagtatgggcttggagtaagggagagcttggctgaggctgtaagtgctgttataagcatccttggcatgcagccttgtgagggaactgacgtggtcccaagcaattcaaggtcgcacacttgtctgctctctggtgtgtttcttggcaacgtgaaagtcttggtgagactttcatttggaatcagtgcaccgaaggaggtggccatgaagctggcagttagatctgatgatccagagatcagtgacaagatccacgaaattgtcgctaatggctaaaaacaatagtagaatcgtttttttactcttttttgttttgacttgcatgctacgggaagcttgaggggattcaattaattctagtatatgtaagtctggtttccagttgaatccatttgtcgcaccaccattcttcctttgacagtgcatcagttttttttttggttgatttggatctgtacaattttccttatatactgatgcttttaatagtatacgcaataatattcaggtaaaggttaacttacttacttatccactcagaaaccttgctttcagagaaggagcgacttcataagatcggacttggagtaagggagagcttggctgaggctgtaagtgctgttataagcatccttggcatgcagccttgtgaggggactgacgtggtcccaagcaattcaaggtcgcacacttgtctgctctctggtgtgtttattggcaacgtgaaagtcttggtgagactttcatttggaatcagtgcaccgaaggaggtggccatgaagctggcagttagatctgatgatccagagatcagtgacaagatccacgaaattgtcgctaatggctaaaaacaatagtagaatcgtttttttttactctttttttgttttgacttgcatgctacgggaagcttgaggggattcaattaattctagtatatgtaagtctggtttccagttgaatccatcatttgtcgcaccatcattcttcctttgacagtgcatcagtttttttttggttgatttggatctgtacaattttccttatgtactgatgcttataatagtatacgcaataatattcaggtacagttttgatggtaaaaaaaaaaaaaaaaaaaaaaaaaaagaaatgcttgatgaatttactgaagctgagttttaatactcagtttatgttctgaaacaaatttttcaataacattctgtgctccaatactactgtgcttataaaattcctgaacgattcattgacaccggttagtttttaagttgctgctaatgcttttgaagaattgttaaaagatcctccggtgcagctaaagtcgatgccgtctgagatgactaggaggttgaatatctcgaatgcgattccgcaaattatctgttgtacttgggagtatctaactatccaaatgcctgggaaaacatggatccagagactgagcgagttgacgagtatgggcttggagtaagggagagtttggctgaggctgtaagtgctgttataagcatccttggcatgcagccttgtgagggaactgacgtggtcccaagcaattcaaggtcgcacacttgtctgctctctggtgtgtttattggcaacgtgaaagtcttggtgagactgtcatttggaattagtgcaccgaaggaggtggccatgaagctggcagttagatctgacgatccagagatcagtgacaggatccacgaaattgtcgctaatggctaaaaacaatggtagtatcttttttttactccttttcttttggctttcatgctacgggaagtttgaggggattcaattaattagagtatatgtaagtttggtttccagtcgaatctatcattcgttgcaccatcattcttccttgacacagtacaccagtttttggttgttttggatctgtacaattttccttatatactgaggacttaaaatagtatacgcaataatatgcaggtaaagttttgctggtcgtttccccctgtcgccgcacccccagtcttccggtgtcggtgcgtctct

SEQ ID NO: 102219 - DNA, 698 bp, Zea mays
  unsure (1)..(698): unsure at all n locations
  Clone ID: MRT4577_24730C.1
aaggccgtgggctacggctgcttactgtacaccatcgtttgctagttcatgctacagtggtttcggggtactgcaaaaataccgagcaggacatatgtattttctgagcttgaaaatatactctgaccctgcgaagaagcgccgggctgctcgtttcactgccactttaatgccatctttaggagaccgtgtgtgaatgatcgtgcaaagtattattttatactgtatatattgtattgtttgtagaacgaagtttaaaataaagagtaaaataggtaatctgctggaaatagtctaaccctatcgtcttataaagggcatgtagtctaccaataaagaataggaccattgttggctattcggcttgaccgatctctagaccgaaattcatccatctgcaatgttcatcgttgtgttgagagtcgtgtgtcgaccgcgtacgtgctagccgttgaccttgttgagcacaaaaagtgactgcatggacggtccatggtggtggcgtggacggtccgcgcatgtacaatcagttagggtttcaagtttattgtgagatttgttagctaaatctgcgagattaacttgagaaacgacttgtaacgggtttagaactcccctttatatagatgaagggctacggacgattgaccctccataatcgatcaaatcaaatctatttctcgttnttaccttatgca

SEQ ID NO: 102220 - DNA, 960 bp, Zea mays
  Clone ID: MRT4577_24731C.1
atggtaggatccaattcgagtgttcacagtggaaaccatggagacggagagccccctgcttctcgggctgaattgcatcacatggccgactcactcatggaggtcatgcataggatgtttaatgaacatctgcttgtgacaggaggtcgaaggctacatcatcgtgatctagaagaatttaaccatgaagaatccagagatgagaattctggttccagccatgaatttgatcccttaggcgatggccgtagaggttatggtgatggtcgccacgctaattttgataatttgcatggaaggcatcgtgcacacggacaccgagtaagatttgaagacgaggagtttgaagaccatgatcgtgaggaaggatctgatgaaaatccctttgcaaatgatggaatgtttggtcggcatcatcatcaccgacaagctaattttgaaaatagagaccattatcatgggcgtcatcatagaaatgacccggaccatattgcccgagtcaagttggatattcctaaatttactggaaaaggaagtgcatatgaatatcttaattgggctgagcactatcagtgtgatcttcgaaaccgattgcaattgttgaaacaaggaaagcaatcagttgatgaatattttaagaagatggagttgctattagtgcggactggaatcagagaagatcctgagtcaaccatggcaagatttctaggcggacacaatgaagagatttctagatttgtcaagatgttcccataccgtaccttgcaagatctagttgatcaagcaatgcgtacagagagaaaaattcaacaagagtcaggtggaaaatcttatgcaagtcattataatgctgtcccatggcgcaaacagcaatccagtgcttcttttggtggaggacgatctcaacgaaatgcagttaggttgtcacacccggttctgggggcaaaaccgaatgcatag

SEQ ID NO: 102221 - DNA, 252 bp, Zea mays
  Clone ID: MRT4577_24732C.1
ggggggcgggttggggacaacaagaaaacctgacccccaaaagaactaggtggataataaaaaaaaaaagcaaacagaacgggagggacaaagggtttggaatcgctttggggaccctggaacgaaacgggcgggcttaggggttccaaaagaaggggggctcggcgaacatgggggggaccacctaggggtccattttggaccccgggcggggggcctcaaaaaaacccttggcggtttggttcgttttcc

SEQ ID NO: 102222 - DNA, 107 bp, Zea mays
  Clone ID: MRT4577_24733C.1
tccactcctgcgcccactcctcctgccactccttctttcaaactgaactatccacccacggacatgtgataacttctgaatcgcaccgtatcattcaacaatccatc

SEQ ID NO: 102223 - DNA, 354 bp, Zea mays
  unsure (1)..(354): unsure at all n locations
  Clone ID: MRT4577_24734C.1
ggccgcttttttttttttttttttcttttttttttttttttttgatttgtactattttttgtggttgggtcattttcgaaggaaaggacccaaaagcgagaggcggggattcttgccaaagaaaacagattcgcaagcgggcatggggttatttatatatcacggtttctgaagcagactggggcccggggggaggggcgacaccggcaagcccacgcaccctactcggactactcgacgggggcctccacccggagcaggccgaacccgacggggacgcccacgagcacgaggcccgccatggggggggcgatcctgaagatctcgggggggtcgngtatgtgggggccgaac

SEQ ID NO: 102224 - DNA, 2982 bp, Zea mays
  Clone ID: MRT4577_24735C.1
atggccaaatcttttatcatcgcgctcgggggtccggccttgacctggtacaccaggttgctgctactatccatcaactcctggaaagcactcagggacaagttcctgctcaacttccaaggaaagcctaaggaccctccgcagtccagcagaacctggaccaggccttcgcagccagactctagacgggacagccgcagtcagcaacaggtgcacaacatagccaaccagcaccccgccggcgaggccactcgccgtcaggaatatcccctcccagggccgttgtcaaaggaagacttcgccgagcagccatatcgcggagtcatccacatgatcaccgaagggtccagcgtcgacttcgaaacaaagcggcagaagagggaccactaccgaagcgtcaaccacgtcgctctcacgggcccagtggtacaaacaaggtggtcacatgtgccactaaccttcgacgctagagatgttgatctacgcagcacacctcacgtcgatgccatggtgatcaactgcagcgtagcaggctgggacctacacaaagtcctggtcgacaatggcagccaagctgacatcatcttcctacacgcctttgaccgcatgggtatcagccacaacttactcaagccttcggacaaccccctatatggcttcggcggcaagggcacctttcccgtcagcaagatagaactacctctatcattcggtgtggcacccaatgcgtggagcgagcaggtcaccttcgatatcattgacatggtttacctgtacaacgctataatgggccagggctccatcaataaacttgaaatggccattcacggactttacctctgcatgacaattccgggtccgcaaggcgtgataacaatttatggtaaccagcagactgcgcgcaatattgaaagagactttgttccaggccaacggaatgtgcactgcctcacagcacaacgcgaagtcttcgaacggacccacctagtcgcagatgaaaaagtcaatgcacagctacagagcaacagcggaacgaaggcggtaccccttgatccggccatgcccaagcaaacggtcgtaataagcgaagacctgacctcgcgagacgaggagaaactaatctcctatctctcccgaaacaaggacgtcttcgcttggtccgccctcgacctggttggagtcagctgcaccatcattgctcacggtctgggcatcgaccctttgaccgaagccaccaaagccgaggtgcaccgcttgttggaagctaacttcatcgaaccaatcgcttatcctacatggctcgccaacgtggtcgtggtacaaaagaaacgcgacaagtggcgcatgtgcatcgacttcaccagccttgataaggcctatcccaaggacaatttctcgctgccacggattgacaaaatagtcgatagcgcagccggatgcgaagtcatgtccctcctcgactgcttctccggctaccagatatacatgaaagaggaagacaaggccagcaccagcttcatcactccccttcggcacatactgcttcatcaggatgccagagggattcaagaacgccgggtcaaccttctcttgcctcaccaagagggtgctcgaaatccaacctcgccatgtgcagtcagcgcagtgctagtccaggagcaagaacaagagggcacgacacgacaatgcccagtctactatgtctccaaagtcctcacggcctccaagtgcaacatgactgaactagaaaaaatttcatacgcagttgtcatggcatcgcgcaagttgcgccactacttcgaagcgttcaaggtcgaaaaagaatactcagcaaaagaccccgcgctcatgcaatatctcacagctatccgcaatctcgagaaacaattcaagggcttcaccctacaacatgtggaccgtgccaagaacgaagaggccgatgcgttggctaaggcagtggccaaaggcgaggccttgccctccgacgtattctaccacgtcatcggcacaccagttgtccgcaacccagaaggcttacaaataactaatgacgtcgaaggccatcacattgtcaacctcatcatgactgaagattgcaacccttcgcaattcaccaagctaatcgcccacacatggccacttcaacgctgggggctggatattgtcggaccactgcctacggctcaagggaacctcaaattcaccttcgttgccgtcgagtacttcaccaagtggatcgaggccagagcagtatccacaataacgttgaagactgcccaaaagttcttctggcaaaacattgtctaccgattcggagtcccgtccgaactcacagtcgacaacggcaaacagtttgacagccaagactttagggatttctgtttctccatcggcaccaagcctgtcttcgcctctgtataccacccgcaatccaacggcgtcgtcgagcgcgccaatagcaagattttcactgccattaagaaaagacttctcgatgacaaaaagggaaaatgggccgaccaactgcctgaagtggtctgggccctaaacacaacagaatgccgggcaaccggattcacaccattttgtctattgtatggatccgaggccatgacgctgcaagaaataaagcatgggtcgccccgaacaagcacatcagcagttctcgatgtcgacgaaccaacgtccaaagatctcatcgacgaagaccgcgtcctcgccctacaggccctcaacaaatataaggctcaaaccaaggcctggcgcgacaacgcggttgtcccaagagagatcaacaaaggagacctcgtactcgttcggaccacccggatagaatcatggggcaagctggagccgaaatgggagggtccattcatcgtcaagtcgaaggcatcccccagtgcgtacaggctagtaacgccttccggcgaagacttagagcactcctggaacattgacaatcttcagaatttttttgtttaa

SEQ ID NO: 102225 - DNA, 511 bp, Zea mays
  unsure (1)..(511): unsure at all n locations
  Clone ID: MRT4577_24736C.1
taaaaaaaaaaaaaaaaaaaaaaaaaaaaaaaaaaaaaaaaaaaaaaaaaataaaaaaaaaaaaattttgtaccttgggccgacctttggccgggacctctctgtggggcggttttttgcggttattccctcccccttggcgggcctttttgggggtgctttttggggggtcccttttcggccctttaggggggttctttttacactttttttggcgggtcgttttccagnctttttgtctgggtaaacccctggctttcccctcctttttggccttgtggcacattcccttttcgcccgttggtgttcttgcgaggaggtccgtaccgatcgtttttcccaatttttgcccaccttgaatggcctttggacgccccttgtaccggcgttttaagcgcggtgggtgtggtgtgttcgctcagtttgcccgctatttttgccatccccctaccgcccccttctttggtttttttccctttttttctggccctgttggcggggttttccccgt

SEQ ID NO: 102226 - DNA, 292 bp, Zea mays
  Clone ID: MRT4577_24737C.1
atcttagaggccttggacaaggacagctcaccaaaggatgacgtctgggactctgtgtccattatctcgtttccggaaaaggagcaagaagatgttctccaaacgctttgaaccaaagcatgggcctagcccactggctccctggaagagatcaagccatcggagctgctagagttctgtctggactttccagagaccagtattcccttttgctgcctctaaaaggcctgtccctgcagacatgagagacagcaggtctcatgggggtgacaagcttcttttttttcctaaa

SEQ ID NO: 102227 - DNA, 333 bp, Zea mays
  Clone ID: MRT4577_24738C.1
taaaaaaaaacctggcagggcaactgtgtataggtgggcacagtggagcattcagcttggcgatacgacatgtttctttgagccgtgaaacactacacctagagggagtggtggcagatgaaacgaatcaatgtcccactgagattttacgatacaagtacacgggcagcttgtctcagaaaccaccaaacatagagttgtaaaacaggtaccttatgggggcaagatcaagaaaactactaacctaaccacagacgggggacaacacaacggcggtcacagtcctgtttattgggaacaaattgagattgacgactccctccttggaaacga

SEQ ID NO: 102228 - DNA, 242 bp, Zea mays
  Clone ID: MRT4577_24739C.1
acgtaagctcggaattcggctcgaggtcaaatcgagctgccttatctttattataaatttaataggtgatctggggaccatcttatccctacgcggcgaactggagaccttgtggggtggggctccttaccatgacctgcctcacgactgcttatgacctctatccgctctcctcaagtgcggtgagattgcttacatctacctaccaagttaccgcagtactggcgactcgcgcggattcc

SEQ ID NO: 102229 - DNA, 361 bp, Zea mays
  Clone ID: MRT4577_2473C.1
ctgactggcgcaccggactgtccggtgtgtttctcggatagtgtccggtgcaccaggggacctcacgctgaactcttcaccttcgagaaaatccagaggcgctccgctataattcaccggactgtccggtgagccagcagggcaacgactacttcgcgccaacggtcacctatagagacattaaatgcgcgccagagcgcgcagaagtcaggcacgccgaggtggggcgcactggacactctacagtgcatgtccagtgcgccaccggacatccaggcgggcccagcagtcagagctccaacggtcggaacccaacggcatggcgacgtggctggcgcaccggacactgccagtgtgcacc

SEQ ID NO: 102230 - DNA, 282 bp, Zea mays
  unsure (1)..(282): unsure at all n locations
  Clone ID: MRT4577_24740C.1
acgagcagcacaggcatggtgaaacagctattccaaatgcaccgatcgtgcctgctgncccggggaaggaccgccccccgctggtagatcttagactccgacgacgccgacatcacagtgtacctcgtcatacatgccctgaagcacaagaactgcgtggagcgcgtcttcgtgcatcggatggacaaagccgtatggaactacttagaagggcggatccacgcgacctaaccctcgaggagagcgcagcaaataacgaggatattgaacaaaccgagatac

SEQ ID NO: 102231 - DNA, 1275 bp, Zea mays
  Clone ID: MRT4577_24741C.1
tcggccgggtgatgttgtagcagctgagaattcagatgaggccatcatattatgtcttgatgagtttatggtaactgatgttgctgatgctatgattctgaaccgtctattcagacaattgttcagcaaaggcgttattcttgtttcgacttctaaccgtgctctagataagctttatgaaggtggcttacaacgggaccttttcttgccatttattgacaccttgaaaagctgaaattcgaattcagtttcgccgtgaacgctttggccatgacatagatctcgacacaaacgagctggttctacgcgatcaacctgaagaagcaatcctgttgaaagtcaacaacaaggtcccagggcttgggctccaactagatgcttcagaattgaacctgctttaccgggatagatacagcaccgaggtaccagattcgtatgaacatcttctactggatgtgctagatggagatagtcatttattcatgcgcaacgacgagctggctgccgcatggaacgtgctgactccgataatccatgagatcgatcagaacagagtagttccatagctctacgaggctggggacagagggcctatcaatgcttaccatctcgctgctaaacatggggtgcgatgggatgatgactggtgagtcgatacatggcaaagattctcgatgcgcaacgagattcattaccaatttttgtcgttgtatcgcagtcagctgtacaatatgccttctgcaatcggcctgatcaatgactttcgaggagacatgcaaacatggtttctttcctgtcctgtagaagcactgttgattcaagtcggaaaaaaaaagaaaaaagaaaagaaaagatgcttgcaacaagccgaggccctgtcttgtgcatttagcttttcgtttgccccaagtattacagtgtttggaaaatggcaatgaaaaaatggcggcaaccagatcatacgtaattttgggcttacattataacttcctatataatatcaaaatgaaagcagaagtggtcaatacgtaggcaaaatggtagggggtcaggctgtgtttcgttcggggataggatggtccgaaatatgatatttcccaagtataataaaaaaagtctgtaagcaggcttagatggagggaaaaaaaaaaatgaaccaagaaactatgtgagagaaataagttggttttgtatccaaaaaaaaaaaaaaaaaaaaaaaaaaaaaaaaaaaaaaaaaaaaaaaaaaaaaaagaaaaaaaaaaaaaaaaagcggcc

SEQ ID NO: 102232 - DNA, 125 bp, Zea mays
  Clone ID: MRT4577_24742C.1
agcccacgcgcaactcttattcaaatgtcttgaaaaaacagcccctcccattatccttatggctgaaaattattatccacacggccaaaataaagaacgtgataaaagggtaccaccgatccgga

SEQ ID NO: 102233 - DNA, 1030 bp, Zea mays
  Clone ID: MRT4577_24743C.1
accaacccaatgctatgcaactatatgtcattacattctactaatgctaaagcagttctttcaaggacacgaaaacaaaattgttggaccatagctttatttcatagtataagaagcagttcaccatataggcatataccaagtataatgatgcacgactcatgagtaagagaccaggttatttcgagcagtacatactcgaaaaagcgagtgaaagagctagctgttcaccgactacgtgcggcgtagacaaaggacgcagctgctaacacggttgtggtagctgggcacagccatgtccagaccacattcttcccactgcgctctgcatcggctactgcaagctgcacctgctcaagctcactgttcaagtcattgatttgtttgtccctgccaccaacttctgccttcagcaccccaatctcatgaacattgtctctgttacaggattcaagctcctggattttggacttcagcttttctgcttcagctttctcctgctcaagttctttgagaaccgaaactttctcatcgtggaggaaagaagactttccatcaagatcatcatagagagcacggagcgcagccatggaactgttgagcttcttcagttcatccctcaactttccaacctcagcatttttagcatctaccaagactaaggcactatctttctcagcctgaaccatgtccacgttcaccttcagcatctccaattcaccctccatcatcttcttctcagcctcatgtgccccagcagcagcttcattcgccatcgccacttggtcaagctcactttggagcctagccacttcagcagccacaacaatctgcttctggtccatctccgcaagcaaggcgtggagcttctccacctccgccttggtagcggccatctctacatccaatttgtgcccttccaactccaatccatggttcctagcgacggcctctgagagctctgcctccaaagaacccaccttcgcctctaattccaccttcctggattgcagagcctccgactccttca

SEQ ID NO: 102234 - DNA, 2038 bp, Zea mays
  Clone ID: MRT4577_24744C.1
ggcagccatgccgcgcggacgggggcccgaaccctagtggcggacgagggtgctagataggggggacacgtgacccggcaaccatgggcacgggcaggaggaagggcaagcgcagcgccgccgtggcttccgtcgacgacgctaacgaggccatggcttcggcggaggcgctctgtgtggagcatcaggacccaccgctggcttcagcggagggaaccgatgaggccaaggcggccaacggggaggcgacggcggtggtggagccggacgagccgaggcgggactcgtcgccggagcggggcgacggggatgccgcgcggctgaagctcctcaacggcattctcatccgcacggcctccgaggagcgggagcgggtggcggcgcttgaggcgcggctcgctgaactctccgccgacgccgccgtgctcgcggacggggagagcgcggtactgctcgcggccttctctgcccagctcagggccgtggaggaggagcaggctgcgctgctggaccgcattgcggtggcgcaggagtccctcgagcgcgtccaggcggaggcggccagcgaggccatggccagcgccgacgccgcggcgcggcttcaggaggcgatcgtggagaacggctcgctctcagagcagctccgtgcgaaggcggatgaggcggacgcggctgccgagcgggtggccggactggaggctgcggttgcgggattggagtcccagatctcggacctgcgcgcgaagaggagtgaattcgagagccagttggaggccatgcgggcgtcagctcatgctgtccagtccgagaaggatgtgttggaatcaagcttcaacgagctcaagaaggaaaacgaggcgtacaagcaggagatggaggctacgcttcaggatcaattgaaggagtcggaggctctgcaatccaggaaggtggaattagaggcgaaggtgggttctttggaggcagagctctcagaggccgtcgctaggaaccatggattggagttggaagggcacaaattggatgtagagatggccgctaccaaggcggaggtggagaagctccacgcctcgcttgcggagatggaccagaagcagattgctgtggctgctgaagtggctaggctccaaagtgagcttgaccaagtggcgatggcgaatgaagctgctgctggggcacatgaggctgagaagaagatgatggaggttgttgtggatgctgaagtggctaggctccaaagtgagcttgaccaagtggctatggcgaatgaagctgctgctgctaaacatgctgaggttggaaagttgagggatgaactgaagaagctccacagttccatggctgagctccgtgctctctatgatgatcttgatggaaagtcttcttttctccacgatgagaaagttttggttctcaaagaacttgagcaggagaaagcccaagcagagaagcttaagttcaaaatccaggagcttgaatcctgtaacagagacaatgttcatgagattggggtgctgaaggcagaagttggtggcagggacaaacaaatcaatgacttgaacagtgagcttgagcaggtgcagcttgcagtcgccgatgcagagcgcagtgggaagaatgtggtctggacatggctgtgcccagctaccacaaccgtgttagcagctgcgtcctttgtctacgccgcacgtagtcggtgaacagctagctctttcactcgctctttgttcacatactcgagtatgtactgctcgaaataacctggtctcttactcatgagtcgtgcatcattatacttggtatatgcctatatggtgaactgcttcttatactatgaaataaagctatggtccaacaattttgttttcgtgtccttcaaagaactgctttagcattagtagaatgtaatgacatagttgcatagcattgggttggtaacacgaatgtcatttagtactgtgactggtgaaaggagtcggggatttaacatcagatattaacattgtgggtagtttgtaaaaaaattataaagaatatt

SEQ ID NO: 102235 - DNA, 220 bp, Zea mays
  Clone ID: MRT4577_24745C.1
gacctgtttggatacaagggctaattgctagctagctaaaaattagccctagtgcatccaaacaagagagctaatagatgagctaatgttttagccaagtcttcaattagttgttagtgaactagctagccaacgccaattaatttggggctattttttagccccaactagtcagctatgtgtatccaaacaggcccttagtgttgtgaaattatggttg

SEQ ID NO: 102236 - DNA, 420 bp, Zea mays
  Clone ID: MRT4577_24746C.1
atcgaatgtgattttgtgttggattcatcatttttcatgtgtgcagatttgttcttatgcaaacccattgcacccactatgaagtatatggaaggaggacaccaacgtgatagtggagactgaggagaaagaggctgatggctgggaaccagccacgatggcggacatcaacgggggaagtcgtgggaggcaggtgatggcgacatttgctgtcaaccctagctgtctcgccaagatcgtgccaggattggaggttttctctcctttggagcaccagttatgatataaaatgatagggtttatactaacaatcgacgattttatgcatattcttagtcgttaaccaatcttgtataccatttccaatacttgtacaatgtttttaccaataactgggtaattatatatgataacttgggt

SEQ ID NO: 102237 - DNA, 831 bp, Zea mays
  unsure (1)..(831): unsure at all n locations
  Clone ID: MRT4577_24747C.1
cgcacctcaagaagaagctcgccaagacgggcgccagggaaagcggtgccagcgccaagacgacgaagaagagcgatagggccgcggcgcccaaggggcagtgggagcgacggctgcagacgaacatccacaccgcacgccaggcgctccgggaggcgctgtccatggacgacactgcgccgccggcaatcaagccggagccgctgccgctgccgctgccgctggggcagctgccggcgccagccagccaggcgatgtacgcttccagcatcgataacatagcgcgtctgctggagggctggatgcgtcccagcgtcagtgggaatgcgtcagctgagtccatgtcctccttctcggcgttctccggtggtggcgacggcgcgtcggcaagccacatcggcacggcgcacacgccggaggggttcaccggcacgagaaaggaagagggcgcggggccggggccgtcgtcattaccaatgttcgagaactggctgctcgatgacggcatggggagcggtgatgcgtccctcatctgcgtcccgctggcggacccgtgcgagttcttttagactgaactggagggggataaggaaaaacagaataaaagtgctagattggaagaagaagaagaaagaagccaggaactcgattccctgataatatgatatagatcgacacagtgcaatgctggtcttgatatatagtatagttgttcaatccagttccttgcttcttatttctatgaatttggattttttttctattctcttttttgtttacaaaattaaggtttgtnnnnnnnnnnnnnnnnnnnnnnnnnnnnnnnnnnnn

SEQ ID NO: 102238 - DNA, 294 bp, Zea mays
  Clone ID: MRT4577_24748C.1
gtctttttgagaaccgaactaccggcgggggatgcttcattgaatgtagcgacaccacttctagaacggccggcagttcaggaccttgaaggaaaacgcactcttcattcacgcgcacaacaagctcaaaaaccgaccctaccgcctccacctgaaccgttttcccgacatgcaccatgaggaattcctttacagattcttccactcacgcataaacaacctccgtctttagcccaccagtgctcccctcgttccagaattcatgtaccacgactccaccgacctgccgcggtt

SEQ ID NO: 102239 - DNA, 288 bp, Zea mays
  Clone ID: MRT4577_24749C.1
tgaattcggcacgaggggaattatcgacatggccctttaactatctccatatcattgtctacctatgtgatataagataccgtaggaacgcacgggcacctaatctagcgaattcggaagcgggactctataaaaacaaatgaggtactactgttcaagataacgcgtagagccactactatggaaagaccttttactttcttattcgaatgaggcttttttcacatatcttacttgttaatggaccattcatagggtctattggtggctgaagggcgaaagattggt

SEQ ID NO: 102240 - DNA, 568 bp, Zea mays
  Clone ID: MRT4577_2474C.1
gtccttaggggccttttttttttttttttttcagaagcaagtcatttatttaaataaacagttacaataaattagacaacacagtttgattttattgattctacaaggtaagaatgaccctaaacatgaaagacctatggatcaaaaagggaaacaatagagcaatattatgaaaacaagcagcatggcgtgctagagttgcctgctctacctcgtcggatttggtccatggggcggacaaccgcgtcagcgaaccagcctggggaggagacgcgcgggctgttcggcgtggttcaaccaggggcggagaagagattttgaatctctagcggagcatttctattcttctctttggcttagatccggtggtgcagggtgccggttgtggcgctcgacggcgtgcagggttcgctgatgccgatgcacagcgccaccgcgtcggcgctgctcacctccatgcgaggaggaggatggagaccggaggaaccgaggagccgcggctcttgcagacgcgccgtcgggaatcgggagtggaggaatgaaatgatgggaagcccggcccggccgg

SEQ ID NO: 102241 - DNA, 595 bp, Zea mays
  unsure (1)..(595): unsure at all n locations
  Clone ID: MRT4577_24750C.1
gnaagatgcaaacactttgaacttaaattcaaaccatctgcatcagttgagcttccttccggttgggaacctgggccacaagagggactcattgagtgggatgaagactgggataaatttgaagatgaaggttaaatacttccactgcattctcctctgctattacacaagcatccctgaagtctgattactttttaaagctggcaattgtctgtttatatatcggggtactctgcatggctgcaagccgagttttgcaatccagtgtttgccatgctactgtttaaaaaaatatttgtgactttactactgtgtgttttaagaaattcaatactagtaactaatctgtgaaagagataaaagatttcatacctcttacacgtgttaacgtatactagcaaagccatatcctgaaataagcaaccttgactgtttctaagcttgatatttgtgtagctgatattatttattagtgccatttatggagataatttttttgctatgatatccttgtttaggttcctttcattgaacataccaagcccccgcctctgttctagtgaaccttctgttgttagaacattgtttgtgtgat

SEQ ID NO: 102242 - DNA, 535 bp, Zea mays
  Clone ID: MRT4577_24751C.1
gctaccaccgcactgacacctggcgcgtgagacctatacgcgcgatcttttggtgctggcctggtggcacagaatggtgatgcgaacggccagaaatgcaaggaggatttcttgaacgccgacctaactgagctctgttacattccgaaccgtggcacaccgtaccagatggttcacaagctcaagcatggctgtcttatccgcgcgacagagattaccgggactgattccgaccttacggggcggatcaccacatcaggtgagccagatcgtgtacgaatcagcgaccggacatctgctagtgatcccgcagacaacggagctggttggccattatgacaacacagtgcctgtatcggccagaagatcgtccttggctttgaagagacatcgtgctcccgaacggcttcactctcaagagggggggcatggccgggacggacccgcaggaatacaccggatgccacgataggtcaatcgcaactggctccagacgtttggtttggtcatgcttattgcggtgatcggctcgggg

SEQ ID NO: 102243 - DNA, 496 bp, Zea mays
  Clone ID: MRT4577_24752C.1
tcccattccgtgccaccgccgccgcgctgcgtctgcgtctgcgtgcgtcgcccgcccgcccgcccgcagtgtccgcagccagagccagagccagcgcacgcgctgctccgacgacgccgaagcctcgtccgcgagcgcgtggctaagcaagcactcgagtcgagctccctccagcggcgggcgcagtgcagccaggccgcgcgcgccgcagcatgaacggcgtcggcgacgcgcacgcggacgtggccgcggccgccatggtgcagcagacgctggggatgtcgctgccgatggcggcgttcgtgcccgagcagggcagcgccaataagctgaccaggccgccggggctgccgccgctgccgcaggcgttcgtggcccaccagcgcggggacgtgtgcatggaggccgtcgaccccgccgctggcccgcgcaaggcgcaccggcgctcccgcagcgacgtcccgttcggctacttcccgccggcggtccaccacca

SEQ ID NO: 102244 - DNA, 1122 bp, Zea mays
  Clone ID: MRT4577_24753C.1
cattgggtacctcgaggccggccggggttgaaggcccgccgagtgccttcgtatccgacggcccaccccgctcgtctatatccgcctctaaaccctagctcttccattcttccccctccggcgccgcctcccccagacacttcgccgccggcaagatgggccgcgtgattcgcgctcagcgcaagggtgcggggtccgtgttcaagtcccatacccatcaccgcaagggccctgcccggttccggtccctcgacttcggcgagcgcaacgggtacctgaagggcgtggtcaccgacgtcatccacgacccgggccgcggcgcgccgctggccaaggtcaccttccgccatccattccggtacaagcaccagaaggagctgttcgtggctgctgagggcatgtacactggccagttcgtttactgcggacgccgtgctacactctccattggcaacgtcctgccgctcagggggatccctgaggggtgccgttgtctgcaacgttgagcaccacgtcggggatcgcggtgtcttcgccagggcgtctggggactacgcgatcgttatcagccataacccagacaacggcacatcgaggatcaagctcccctctggtgctaagaagattgtcccaagtagctgccgtgccatgattgggcaggtcgctggtggtggcaggactgagaagccaatgctgaaggctggcaatgcctaccacaagtaccgcgtcaagaggaacagctggcctaaggtgcgtggtgtggccatgaaccctgttgagcatcctcatggaggaggtaaccaccagcacattggtcatgcctccactgtccgccgtgatgctcctcctggccagaaggttggtcttattgccgcaaggagaactggtcgtcttaggggccaagctgctgctactgctgccaaggctgacaaggcctaaatttgcgttacgcagcattagccatcttatatagattaaaaatatttttcctgcatggatcttaattttgtatcattctgatagcgatgaactgatgatactatggacattccagtttttgttgcaagctattgatgatattttttcttctttaaaaaaaaaaaaaaaaaaaaaaaaaaaaaa

SEQ ID NO: 102245 - DNA, 409 bp, Zea mays
  Clone ID: MRT4577_24754C.1
aaaaaaaaaaaataaaacaaaaaaaaaaaatttaattaaaaaaaaaaaaaaaaaaaaaaaaagaaagaataaaaaaaaaaaaaaaaaaaaaaaaaaaaaaaaaaaaaaaaaaaaaaaaaaaaaaaaaataaaaaaaaatggccgccctttttaaagatcccaagtttatttccccggcctttcaattaaaaactttttttttggacacccctaatttaaattcattgaccgctttttaaaaacctttcacctttaaaaaccttggctttccccaattaaatccctttcaaaaaaattccctttttccaagttgccttaaatccaaaaagcccctcacctttaacctttccaaaaatttcccaaccttaaatggcaaatggaaccccccctttaacccttcttaaaaccc

SEQ ID NO: 102246 - DNA, 408 bp, Zea mays
  unsure (1)..(408): unsure at all n locations
  Clone ID: MRT4577_24755C.1
cccaaggggagggatctggctccgntccgggtcaggtcccggcctgcctccggcttgcagttccggcgggggggnngntgggggagtgggggangnnggggggcggcggagnttntggntnntggggtggatgtctcgggaggggagggagggaggatgggggggggggagggggaaaccacccaggtgggggaggcactggtggggaagaaggngaagggggacgggcctagggggccnggntggcggggggaccggctcgagggggagggggagggggggttccctggcaaggagctcttcctcatgtgggtggggagcatcagctggaccgtgcggaggggaggtgtggtgggcttattgtatttactgataagggatatgcaataaaggtaaaaaaacaaaaag

SEQ ID NO: 102247 - DNA, 618 bp, Zea mays
  Clone ID: MRT4577_24756C.1
attccttcaccagcagctcgaagctctagttctagctagttaggagaggcggggaagatggctccgcttctcgctgttgcaatgaagcacgctgcagaccatcctgggcttatgagccgcctaggaggaccgaacagagagagtatctcacgagaacacctgtcgtcttcttctccacagagcagacagcgcaggcgtatacttatctgtagtacgcgatctgcaagaggacgtcgctgacatggagatctcaggtagagtccctcgggattcgcactattggtttggcctaccctctggcttcgccttcgagaggcgccacgtcagcgtaccgaattgatattgcttggactagtgatgtgaaaggtgtgaagcatctgcgagcgcttctgacacgagcatccggtaaggatactggacgggaggaattcagacatggggacgaattctcagcatatgtacaatgcggacaggagattgctcaaggatctgttgatggacgcatatatgttgtctatctcttggaccagagtactggcggacgtaaccggagaatgaggtgttagcccggatgttctccagtactacagaaagctcgtcgacttgttgctagacgac

SEQ ID NO: 102248 - DNA, 175 bp, Zea mays
  Clone ID: MRT4577_24757C.1
cttaccttcactccagcagactatgaagagcccatctttgccccttacactctcacttttcaatttattttacccacgaaaccaaagacttcgtaaatcttcatcaatcttcacccacttaaacttacatatactgtttaaacatttaattatacattctgcccatttattttac

SEQ ID NO: 102249 - DNA, 200 bp, Zea mays
  unsure (1)..(200): unsure at all n locations
  Clone ID: MRT4577_24758C.1
ccccctctctctttttttttttttttttatcctataacctgttcatatttctccccatgataaagtcacatcatagcacagcctaataatagcccatgatagagatctgatacaaatgattacatattgaactattattatttgctcactttntaatcatacatcatccacagttacactattaggttcctcgttttcat

SEQ ID NO: 102250 - DNA, 840 bp, Zea mays
  Clone ID: MRT4577_24759C.1
gcaaaatctgaatctggcaactgaagttttgagtttttactctgttgttaatgtcatcaatactgcagaaatatgcatttcagctatagagtctgccaatatgatatatgatggtcagagtagtttatctggagcaaccacaccacctcaagagctctgctgcccattgtctttgaagctgatgcgagatcctgtgataataacatctgggcaaacatatgaaagagaaaatatcgagagatggttcagtgagggatatgatacttgtcctaggacaaatatgaagttaaagaacttcacggtaactccaaatacatgcatgaaggctgttattcataactggctcaaagatcatgagcttgaatctactgatttgcctaagcaatttcagaattattattctgtatcaagtttgcacaatatctctgcacctctaattatagaaaagaatagagactacacagttgattatagcagctcatcttttggactatcaggtgctagttatatatcatcccccatgagggaaacagagcagtcaaagactagttttgaccagttttattctaatgccaatttccagttgtatttgtccttctgcaactttgacaaggcaatgttcttgggtttctttcatgagctatccgagcttccctttgaactgcaaagaaaagctgtcagagatttgaagacttctctgagcggtgaaaatgaaatttggcattctatggtctacaatgggttttttgaagcattccatgaattcctcaagaatgacagtggaattcacacactgcaagctcgaagggctgggattcagttttttcttgctttcctttc

SEQ ID NO: 102251 - DNA, 741 bp, Zea mays
  Clone ID: MRT4577_2475C.1
ggccgctttttttttttttttttttttttttttttttttttttttttttttttttttttttgtttttttttttttttgcttttttgtttaatggaaatttgttcagatccaaattatccaaaaaaaaactgacgcactgaaaaaggaagaatggtggtgcgacaaatggattaaactggaaaccagacttacatatactagaattaattgaatcccctaaagcttcccgtagcatgcaagtcaaaacaaaaaagaggaaaaaaacgattctactatggtttttagccattagcgacaatttcgtggatctcgccactgatctctggatcatcagatctaactgccagcttaatggccacctccttcggtgcactgattccaaatgaaagcctcaccaagactttcacgttgccaagaaacacaccagagagcagacaagtgtgcgaccttgaattgcttgggaccacgtcagttccctaacaaggctgcatgccaaggatgcttataacagcacttacagcctcagccaagctctcccctactccaagcccatactcatcaactcgctcagtctctggatccatgttttcccaggcatttcggaagttagatactcccaccttcaacatataatcagcagaaactatttcaagatcttcaagctggtactcatcctcaacaccatcatcttcagtttcacccgtggatggatcaacctccttaacaatgaatttcaggata

SEQ ID NO: 102252 - DNA, 204 bp, Zea mays
  Clone ID: MRT4577_24760C.1
gagcgaatgccataaagcaattgttctactgggctcgcataacccaacgctctccaaacaatgagatgacagaagagcacctaagggcaacgagaggcctatgcatttggcacaactattcttattggcatcagcggtacacacaacctgtttacattacaaggatgcccaaatggaacattcggatcttaagcgacaacaaaa

SEQ ID NO: 102253 - DNA, 557 bp, Zea mays
  Clone ID: MRT4577_24761C.1
gccaaatgccaagcaacttggacacccttatcgttgcaactttattgcatatgtggcactggaagccaaatcattcatgttgactgtgccctagtagcttattccagtgtctctccatctctgtcatgcatcatatcatgcatggcaattccattctccttgtcgttaagcgtgcccggggagggagctgaggaccagccctctaggcgcaggctctccaggacaaggtcaccgtcgcggtagtcgtcacggaaggtctccgtgtcttggagcaagcgcgcaacggccgcccgcatgagctccttcttccactcgggcgggcgcggcaagcccacgtgcttctccccgaactcgtcgcagtagtcgaagtcgaagaagatggcatgcgacatgcgcctgggcacgccggccttctccctggcgcggtggtactcctcggccgcccgcagcatgtactccgccggcggcagcagcctgcgccccgacagcgcctgcgccacccacctggcctgcacctggtagaacagcggcgtctgcacctggcttggcacgcccac

SEQ ID NO: 102254 - DNA, 140 bp, Zea mays
  Clone ID: MRT4577_24762C.1
cagggctgcgcccctgccttattcttctccttgactatagggttgtgcccctgattcttctctgtaaccatctgtgatgtacaccattgatctatatattcacacgacagccactcctataggtgtggattatttcatct

SEQ ID NO: 102255 - DNA, 163 bp, Zea mays
  unsure (1)..(163): unsure at all n locations
  Clone ID: MRT4577_24763C.1
aacnccacccaacnccngtnagcngtgacacagctgtacncctctccccacnccaggcgctcacacnncacatccccttccctgccacaggaatccgccgccacantcnccncangcnccacattgtgggattgagccgaacacaagcacccnccnccccgaa

SEQ ID NO: 102256 - DNA, 435 bp, Zea mays
  Clone ID: MRT4577_24764C.1
agccttccgggaagaccagaagggacccgggaatttccgcctttcttgtcaagggccggggggcaacccggaaaaatttagaaccgcttgaagaaggaggcttccggcccattcttgaacaattagaaggggccaaggttccggttgaggctttccgtagcggaggccttgcccttcttgaggttcttaaccaacaaggacagacccctaatcccattggattcttccgttggcccattcaaagttggaatgcccgatggatggaccaaccatgatcaccaatgggatggccttttttatctgtttgcccttgtccaacgacttgacggcatgttaccacggggaaggaggtttttcttaataattattttggatggcccacctttgttggttcaataaagaactaaggacaatctgaggggcggccgttttaaa

SEQ ID NO: 102257 - DNA, 288 bp, Zea mays
  unsure (1)..(288): unsure at all n locations
  Clone ID: MRT4577_24766C.1
ttttgtggataaaatatcggtcctaaggtctcgctcgtcaagcatgcatgcaatatcatcatacttcgcccaggcaatgctcggtcgctgtatatgacgactagcacaaccactatacatagtntacgctcatgcacacacacacggggtgggggggggcgtcctgcatggtccatggatcctgtcatacttctcatggctttctgctgtcgggcatggctcggactcgtgcttgtccctgntctgngccccctttttttttgggggggcgggggggtccttttttat

SEQ ID NO: 102258 - DNA, 269 bp, Zea mays
  Clone ID: MRT4577_24767C.1
catcaatgcagcccgacggcgacgccctactgctcgcctaaatgcccatcggtgccgcagcaacgttgacagcagctcaagcatgtggagcctcataaaccgtaccaagcgatcttcagcttggcccttcagtccatcctgcagcagcagcctcaaagcggccacgttgcggggctgttcgctgcgcaaatagcgcaacaactgacagcgatatgcggcctgcatcaatcgactgcatgcccctacgctgatgtcggaagtgtccccca

SEQ ID NO: 102259 - DNA, 330 bp, Zea mays
  Clone ID: MRT4577_24768C.1
aatagaagcataatgatcattactcttaatggtcaagacacactactgactcttcaaggttccgggctcgaaacgagggagcaagtcgcaattgacgatcaaatcttagatgttacacgtgactttgacctttcacatgttaaaaattaagaagtcgacacgctacactctgaaatgttatatattatggacctaggacctaaaatcttcaatatgtgatatatcatgcaatatgcggtctacatagatcattgatcctttaatgcatcacacatgacaatatgatctaagatcttataccagattctactgattactcatacttgatag

SEQ ID NO: 102260 - DNA, 637 bp, Zea mays
  unsure (1)..(637): unsure at all n locations
  Clone ID: MRT4577_24769C.1
cggccgggagaccatttctgctaccagacattgatttgtaccccagtatcaatctctgcgtaactnttgggaaggtaagccactagccttgctttcatcacttcttgctggatatagatggttttctttcacatgtaggagtatatatatatatgaaccttgtagcaagcattcgatagtcaaacaaagccctacagacatcaatctctaatccctatatttggtgagaattacaatggaaggaagcaagtcggtcctgctcttgatgatgatcctgggaagtttgatggttcctgcacactctcggaacgttgttcgtttttgcaaatgtcagaaacagacctgcaacatgggagcactattcgacgctgtttgctactgctgtccaggcggcagttgttattcgacgatgcaggattgcgcaccagcttgccgctgcgacaatctttcgcacgccccactaaatgtaagggatcatgaatcggtcctgtgatttattgcaaagatagaaataaaaaaagcggtgacaaaaaaaaaaaaaaaaaagcggcctaatataaataggaccagcgtctcgtccgggtctgcgagaagggcagctctgccttgcgataaaaaaaaaaaaaaaaaagcggcc

SEQ ID NO: 102261 - DNA, 798 bp, Zea mays
  Clone ID: MRT4577_2476C.1
tcctgaacaattgcttgaacaggttattgttttggttgatgcttctgaggctgacgaatttttagaagttgcttcaaagcctttagaatcattaccatatgattctcctgggcagacctttgtggcttttgaaaagccagaaggtgtcattgccaccggcaagttctcaaatatcctgaaattctttttaaggaggttgatccatccacgggtgaagctgaagatgatggtgtcgaggatgagtaccagcttgaagatcttgaaatcgtttctgctgattatatgttgaaggtgggagtatctaacttccgaaatgcctgggaaaacatggatccagagactgagcgagttgacgagtatgggcttggagtaagggaacccttggctgagcctgtaagtgctgttataagcatccttggcatgcagccttgtgagggaactgacgtggtcccaagcaattcaaggtcgcacacttgtctgctctctggtgtgtttattggcaacgtgaaagtcttggtgagactgtcatttggaattagtgcaccgaaggaggtggccatgaagctggcagttagatctgatgatccagagatcagtgacaggatccccgaaattgtcgctaatggctaaaaacaatagtagaatcgtttttttactttttttttgttttggcttgcatgctacgggaagcttgaggggattcaattaattctagtatatgtaagtttggtttccagttgaaaaaaaaaaaaaaaaaaaaaaaaaaaaaaaaaaaaaaaaaaaaagggcccgggtacc

SEQ ID NO: 102262 - DNA, 460 bp, Zea mays
  Clone ID: MRT4577_24770C.1
aaccccaaaaaagcccccacccgcctttggattaaaaaaaaaaacccccccaccccatgaaaggaagttgcggggttcccttcccggacaattttatttaaagccccgggcaatcgaccacccccagaaaatatataggcggaaaaactttgggttatcatttcccaagcccctgaccggaaaatagtaagggcccctagtcccccccttatttaaatccctcggattaagggccgaaatggcggcccgccctcaaccccaaaaaccaggggatgccaaattgaaggcggaccacctgttttaaacaacccggggacccctctccatgaggacccccggcttcagggcaacacagttccccttcacattgttccccttccccggaaaatggaaaccccaccccgggaaggttttggtaatcccaacaatgcttttgcaaacaagcttcccaggcggtgga

SEQ ID NO: 102263 - DNA, 480 bp, Zea mays
  Clone ID: MRT4577_24771C.1
ggcgcaaagcaagcagaggaaaaccagccttgcatttgcgaatcgataatacatgggattaatattaaacaagggggaaaaaaacaagggttaccctgggaataaaaagcgaaaaagggaagggcggagggccagctgcagtgcccaaagcccgggggggggtcccccaaggagcccactttgtcagctccgagggtcatgtcatggtttccccgttagggtcacgggggccgttgccttcacgttcacaagcggatcacgggtttaacacggacccggggtccttgggaagctgctgctgctgctgcaaaggcaaacccttgccattagtcccacccccggggccgttgggccccatggcccactgcgccgggagcaccgacatgctgggggaggccggcacggggtcggctccggctcccccgttcatgggggggggcggcaaccgcataacggccatgtggtgcgcgggggggaccc

SEQ ID NO: 102264 - DNA, 2305 bp, Zea mays
  Clone ID: MRT4577_24772C.1
gccggccggtccggggaactaactcatcagcgccgtcgcgtctcgagcatcgcctccttgtccggttctaccgtcccatctggattcctcttctgctccccttctcctcccttcccttcccttcctcgacttcacctcaccaccatctccagctccatccgcacgcagccgtttaccaaccgacgcagcgaggagatgaacgcgtcgcagttcatggacaagcagatcctcggcctggctgcctccgcttccccctccggcggcggcgcggggggcggtgggggtgtggatctcagcgatctgatgataccgatcccccaggacgacggcgagaaccgcctcggtcgccggcgtagcagcaccagcgtcaacggaaccgcatgcgacatgctacccagttatgacttccagcccatccgcactagtgacggcgccgcggccgccgccgcgcctcaggcctcgtgggggtcgctcgactccaaggcaccctctgcctcatacaacctcaagagtgctggtatattggagccacacgtgctgaagaaagttagtcatgaggaagacaggagtaactttcctacagttactattgcggatattgatcgaaccatgaagaagtactctgataaccttttgcatgcactggaaggtgtaagctcaaggctttcacagatggagggtagaacacaccaactcgaaaactctgttgacgagttgaagttaacaatcggtaactataatggtagcactgatggaaaactgaggaaccttgagaacatgctcagggaggtccaagcaggtgtgcagattttgcgagataagcaggaaattgtcgagacacagctccaccttgcgaagctccagacaaacaaaaccgatggccaatcatcagaaaatagtgggtctggacaagctggcttacagcagcagccggtggttcctccacaagcagccattcagccacaacaagtcctaaccccttcgcaaccacctgcacttcctgcccttcctgctccaaatgcaccgcctccacctccaacgcttcaaaaccaatcatcattacagtttccaagtcatttacaacattcacaggtaccatctgtgccttctgttgcactggcacccacagttccagctttaccaagggatgcttactatgccccatctgctcagccgactgagaccatgcaccagcagtatcaagctccgccagttccacagccacaggcacctcctgcaccacctcagcagtaccaatcccaaacccagttccctcaatatgcacagccacctcagcctgcaaatgttaacccttcaactccccatgtgccccatgcaccccagcaaccagaggaaactatgccttatgcaccagctcagagctatccacctaatgcaacccctccaccttatatgcaaccacctagtggacctgctcctccttactatgggcagcaaaaccctagcatgtatgaacctcctgcaggccgggctaaccctgggccaccatcatcctacggttctgctgggtacgggccacagggtggaggtagtttctctgaatcttatggctatactggatctccttcccaccgtggcaatgctggaatgaagcagtcttcaccttttgctcaatcctctggaggaagcggcagctatggcagtggcaagctccccactgcccagatgcttccacaagcagtgccgatcagctcctccagcaccagcggttcttctggcaatagagtgccacttgacgatgtagtggagaaggttgctacgatgggattctcaagagagcaggtgagagcaaccgtgcggaggctgactgaaaacgggcagaacgtggacctgaatgtggtgctcgacaagctgatgaacggatgataagttgagcaatactgtcatttcacagtcccgcacagtactatggaaacttggaaagtgtcagctcatcagctgaaacgatttttctgtctgcaacgttgcatacctgattgtgcctggagaacaataatggccgaacagccgctcatcctgattgccggtcacggttgcttcatctggaatggaaacagctcagtgtgccttcagtgaattacagtatcacaatctgaatacgttgtccattttatgtatatgtggcgatgagacattctaaaacatatactgtggtttcttgtgatatgttaataagcagctttactctgtttttaggcagtgtttcagcttgctggaaagcgctttcgctacataaaagcgaaacatcccccaaactcaacaaagtgtcctttcccaataaggc

SEQ ID NO: 102265 - DNA, 539 bp, Zea mays
  Clone ID: MRT4577_24773C.1
cccaacctcaacgtatggagcatataaatgactggattttctgaacactattcacgtacaataactaaaagggaggcaagtcggaaaaacgggcagcgtgcacggtatgcctcaccaaaatactgagttagggaatcagcgtcccttgcgacttcagggtttaagggaaggagggacctaacctgagtttatgatgcataaaaaaagctttccaatgccttaccaaggccaactgggattgcaccatcactttctgaagcatctagctcctgcttaaccttcacaagaccttcgtttatggcttgcatttattcctgaagcaaacacagccatatcttggaagctggttccatataaattacgtctttgtcaaaatcaataaacaggggcattttttcagcaagaagcttgcgtaaataatgcataagcgccattttattggttctagatcgaggtgcgacaacttaaggagactgtctaatctgaatccaacaccagatcctacagctgacccttgatttaatgcgtcccccactggg

SEQ ID NO: 102266 - DNA, 276 bp, Zea mays
  Clone ID: MRT4577_24774C.1
attcaatgcggtttgtctcgtactggcacgttctgggctcacggaaaccctgcatttacacccaaggacggcagcaagaaagctcctcacccagatatcctcacaacagccaaggctctcggtaatggtatccccatcggcgctactatcgtaacagagaacgtgtcatcggccatcaagtctggagatcacggtactacctttggtggggacccgctcgtctgccgtgttgcgcaccacattgtgcggcgtgtggccgcctcccgagctccaaaa

SEQ ID NO: 102267 - DNA, 466 bp, Zea mays
  Clone ID: MRT4577_24775C.1
ggcacgagctctagctccttggccagttcaaattttgcatctgcttctgcagtctttccttctctccgcaacttgagggtgttgcgcttgtgggccagggattcacaatggattttgagacggtcccggctggacattgctttctgaggttgtgtccgcttgctcgtttgtgcaggagggggagaagttatgtcgtcagtgtgattgctggagctagcaggttgttcaactaaactgttctgttccacagcaggagtaatggagtcacccacaccatccatggtgtcttgttgagcaccttcaaggagatagatcagctagaatatttgatcccggagaaatcctccttgcgacaacacatacaatgtcctgattcagagtttgtcgattttctgccttatctgctgcaaattaaccccaggaaaagacctacagctgacgaagcactacagcatccatggctttc

SEQ ID NO: 102268 - DNA, 839 bp, Zea mays
  Clone ID: MRT4577_24776C.1
ctaagctcgctactccaagtatggctgtttcttatatagatgacagtgtctgatactgtatcatgccggtattgatgccacccacccgtgcctctgctactacggcccaaaaattgatattggtgtgtttgatgcccttaagaggaaatttcagtgtgcaaccctacagctggattttcagctgcccattcggttcaagctggcttattctgctgaggatgaagccaaaattgaaaggcctgtgatgatacacagggcaatcctaggttcggttgaaaggatgcttgccattcttttggagcattacaatggtaaatggcccttatggctaagccctcgccaggccattgtttgttcagtatcttctggttcagtggaatatgcgaaacaggttcttgccatgctacatgaagctgatttccatgttgatattgatgtgagtgacaggacaatacaaaagaaggtacgggaagcccaggtagctcaattcaactacattcttgtcgtaggcgcacaggaggccgagactggaaatgtctgcgttagggtaagagataatgccgacctggccacaatgagcgttgatggcctcatcacacgtttgagggaggaaatcgtagccttcaaatgattttgatgctgcataatttcctagcacttcgcaatcattgactgttcatttgtgattttgattgagttttcagggaacagtactgagttcctccaaggctccaagtgtattcttgttggtacggttggaagctactaagggcatatttagaagcacctagtttttaataaactggtttataaaaattgagatggttcccacgcccaag

SEQ ID NO: 102269 - DNA, 2533 bp, Zea mays
  Clone ID: MRT4577_24777C.1
aattttcgagggcagccggccggggggattgcataaaaacctagaggcgaccggccagcgccatatcccgcgccgccgccgccgccgccaacgcttaatgctagtgttcctccggcgaggcctcttgctcgtccggcagcccaccacccgcgtccttgccaaaccgtctctccgccctgcttgtctcttcgtccaccacttcgccgtcgacacgatgggtgagggttctgctgctggtaaggacgcgaaggggaaggggaaggggaagaccaaggccgccgccgcggattcggccctggtcgttcgcgacgactcctacctagaggcggtcactcagaagaggattcgcttcttcgaggagatccaggcaaggcaagccgtcgagcggctgaatatcggcggcgaagttatcaaggtaactttgcctgatggcgctatcaaggagggtaagaaatggataacaaccccaatggatattgctaaggagatatcaagtggatttgcagctagttgtttgatagctcaagtggacgaaacactctgggacatggggaggccactcgaaggtgattgtaaattgcaaatgttcaagtttgataccaatgaaggtcgtgacaccttctggcactcaagtgctcatattcttggagaatctattgagagagcatatggatgcaagctgtgtattgggccttgcaccacaagaggggagggtttctactatgatgcttactacaatgatcagacattgaatgaggagcactttggtatcattgaaaaccaagctaaaaaggctgttgcggaaaagcaaccgtttgaacgcattgaggtcagcagggcagaagctcttgaaatgtttgctgagaatgaattcaaggttgaaatcattaatgagttgcctgaggacaagaccattactgtatacaggtgtggtcctttagttgacctatgccgtgggccacacatcccaaatacttcctttgtcaaagctttcgcttgtctgaaggcttcatcatcatattggagaggaaaagttgaccgcgaaagcctgcagagagtatatggaatttctttccctgattctcgacgtctcacggaatataaacattttctagaggaagctaagaaacgtgatcataggatattagggaaagcacaggaactcttctttttccatgaacttagccctggaagctgcttcttccttccacatggtgccaggatatataacaaactgatggacttcatgcgacaacagtacagagatagaggataccaagaggtgttgagcccaaatatttacaatatgcaactatgggaaacttctggacacgccgcaaactataaggagaacatgtttgtttttgagatcgagaaacaggaatttggacttaagccaatgaattgtcctggacactgtctaatgtttgctaatagggttcggtcgtacagagagttgcctcttcgcatggctgattttggagtgcttcatagaaatgagcttagtggtgctcttacaggtttgacacgtgttagaagattccagcaggatgatgctcatatcttctgcagagaagaccaaatcaaggatgaagttaaggctgttttggaattcatcaattatgtttatgagatatttggcttcaaatatgagttggagttgtctacgagaccagagaagtatctaggtgaagttgaaacttggaacaaagctgaacaacaattgacagaagctttaaatgagtttgggaagccatggaagattaatgaaggggatggtgctttctacggcccaaaaattgatattggtgtgtttgatgcccttaagaggaaatttcagtgtgcaaccctacagctggattttcagctgcccattcggttcaagctggcttattctgctgaggatgaagccaaaattgaaaggcctgtgatgatacacagggcaatcctaggttcggttgaaaggatgcttgccattcttttggagcattacaatggtaaatggcccttatggctaagccctcgccaggccattgtttgctcggtatcttctggttcagtggaatatgcgaaacaggttcttgccactctacatgaagctggttttcatgttgatattgacgcgagtgacaggacaatacaaaagaaggtacgggaagctcaactggcccaattcaactacattcttgtcgtaggtgcacaagaggccgagactggaaatatatgcgttagggtaagagacaatgctgacctggtcacaacgagtgtagatggcttcatcacacgtttgagggaggaaatcgcagccttcaaatgattttgatgctgcataatttcctactactcgtttgtgattttgacgagtttttagtgaccagcatcgagttcctcgtgttactgttcttgtttgtatgaagctaaaaggttgtctttttgttattaattacagatgcgaagttaaatactgccgctagtaaaaaaatatgcttgttgacttccagtgattaaaaagctagaaaaaaaaaaaaaaaaa

SEQ ID NO: 102270 - DNA, 561 bp, Zea mays
  Clone ID: MRT4577_24778C.1
gctgaacagactatctaaacatgcacggacgcagcacggtagaaaagccatggctggacgcttcatcgagcataccctggactgatcgccctgctcaccgaatccaaccagatacacggcgcctgtgctcgccatcatgacagaggaccttgggaggatgccaccccatggcccccgccggtggcgcaagtttttttgccgacgctatctgaccgctcaggatggagaaccattccaaatagctggtgagcactgatgccatggaagagagcttaaaacgaacatgaaaatcttgagcggtgcattgcactatgatgccatcaaccactgccaatgcatcatccaacagtaacgccatcaaaaaaaaagacaagagtgagcgcgtttacaagatccacccttaaactcaccttgattccaggtgcactctgtgctataaactcatatgaagctaagcaactggatcgggtcttgcaacaccaatgactagagaaaccctgagacctatctacggtaatcggcttgcagcgcacaactaaaattactgagtgatgtaattga

SEQ ID NO: 102271 - DNA, 462 bp, Zea mays
  Clone ID: MRT4577_24779C.1
ttcctggttcagtggcggctactgcaacaggacgcggccgctggaggaaggcgacctcgatccgaggagcatcgggtgggagctgaggagggtgcagagccaagaggtggcgagggtgagggagaccagcggcagcaccaagtttgagctgctggacgtcaccaaggcgatgatgctgcgcgccgacggccacccgggctggcactacgacaaacgctgggtcaggaacgccagcgactgcctgcactggtgcctgcccggccctgtcgacacgtggaacgacatgctgctccggaggctcacacaaatctcgcctcagccgctgctgcgttgacgacagtggcatggcaggttttattcgagcttgcatacttaatattatactaagtgagtgcccgtgcgttgcaacggaaccgtataataacacgataacttatgtctcaatatagaggcttgtatcga

SEQ ID NO: 102272 - DNA, 925 bp, Zea mays
  unsure (1)..(925): unsure at all n locations
  Clone ID: MRT4577_2477C.1
catatttttgatcgactgttgtgctccaatacaactgtaccaatacaattcctgaacaattgcttgaacaggttattgttttggttgatgcttctgaggctgacgaatttttagaagttgcttcaaagcctttagaatcattaccatatgattctcctgggcagacctttgtggcttttgaaaatccagaaggtgtcattgccaccggcaagttctcaaatatcctgaaattctttgttaaggaggttgatccatccacgggtgaagctgaagatgatggtgtcgaggatgagtaccagcttgaagatcttgaaatcgtttctgctgattatatgttgaaggtgggagtatctaacttccgaaatgcctgggaaaacatggatccagagactgagcgagttgacgagtatgggcttggagtaagggagagtttggctgaggctgtaagtgctgttataagcatccttggcatgcagccttgtgagggaactgacgtggtcccaagcaattcaaggtcgcacacttgtctgctctctggtgtgtttattggcaacgtgaaagtcttggtgagactgtcatttggaattagtgcaccgaaggaggtggccatgaagctggcagttagatctgacgatccagagatcagtgacaggatccacgaaattgtcgctaatggctaaaaacaatggtagtatcttttttttactccttttcttttggctttcatgctacgggaagtttgaggggattcaattaattagagtatatgtaagtttggtttccagtcgaatctatcattcgttgcaccatcattcttccttgacacagtacaccagtttttgggttgttttggatctgtacaattttccttatatactgangacttaaaatagtatacgcaataatatgcaggttaaatttttgc

SEQ ID NO: 102273 - DNA, 795 bp, Zea mays
  Clone ID: MRT4577_24780C.1
cattgggtacctcgaggccggccgggaccactcctcttcgcaacccatctaccaaacgctacttcacaccttcagccttcaacatgggtatcaagacttacttcgacgtgtcctggcagggccctgagatccagatcgatggcaacggcgccgtcacttccactggcgccgtgaaggaccaaactggccgcatcaacttcgagctctacgacgatgtcgtccccaagacggctgagaacttccgtgctctctgcaccggcgagaagggcttcggctactctggctccaagttccaccgtgtcattccccagttcatgcttcagggtggtgacttcacccgcggcaacggtaccggcggcaagtccatctacggcgagaagttcagcgacgagaacttcacgcgcaagcacgaccgccccttcctcctgtccatggccaacgccggccccaacaccaacggctcccagttcttcgttaccacggtcgtgacgtcgtggctcgatggcaagcacgtcgtcttcggcgaggtgtctgaccaggagtccaagcgcattgtcaagtcgatcgaggccactggcagcaacactggcacgatcaagttcaagaacccccctaccatcaccggtgccggtgtggcttaagcgtgcatagcacagatgggggtggatcatagcaaggcaacagtcttccgagtgctatcagtagcccttgtgcggggcaactgagcggacacaaaagttcgatggcaggatttgatagtgcttaatgaatggcagcttatactttgatcaccag

SEQ ID NO: 102274 - DNA, 181 bp, Zea mays
  Clone ID: MRT4577_24781C.1
ggccgggccgggaccaacacaaaaggacaagcctcgaccctgcactaggtacctaagtcgctttggaacattggaagattaacatcgtcgacgacatgacgaccagcaacagaatgcgcaccgcaaggtcaacgagatgctcgtgcgaaagaccgtgctcctcttggacgtcaccagcatc

SEQ ID NO: 102275 - DNA, 315 bp, Zea mays
  unsure (1)..(315): unsure at all n locations
  Clone ID: MRT4577_24782C.1
gcactcggacggatagcattatttctctcgaggctttttatttttgcccccgcagggggattgggaactttcggggctttggggcaacctaacaagaatggcaggttggatcggatcggacgccgggttatgcggtactctgtgccaccgacatagccttagaccattgtcggataccctcgctactccgccgttcccgtgttgcagcatcatctgcttttanccattgtgactccggatccaaagacaccactgttatgtcaacgctatgcctgacgccgccactggcacacacaatatcccctccagaatgca

SEQ ID NO: 102276 - DNA, 782 bp, Zea mays
  Clone ID: MRT4577_24783C.1
aatactgttgtgcggctcgacggaaggagggaggtacggtaagggcttgtggcagcaaggaaaatggagggattggaggggctcgacaatcaaacaagctcaagtaattcgcactaaaaaatttatataaatatcaattctaaaataatggaagaaggacttgcatcggcaataattttaaggatctatgaaccaaacctctccaactgcaacgcagccgctcatctgagattccatgctattgtggtcttccaattcatcgaccagatcctcaacatcgtacgcgacctgcttgatatcccccatccattcttgcagctccggacggatctccaggctaaccagcatatcttgcaacctcgccagagttgtccacacatgcgctaggtccccgtctatattcgggggcacctccagccggcaagcggcggaccccagcctgcgcagcagccggtccaccacggctgcggcgtgaccatgcggcatggcgatttcgatggaggggcgagagccgcaacaggtgaaatgattggccagcggcagtagcttcgagacgggcgagtggcgaccggcgaagattagcatcttcgcgattggtgggcgcaacgattcctaatttatataaattttgattaggccctgttcgtttacatcggattggacccggaattattccggctaatcaaagtttatataaattatagaagcaatccggctcggaatcgttccgacccaccaatccgacacaaacgaacaaggccttagtcggaacgattccaggt

SEQ ID NO: 102277 - DNA, 335 bp, Zea mays
  Clone ID: MRT4577_24784C.1
tccggaattccggtcgaccagcgtccgccaccgtccgcccaccgtcgcggaccgtggcgtgcggagcacgacggccagggcagaccacagttccgggcccctgcttcgcggtcaactggccacatctgcaaaacccagggttccccggcggcaggtgccgcggcttacgcgcgatgttctgacacaacactgccactgattcgtcgccagcggcggctgcgtcgcatcatcgcgccgtagcgaccagaccattctcatgcatgaataacaaggcgtgccgttgtgatgccaaatgatactatcgtcagagccgaacggctatcgagctcaactat

SEQ ID NO: 102278 - DNA, 339 bp, Zea mays
  unsure (1)..(339): unsure at all n locations
  Clone ID: MRT4577_24785C.1
ccccctctaatangaagaaaacccccgtctcacacaaacaggggaagatttgaatccgagctccgacaatcccctccggtaatacgactctcaaactagcccttagcaaatacaagtgcggttaaaagacgacacaccggggctagaaacacccttataacaccaagtcaatccagccgtgccaagacactgaagcatgcacatcggcatggacgatggcatacagtaaaagacacccgatcttatgagcaaggagctcagctgctcctcgcgcacaagatacgttactcatagaaaaaaggcacgccgacatggctgtgactgtgaagtggacggatc

SEQ ID NO: 102279 - DNA, 452 bp, Zea mays
  Clone ID: MRT4577_24786C.1
agacagtgaacacgagaaaaacttacttgattgtagaacccagacacgagtagctaattgacaagaggggacaaactggaaagcagggggccactacgcacagccataacacctagatgttcatggatgcggatgaaggccggaagcaccctgcaccccctgattgccctgcccaataggggttggcctaagaccaacccagcggtgtattcggctgtccttgaggatgtgggacgaggatcccgtgcgggcccttggcagtgagcagtgcacctaccctagggcccgagaatggtcaatatgagtaggcagagctgctcttgcttgttaaaaggacactggcagtaagaactcaggtggcctggagtaaccttaacggcactaacctgtccggcacgtagagccgttacaacacgcttcatagtgattggtctgctaaccatgacaggttg

SEQ ID NO: 102280 - DNA, 747 bp, Zea mays
  Clone ID: MRT4577_24787C.1
ggccgcttttttttttttttttttattttttttttttttacactgaacacctgagtttattcattaggttatttgttatgtttgtgtttacatccatctaagacaatgataaacatcaggatttgaacaaaagacccacaggcttatagatgctacaagttacagatttgacataggggaatgcttagccaggaagctgaacatgcagaagttgcagatcatggcggccccatagtgaagcaaatttcaaaatcctaaacaacagaaacacccctaacaaggctggcttgcgtacagcagaacttgcactgaacaaatgctgacaaacatgtgaaaacaattgaatcaacaagaagcaagcatctagagactgcggccacaatcttagttgtccacggcaagcttccgcctcttgtagttaaccatcacctcgcccttgatgccaaccaccatggcgttccagtcgttctctgggaatggcgataccagctcgaactcaaagttcctcagtaggtgcgtccagattgccttgatctgcaggtaggcgaagggctcaccgaggcacccatgcctgccgccaccgaaggagatgtatgagaaggcgcctgcagccttgtcctcctcccttccaggaccgaaccgatcagggtcatacgagtcagggttcttgtagatgtggggcagcctgttggcaaaggatggcgatgtcgcgacgatgtggccctggggggatgtcgtactctttgc

SEQ ID NO: 102281 - DNA, 610 bp, Zea mays
  Clone ID: MRT4577_24788C.1
ggaccctccgagtttgccgggagccgccggtcccgactatcaccttgctacctggtgctgtaccagtgcgcacggctcctgcagaacctgaacatggcgtggtctgctgccacaccgtgaaatgaggcaccgcgacgctatctagatcacgcgtcgtgcagtgacggcaaggatgaatgctctgcagtggacgatccggacgctgctaaacgagcgccagtgctccctgaacactggtgacagcagacacaccttacttgccgacatcaatgccggtcgtagggatgctgtgctttctcaggacgcacagcattacgtcgtgccacgcatgaagctctgggacctatatgatcagagtgagatgtagatgagtgagctctgagagcttgacacggtccgggccattctacgaaagacgcatggcatgggtgacatgaagcacgtagcagcctgagcggacctacgtcttgagcacctacatgttcgcacatactatgaccgcaatgaggagctacaagaatcctgcaacgacaaacggtggcctatggtcgttcaagctggtgcttgagaaggctcacaaagaccggcatgtaatcttatgggactgatt

SEQ ID NO: 102282 - DNA, 1375 bp, Zea mays
  unsure (1)..(1375): unsure at all n locations
  Clone ID: MRT4577_24789C.1
ccccgggngctctgnatcctgttcctctcaacaggcgccccatcaccaccgtcaacaggcgccatcaccaccgcctgccctcgttacaccctcttcctttcttcttccaaatcacctctctctctcaaaagcgtgtggcagccggcctgtgagtctgtgtctgtgaccggctgactctgccagccgcacgcacgccctcgcgcttggagcgttgcgaggatcggctcacaggtcacagctcagtctcagatcggccaccggccggccgggcaccggaccacagctgtctgctgcctgctccgcttgccgccattgctggccagcgcgagcgagctgccgggaccgcacggaggtagcgtctacggggcagcaccgcgcgtcgtggttcgcgctcttgaagctggatctggaccgacggtcgatcgagcgagtgcagctgcctgcgagctcttctcccgccgcgatatgggcgccgtgagctgccggaggcggacgagccggcgccgctgccacgccgccgccctcctcgccgccgcaatcttcgccgcggccttggttgtggcggcagggcggcggcccatccgtctgccagcagcggcgctggcgaggaggcgagtagactcgtcgacggcaattgccgccgccgccgacgaagtcctcccagccgcccggcggcggtggctgctggcggggccggggtcgtcgccgccgacgtgccgcgcgaggtgcgggcggtgcgcgccgtgccgcgccacccgcgtggccatccagcccggcgtcggcccccagtgggagtactacccggaggtgtggcgctgcaagtgcggcaacaagctcttcatgccatgaccagtacgtgatcaccaacggcggaggggctgtcgggccggcatgcaggcgcgcgcgtggtcttccttttgtactacaagacgacgatggattgatcgagacgacggcgaccactcgatggatcgatcgatgcgttaatttaattttgcgagacttaagtgtacgtacgtacctacctgcgtgcgtacaaattgaaaggggaggacggattttggatgctactaagaaagaagctaggggattgcattggtgaggtgattaggcgtgcgtaagtggtggtgctgtgtctgtgatctgtgtatatatatgcaaatcagtagatcttatgttaactactactacgtctacatgcatcttctttcttccttccttcctttggtgagactaaactgttttaatttcttcacaacaaatcagaatgaatggaggagcgaggtcattgtaattatatttttataatgtaatttctacattgtttttattctatttattttgcaaaaaaaaaaaaaaaaaaaaaaaaggtgac

SEQ ID NO: 102283 - DNA, 323 bp, Zea mays
  Clone ID: MRT4577_2478C.1
ccggccgggaggccgccatcacctgcgggcaggagaggggggccatggcgccctgcctatcctacgcccgcgggacggggtccgccccctccgcgtcctgctgaagcggcgtcaggaacctcaagagcgccgccagcaccgccgccgacaggcgcgccgcctgcaactgacttaataacgccaccaggggctatgaggggggggaacgccgccaactcctccagggacctctccaagtgcggagcgagaatacactacaccatcagcaactgaaccgactgctacaaggacaactacaacctattccacgcgcgaggacagaa

SEQ ID NO: 102284 - DNA, 339 bp, Zea mays
  Clone ID: MRT4577_24790C.1
tgtgttttttttttttttttttttttttttttttgttttttttttttggatgtacttttggcaaaaaggggaggcccaaggggaaaaaaaacttccgcaaacaaaaagaaaataaaagcggggcatttgcccaacacggaccaaacctttgtaccccctggtcctttttttgatttaaccccaaatttttgtgggcaggcccctggaagaagggcccaagggaggagcagaccggctcccagaaaggacccgaacccgtctaggaaagaaggccatccaggcaacactccaagctgacacgagcgcgccggcggggggggcccagtgggggcggccggc

SEQ ID NO: 102285 - DNA, 432 bp, Zea mays
  Clone ID: MRT4577_24791C.1
cctgtttagattttatttttgagcaagagtgcttgaaatgtcatataccacatacaagcaacacctgatgaaatcagatgatgaactgttcgagcatactgacaaatgctagaacataggagctaacaagctgaggtggagctggcgagttacaaattgagcacagatgatagctcaaattgaggcaaaactaaaacaagtcaaaccagctgactagccgctagaatggagtattgtgggtaatcacgaacatggtcacatcagatcttgttgcacagaactctgcaggaaagaagaggcgcgcatgtgcactcacaccttgcttacgatggtgagtttgcgctgccactgcataggacggcggacgtactgatcacaactgccaaggagagatatgcgatacatccggagatcagctactagcgaaaagat

SEQ ID NO: 102286 - DNA, 269 bp, Zea mays
  Clone ID: MRT4577_24792C.1
ggaaaaaaaaaggaccatgttcctccaaattccaaaaacagctcctggaaatccacatagtccttttaattctacgggggcggcaaatttatttgaaatgggccatccccatccttaaaacaggggggtcacatgccgcactaccacaggtggggaacattacacacaatccctggcctaacaaacagaagcttttatttttggcaatatgcgggggggggtcatggcctgggaaacgtttcaccccaattttctttaggggagaacct

SEQ ID NO: 102287 - DNA, 147 bp, Zea mays
  Clone ID: MRT4577_24793C.1
aactagcgtaccaggtataactgttgagactgtattaaagcttgtcgttagtatagctatagctgccatatgctctcatgctgatggcgactagcaatacgcacaacatacgagcgctaagcatatggagaaatacctgaggtgcct

SEQ ID NO: 102288 - DNA, 483 bp, Zea mays
  unsure (1)..(483): unsure at all n locations
  Clone ID: MRT4577_24794C.1
ttggccttggacctttgggctgatttatgtgcttgtttatgtgcttgtcccgtcacatgtccccaagtataccgcctaaactcccgatgattaccactaactatttcgtcgagaccgcgaacacgtccgttaagagttcgttcggaagtgtaatgcctccttctatgcccgccgtgtcgaagcctccggccggtcacggttccgagtctctctgttcggccttctctactaccccttattcgaaaaggaagcattcacgtaagatggaggaagaagcgagagtggtacgggtcttagcggactcgggacacaatattagggcattaaacgatacgtctactgtaatagccgcctcgcgtcatctagctaccgtgttcccgaccaccttgcctggcgctgtacatcccgtttctggacggtccacagtangaaactagacttcgagagcccatgccttcagtcatgagagtcatggatgaacgc

SEQ ID NO: 102289 - DNA, 311 bp, Zea mays
  Clone ID: MRT4577_24795C.1
cccacgcgtacgtccacgcgtccggtcacgcgtgcggctccttctgcactggcggcggtggctacatctcgatcggtgggtctctgcctcacactcacacacacgaacggcgactgccatgaaacacgccgcgaagctcccgtaccgcggtgcatcgacgtcacagcaccgactctcccacgctatcccgaagacgccgacgcgtaagatcacgatcgctcacgtcttggcgccggaagttatcaaaacaagagctccagactttcgtaagggcgttcagacgcttaccggaatgccatcgttccaaaagg

SEQ ID NO: 102290 - DNA, 294 bp, Zea mays
  unsure (1)..(294): unsure at all n locations
  Clone ID: MRT4577_24796C.1
ccgaacagccgggacgaaccacacgcgggtttgtaagccagccggncggacgcccagcggggggagaataaaaagaggagggccgcgaaaaaccgccacggaggcaggggagcaggaccaccgccgcaaacaggaggacacccagcagcagagaaaagcgaagaccacaagaaaaagaagggagggacaaccaagaacggcgcggcggcgcagccagcagaagatcaaggaggcaaggggacaacaagggaggaagggacaagagcagagaccgcatacaagaggacccaaggc

SEQ ID NO: 102291 - DNA, 211 bp, Zea mays
  Clone ID: MRT4577_24797C.1
ctactgtgcatccttgtgacgctgcacttctctcggatgctcacagctgaggtcttggtccccaagctgcaggacatggcgcaccattaccagtcacacttgtgtctttcagcccatggtcaaccactgtcgctgctggagctgacgagcgcagataccaggatcattttgcactcggcaatgggggacgtacttctggacctggcgtatc

SEQ ID NO: 102292 - DNA, 397 bp, Zea mays
  unsure (1)..(397): unsure at all n locations
  Clone ID: MRT4577_24798C.1
anaaccttttgatagtcaccccnncnaccaananaaaagggggggggcccgtttgaaaanaaaagccgacacattggacaaggggaacaacggaccaaacgggaaaaannaacaaagagaagccccaaaggggaaacggggggaaccaaaaaaagccaacacgccacacccaaggaggcagggagagaaaaanggcgaaaaagaacgaacgggaagaagcggaaaacccgcaacaaaaanncaaggaggggccacaaggagaaacccaaaccaanaaaaccgggaccaagccccagaagaaagcaaaccccaggaacccaggaanncagggggaagcanaacagnnaggacggacaggacccaaacaagggccncaaggacagccaaaaagcccacg

SEQ ID NO: 102293 - DNA, 430 bp, Zea mays
  unsure (1)..(430): unsure at all n locations
  Clone ID: MRT4577_24799C.1
gtacgccgccagtgtgctggaatatgcccttaagcagtggtaacaacgcagagtactttttttttttttttttttttttttttttttggtttttttttttttttttttttttttttttttttttttttttttttttttttttttttttttccccggaaaaggcgggcccccgggataattaaaaggaacagaaccggcaccggggggaaaaaaacaaaaggtcggcccccaaaaagggaagggctagaaaaaacaaggggggataacctcttgggggggccaaaaaacccggtaaaccgggggaagaaaaagtaaacaaactggaaaaggtttttaacccaaacaaaagttaaaaccgggaaaacccggcgtcctaaagggggccccggggaccctctcctcccgataaaaaattgtnacccgcaaaaac

SEQ ID NO: 102294 - DNA, 3185 bp, Zea mays
  Clone ID: MRT4577_2479C.1
aaaaaactctgctctccatcaacccgctgggtgccagtgtggtaccggtacccttccctcactctcccggttctttcccggcgctggattcagatccgcacgcttctcgatttccgtaaagctccgcgcctcctcctcgtctcttcactccaaatccaccgaggccatcgcctgggccccggggaaacccctcgcgctcgtggccctgtgagcagccgcagccatggcgcagccgctcgtcgtgaagaaagacgacgatctcgacgaggaagagtactactcgccattcctgggcatagagaagggcgccgtgctgcaggaggcccgagtcttccatgaccctcagcttgacgcgcggcgatgctgccaggttatcaccaagcttctgtacctgctcaaccagggtgacacctttaccaaggttgaggctacagaggtcttctttgcaacgaccaagctgttccagtctaaagatgcgggccttaggaggatggtgtacctcatgatcaaggaactctcaccttcagccgatgaggtcatcatagtaacaagctctttgatgaaggacatgaatagcaaaactgatatgtaccgtgcaaatgctattagagttctttgtcgtattattgactcaacccttctcacccaaatcgagaggtatttgaagcaagccattgttgacaagaatcctgttgttgccagtgcggcccttgttagtggcatctacttgcttcaaacgagtccggaagttgtaaaaagatggagcaatgaagttcaagaggctgtgcagtcaagagctgctcttgtgcaatttcatgcccttgctcttcttcaccaaattagacaaaatgatcggttggctgtcagcaagcttgtcactagcttgaccaggggttcagttcgctctccgttggcccagtgcctacttattcgctacactagccaggtgattagagagtctggtgtgtaccaaggtggagatcgtcctttctttgatttccttgagtcctgtctccggaataaagcagaaatggtcatacttgaggctgcaagagcaattacagaactgaatggtgtcacaagccgagagcttacacctgcaattactgtgctgcagttgtttttaagttcatccaaacctgttctcagatttgcagctgttcgcacacttaacaaggttgcatcaactcatcctttggctgtcacaaattgtaacatagacatggagagcttaatctctgatcagaacaggagcattgcaacccttgcgattacaacactgttgaagacaggcaatgagtcaagtgttgatcgtttaatgaaacagatgaccaactttatgtcagacatagctgatgagtttaagattgttgttgttgaagcaataagatccctgtgcttgaagttccctctgaaatatcgctcattgatgaacttcttgagtaatattctacgggaagagggaggattcgagtacaagaaagccatagttgattcaattattatactcattagagatattcctgatgcgaaggaaagcggtttatttcacttatgcgaattcatagaagactgtgaattcacctatttgtccactcagatacttcactttttgggaaatgaaggccccaaaacatcagatcccagtaaatacatacgctatatatacaatagggtgatacttgaaaatgctacagttcgagctagtgcagtcagcacattggcaaaatttggtgccttggttgactcactcaagcctcgcatatttgtgctcctgagacgctgcctgtttgatggtgatgacgaggtgcgcgacagagcgaccctttacctcaaattgttaggtggggaagctacagttggtgagacagagaaggatgtgaatgaatttctcttcggctcacttgatgttccattagtgaacttggagacgagtctgcggaattatgaaccttcggatgtaccttttgatatttcatctgttccgaaggagacaaaatcccaaccccttgcggagaaaaagtctacaggcaagaaatcagcaggtccggcatctgctgtcagtgaccctgtttctacagttgatgcttcgtatgagaagcttctttcgtccattccggaattcgctgattttggaaagctttttaagtcatctgcacctgtagaattgactgaagctgagactgaatactcagttaatgttgtgaagcatatttttgatggacatgttgtgctccaatacaactgtaccaatacaattcctgaacaattgcttgaacaggttattgtttttgttgatgcttctgaggctgatgaatttttagaagttgcttcgaagcctttagaatcattaccatatgattctcctgggcagacctttgtcgcttttgagaagccagaaggtgtcattgctactggcaagttctcaaatatcctgaaattcattgttaaggaggttgatccatccacgggtgaaactgaagatgatggtgtcgaggatgagtaccagcttgaagatcttgaaatcgtttctgctgattatatgttgaaggtgggagtatctaacttccgaaatgcctgggaaaacatggatccagagactgagcgagttgatgagtatgggcttggagtaagggagagcttggctgaggctgtaagtgctgttataagcatccttggcatgcagccttgtgagggaactgacgtggtcccaagcaattcaaggtcgcacacttgtctgctctctggtgtgtttattggcaacgtgaaagtcttggtgagactgtcatttggaattagtgcaccgaaggaggtggccatgaagctggcagttagatctgatgatccagagatcagtgacaggatccacgaaattgtcgctaatggctaaaaacaatggtagtatcttttttttttactccttttattttggctttcatgctacgggaagtttgaggggattcaattaattagagtatatgtaagtttggtttccagtcgaatctatcattcgttgcaccatcattcttccttgacacagtacaccagttttgggttgttttggatctgtacaattttccttatatactgaggacttaaaaatagtatacgcaataatatgcatgtaaagttttgctgaaaaagcggcctcgagttcagttttttcctttatagggttaatgcgc

SEQ ID NO: 102295 - DNA, 478 bp, Zea mays
  Clone ID: MRT4577_247C.1
atcgagcatcgcagagataggcgtcttcgtactctctctacctccgcggctcaaacctttcccccttctcccaattccctccgtcggccgccgctccatcccgtacgacgacaccatgagggagtgcatttcgatccacatcggccaggccggtatccaggtcggaaacgcgtgctgggagctgtactgccttgagcatggcattcaggctggcggggggatgcccggtgacaagaccattgggggaggtgatgatgctttcaacaccttcttcagtgagactggtgctgggaagcacgtgccccgtgctgcttttgtggagcttggacccactggcatcgatgaggtgaggactgtgacctacccccaggtgttccaccgtgggcgcggtgtcgctgggaaggctggtgccgccatcaacgtttccggcgggctctcccccatcggcggggcttttgtctgcgtctcctttgttcgg

SEQ ID NO: 102296 - DNA, 306 bp, Zea mays
  Clone ID: MRT4577_24800C.1
cggacgcgtgggcggacgcgtggtcggacgtttgggcggacgcgtgggcggacggggtcgcggactcgtgggcggacacgtgggccgacgcatgagcggacacgtgggtgactaaggagctggtacctagttcacacgaaatgtggactgttaggaaaggacgctatctgggtaggctgctgcgcaacacattgcgcaagaccgcacagagtctgagctatcacaaagcagctagtaacgctgaatatgaagacgacctgattggacatgctgttcgttagaggtagaggaagaccgagatttctg

SEQ ID NO: 102297 - DNA, 612 bp, Zea mays
  Clone ID: MRT4577_24801C.1
cattgggtacctcgaggccggccgggacaaaataatctgctatccttatgcgcggcgccgcacaatggcttgccttcgatttcctatgcccctataccctcaccaatacaaaatgcatatgtattgttaagaatctatttgaaaagattatgactctcaaggcggaaccgtctgacaccattgacaatgtcaaaggccatcatacattaaaaggaacgtattctgccggaacaacatgaagactgcttactggggaagcggctacatgacgggctaacacttgccgaatactagatccataaggagagcaccttccagcttggactacggctcaggggaggaatgaacatgttacgagagacctctgactggaaagtactatcaccactctatgcggaatcatctgacactattgatgacgctaaaggcaagtatcctctacaacgagggcatccctccagaccatcagcggatcatttttgctggctagtcagctagatgatgttgcacgctggccgactactacattcagaaggagagactctcccttggagttgtgtcacacgtgcggcatgcagatcttcgagaagactctgactggatagactatca

SEQ ID NO: 102298 - DNA, 337 bp, Zea mays
  Clone ID: MRT4577_24802C.1
gtacacgcgagtgatcgtcgctctactagacgtgcgcactccgtcgtctcagtctcgtgcgcgctctctcgtctctgctcttcctctcgctccgtctgacgcacatgctcatcgcggatcttcggcctctcttcgcaggccgtcaaggcaatcacacaaattctctagctttctcgccggcgaggaagggcaacacattcctccgcctgcaaccaatgcctatgagatctgtttcctgcgctgccaagaaggatacaacagacaaggtttgtgagattgtgaagaagcagcttgctcttcctgaccatactgaagtttgcggtgaatcgaaattctc

SEQ ID NO: 102299 - DNA, 151 bp, Zea mays
  unsure (1)..(151): unsure at all n locations
  Clone ID: MRT4577_24803C.1
tagtatcgtttttctagttggctttcggcgggctcctttcttactgatgggctgcgcttggtcggtggtctgctgggatctttattagcttggtcgatattgttaatacggtgatccagagaatcagggtgatgggcttntaagtacatgg

SEQ ID NO: 102300 - DNA, 324 bp, Zea mays
  unsure (1)..(324): unsure at all n locations
  Clone ID: MRT4577_24804C.1
ccgtcgtggtggtggtggtggtgtgcgcggggcgggaggggaggggaggggagtcntnattgggcctttacaatgccacanttaccataatctttcttttctgtgtcaagagctcgatattaacaccgctctcaaggatgtcattctctgtggcgcgctagattctgtgtgttcggctgctgtggacgatgtcaatttttccgttgagcttttcaagatgattgacaagctttactctgctgtcgtttacttttttatgtgtccctgggactatgcttttcctatgttctttatctttcctatctcgctctatcccatggtgta

SEQ ID NO: 102301 - DNA, 469 bp, Zea mays
  Clone ID: MRT4577_24805C.1
cccacccaaaaaaagcccggccccttaaattttatggggaaaaatccgggttctttcccccccttaagcccccccccgcccctttgcctgggggacccccaataggggggggcccccgcatttaacccccccccccgggcccccccggcataaaaatgttcttaaatccccggaatccccccccccccccccatttgcggccccccccccaaaccctcccccccccagggcccagttcccaaccccggaccggcccatccttcctaaccccggcctgcatttggggggccaaaataaacccccccccccccttgtaaaccccccgaacccccccccccttgcccccctggacgcccccctaaggccccccctcgggggggggcccaaacagggcgcccccaaccccccgggggggcccctggaatttttaaaaggggccccccggggccccggccgggttgcccccccc

SEQ ID NO: 102302 - DNA, 625 bp, Zea mays
  Clone ID: MRT4577_24806C.1
tgttagtatgtgattaccaggaaggctattgaaactcatttaattagacacattgaggtactagtgctgttaggaatctgtctaattaaatgagtttcaatagcctttcttgttagtatgtgattaccaggacttggaaggcttactcttatcaggccgatcccaaagtgacaggttaacagggaaactctgtacgtcaggcaagtgggtatggctctgttgtcctgaacacagccctggatttgcacctgctccttagttagctgatgagctcactgcaaggccctacacattcttacacatagagaagaagccagcaacagattacgataacttgaaaaggcagtcatgctaaaatagtaatgatattgtggatataaaacatacttttttgaaaagtttgttctgtgtccctaaacattgactaatagtttgtagttatctctcacttgttaatgtaaaaataatccagttatcacccattttagcaaatatttttaactagaaagttacttgagtattgagtctcagtattttttttttaaagatttacttatttattcatgagagacagagagtgagagagaggcagagaagtaggctcctcacagggagcccgatgtgg

SEQ ID NO: 102303 - DNA, 2565 bp, Zea mays
  Clone ID: MRT4577_24807C.1
tgggaccctcgaggccggccggcatgaatcctacctggactaataaaactgatatacacgtcttgctccgccgcgcccatggacgacgacttgaccgcttcgccgtgcccaccgcccgcttactccactctccacactccctcgcttcctccgctcggttccatcccttcccaccccacaaaagcccccaccgccgtcgccgcaccgggccacgcgatggcgatggcgagggcggcggtggacgtggaggacctgctggtgcgcgtcaagaccggcgcggaggcggacctcgccgccgcggcgcgggaggtggccgcgctggcagcggacggcaggctcggagaggacgacgacgaggacggcctcctcgtcgcggcgctgctcgcgcgactcgcagccgccgccgccaccgccgacgccagggtcagcgtcatggccgcgctcaggcgcctcgcgggctgcgtcgccggcgagagcaaggagaggctggccagcaccgaggcgctgtccagcatcgtccgctccctgtccagagacgcggacgagaggagggaggccatcgcggtgctgctggacctgtcggacatcccgcaggtccgccagaggatcggcaggatcaaaggctgtgtcgtcatgctggtcaccttgaggaacgcgcacgagccaggcaccggggatgacgccgataagttgctcgccattctgtcgtccaacccgcagaacgtgctgttgatggcggaggctggttacttccgcccgttgatacagtacctcaaacaaggttcagacatgaacaaggtcctcatggcaacggccatctcgaaaatgttcctatctgaacatatgaaatcttccctcggcgaggatggagctattgaaccgctcgtggacatgtttaaacatggaaaccttgaagccaagcactcggccttaggcgccttgtgtaatctctctagctctctacagaatgcagaactcctgataaattctggcataacaggaccgctgctccagctccttttctccgtgacgtcagcactcatggccctcagagagccggcctcggctatactcgcagctatagcacaatctgagcgtattctacttcataaggatgtagcgcctcagatgctctcgcttcttaatttatcgagtccggtgattcaacttcatctcctgagggccttgaacagcatttccgggcacgcgaatgctaaaagagccaggagtaaaatcaggcaaaatggaggagtgcagctgcttctacctttcctgacagaaaagaatgtgggtatcaaaatcgccgcgttgcacttaatgttccatttgtcgaaagactcttctcaagaattggctgagcagttcagggagacccatctggatatttttgtgaagatcatctcttcccctacttctcgagacgagaaggctgcagctgtcggtatcctgagcaacctcccagcgacagacaagaaggcaactgagattctgatgcgggcaaacttgctccctattctgatcaccttgtttgaggcaaacatggccgctgccgtgacacctcaaagaatgtggttgcttgagggcatcgctggtgtgtttatccggttcacagtcacctgggacaggaagctgcagagttcagcagttggacacggggtggttccttgccttgtgaagttgctttcagaaggatcggtggacgccaagtctaaagcggcaacatccttggcccaactgtcacagagcacgatggcgctgcgcaagtcaaaaacgccaaggtggctctgcgttcctccatcggccgaatcctactgtacagtccacagctgccagtgcacagtcaaaagcaccttctgcttagtaaaagccggcgccgtccatcctctggtccagacactggaaggcgaagagcgcggagctgatggagcggcgctggaagcgttgggcacccttatggaggacgaggtctgggagaacgggagcagggtgatagaaagggcgtcaggcatccatgctctgctgaggatcgccgaagccggagagccgagctcccaggacaaggcgatatggatgctggagaggatgttccggctcgaagcccacagggagcggtacggcgagatcgcgcaggctctgctcatcgatctcgcccagaaaggagaccctgccctgaaaccgatgatcggcaagatactggctcaccttgagctgctgcaaacacaatctagctacttttaagcgtgctggcgggcgtcgctgcagataccagatcgccagatttgtgggccgtgaagtgtgcatacctgtagctttaggagccatagcaaactgtgctgatatttggcgttggtaagttcaaatctgaactgaccatgcccaactattaaagggcacatggatcgttatttttcttgtaagtagatacagcgagttttgctccaaagaggaagaagatgcagactgtaatgaagtgtaaagtgatgatagtggttatagataagatggagtactgtgtatacaaaaaaattgccaaaaacacaaaaaactcgttcaacagaactacca

SEQ ID NO: 102304 - DNA, 365 bp, Zea mays
  Clone ID: MRT4577_24808C.1
aagattgaaggcaacacttcagtacagttacaaacgttttgtgcaatacatttatagcaatcacgattatcaacatatgcagcaagcggtggctcaggagcctatgtccaataacgatttcgaaaatacttatggagaaacagaaaccttgacgggagtgtattcagaagacaagaagtctagtggcaagggttgcaacttgtgttggctgaaaacgaatgataaaggttcgtttttggtgagctatagtccatttgaacagtatgcccagtttgatggcaaggaagtcatcgcttctggaagacattacactcctggaaaattcgtgcaacacatcccatctgctcatcactttgacgttgaca

SEQ ID NO: 102305 - DNA, 368 bp, Zea mays
  unsure (1)..(368): unsure at all n locations
  Clone ID: MRT4577_24809C.1
aaagaangaacaaaaccgcacgctgatacccgtcctcaattcccccgatcccacttttttatttctcacctcacaacccaaccactgtcacgcttacaatacaaatacttccccgcccactnaatacccacacccttattcacttccatctacaacacagccttctctccgactctgcttctcaaactacttctgtatcctcaccactaccaacactcatactactttctacaccttctacacttccatcactaacttcatctcccttattcaccaatactatcccattactctcttttcttccaaactataattcttcctcacccataatcccctactttctcactcttaccttcaactattccttt

SEQ ID NO: 102306 - DNA, 136 bp, Zea mays
  Clone ID: MRT4577_2480C.1
tggatattacgcgcacacaaggaagggctggggacgtactgtaagtcgaactgctattgcggcagaagtcgccccggaccgagctgacattgacgtgcaatatgaccgaggtgtcatacgactcgaggagccagag

SEQ ID NO: 102307 - DNA, 444 bp, Zea mays
  unsure (1)..(444): unsure at all n locations
  Clone ID: MRT4577_24810C.1
acggggcattttgcgaaccagcaactattactagctatgaaacgttccgagaaccaaccgggccgtatgttatataccaccatctgccgcactgaaacaactggacgcatacgaccggtcttaggatcaaaaactccgtcgaactggggatcgaaaaaaaagagggcgtctcttgcatgacaattgggaatgatgacaacacttttttgagataacccgatctaccaacacccgcctgttctgaggtcactcacctagcacgccatgcaaataactgaaccttggcccacgggggagggtgagaaaaactgccgaagagggagtggngtgtcctcacacgagcatggggccaatatcagaaagaggccctttttgtgtgccacacgagccagcgatttcttaagaggcgcaggcacctatcgcagcatgaaaaggttgaatgca

SEQ ID NO: 102308 - DNA, 344 bp, Zea mays
  Clone ID: MRT4577_24811C.1
taatggcttggggtatgaccaagccctggacagtgcaaatatgtatgtttaattcaatgagcattaattttattcattgcaattcactgcatgcaaatatggttcgtgcaaaactggggtgggtttgcaatacgagcattcattgcctaagtttggcgaaatgtgacaagagtttgctcagtcactttcatttgctcagtgagcctgaatctgtcgactcatgttttggagcccaaccatattacaccaagttgtttttacaatttgatgagcagatgaacttgtgcgctacattatcgaagattcaaagtccgtggaggaccatggcctataagaactggctt

SEQ ID NO: 102309 - DNA, 366 bp, Zea mays
  Clone ID: MRT4577_24812C.1
aagcaagataccaatacaacaataaatttagccagaaccaatgccacacaattttacaggcgatcactaaaatgaactacaatacatgcaacgaatatcatatttcagttctataccaagatgttttgaggtgtgtttacttgtaatgacagaacgggatggaatagaacgatccctcaaatagagttgtttatttcagggtcagaggttgggactagattatcccaattgtctttgattgtccctcaaaattagagggacgagagaggacgtccctgtcctgcttgtcctcagccgcaactgaacttgtcctcagccgcaactgaacgcatcccgcatccttagtcatcaagcgtggtgcaatgt

SEQ ID NO: 102310 - DNA, 314 bp, Zea mays
  Clone ID: MRT4577_24813C.1
cccgctcctccgggttactacatgcgggggaggtgggggcgtgcattgtattaactagctcctggtgtcggcttgttcttactgctaccagcggatggttcgtgaagggaggatggtgagatatgcgacggtgggaagaagctcctttaacactccctctcggacgagacttattctgacttctagccggatttagtgttttctttctgttgtcccaggtagacttcttgccgctgttgttctccctttcgttggggcctttgtgtcccacatttctaaaaggcctctcagtggcgcctgcgactctgctctgt

SEQ ID NO: 102311 - DNA, 380 bp, Zea mays
  Clone ID: MRT4577_24814C.1
gtggttggtctttttttttttgaacaaggaacaactttttttttgatggggggggccagtttaatacagacccgagacaccactaacactaacagggggcgggggcagactacgtacaccggacacgtaccaacagggggggcgaggaccagggggcttcaaaaacacaggcagcaaaaaaattttttaccaccacaccacgcacgcaccaattattgggtgacaaattggcaagacctttatttatataccatgtttcgaagcctttcttcttgccttgatcccgcgatcaacacccatcgatttatccggttcagttaaacggaccaaatggacaaacacacgggggggcgcaattgttgggcgggcgaggaataacc

SEQ ID NO: 102312 - DNA, 388 bp, Zea mays
  unsure (1)..(388): unsure at all n locations
  Clone ID: MRT4577_24815C.1
gacttagatgtgcaatacttatggcacatctagatgtgctttaccaaaactgaaaattttatatggacacaccaatnnatacttaatttatgtcgtcattatttcgcaggatgaaccaagggtgctaggccacactacaccatgcccttattgtccaacagaagaattcagcagggaagaaacaaatgagatttttgcagagaaacaagaaacagtcgagttctacaacaccagtaggctcagattatgtgcccccagccagccttacaacatcacagcctaactaatgttcctttcctgtgcccgctaggttggtgtgactgctagctatccggctggctctgcaagtgactgccttgcttcagctcatacgtgaaccgcgcactgg

SEQ ID NO: 102313 - DNA, 507 bp, Zea mays
  Clone ID: MRT4577_24816C.1
tcccgcaccccggccggggatcccacctctccctctgcccctccgcagcagagcacgaatagaatagcacagtcggcgaccacgaggacggcctacatcccgaccagcttcgtcggcaatggcggagcccaaggcgtggcagagcaggaccctgggcctgggcaccaggaactccaaggccgccgtgttcgtgttcgagtccgccgccatgaaggccgcgcccgcgccggcgccgggaaccctggacgcgcacttcacgccgtgcgcggacgtcaagggcctccgcttcggcgcgcagctcgaccacaccgccatgctcgcgctgccgggacagaggagcatcgacgtcgccgccgccgccgcgcaggtgggcgtcgtgcattgacggcttgtgacgaactgtgaataatttctttgtgttttttcctcgtggttgtgtgcgttggttttctgaatgcggcagtttcgttttggattgagaacaaaaaaaaaaaaaaaaaagcggcc

SEQ ID NO: 102314 - DNA, 251 bp, Zea mays
  Clone ID: MRT4577_24817C.1
caaaagttgtcaaggtttcataactgcacattgttctcgtaggtgtacccagtttcagtcatgggtggggagatgtacatgtcagctctgaagaaaccatttcctcttgtaccaatggttgcttctcaaggaattaaaatcggttcaatcaagggatatatggaagcaggggcatctgcagtggtcttatctgatgctatttgacagtcaattgatgagggatgggaaattcaatgaaatttcggaacttg

SEQ ID NO: 102315 - DNA, 808 bp, Zea mays
  Clone ID: MRT4577_24818C.1
ctcattcctcagctcgagctcctcggcggctcgccagtctgccgccccgcacggcgcatctgttccttctgctctgcgacggcgagcctctcccctccctccgtgctcgtatcgtagcctattttcgccgccgcagcttgcccagtgctgttatcttgtgttcggcaccgcgtcaaaggctgaccctctccaggcgcctggtagatcgcccagactcaaccgggtaagccttaccgcgcacgccaccatggccgagccctcgccgcctccggtgtcgaacgctggcctccgtatcctcctgtcgaaggaccggccggctccctcccctccacccaccgccgctgtctccagccacgccgaccgcgaccgcatcatcggagttttcaggagcgcgttgtctaggagcgaacccccggaaacattttcccttcagacggttcaggaagcaattaaacctcagaaggaaaccgtgttggttctagaggagaatcagtccttggaaaatgctcttcgaactttgctgcaggagcttgtgtcatctgcggtccaatcggataaaaagattatgcagtacgggaattctttggatagcggagaaagtaactgcctgataactcgccttcttgatattgtgctttacctttgcgaaagagggcatgttgaaggtggtatggtattccagctgttagaagacctaactgaaatgtcaacaatcaaagactgcaaagatatctttgggtatattgagagccagcaagatgtattggggaagcaagaactttttggacgtggcaaactagttatgcta

SEQ ID NO: 102316 - DNA, 104 bp, Zea mays
  Clone ID: MRT4577_24819C.1
gcaaggacgcatgggtttagaacaggttacatcaatacatcgtagtccaagatgattccaggccttctggggccctgggtggcctacacagggtgcagtttgtg

SEQ ID NO: 102317 - DNA, 527 bp, Zea mays
  Clone ID: MRT4577_2481C.1
ccggccgggctcgctcgctttgctttcccccaaatccaccgtgggctcgagcgtcgaggagaggagacgagacgacccaagactttgctacccacctttgcttcctgagcaaggcctgcggaagcgcctttctctctttcaatggacagcgacctacgttgccagtgctgctgatgggcatgggctcatccggccctgcgctcgacttcgccgcgctggacgccgagttcctagaaacgctatgggggggggggggaggactattcggggcgtcacggaggcgccgcgggggccgaaggtggaggcgggtccccagaggggtcgtaccagtgcgacccgtcgggggcgcgcgccaaccaccatgacaaagtgaggaagcgcaaggagccgtccacagcgtccaccgatgacaaggatgactgcccggacaaggcagcggaggccaaggtgcccgacgataagaggcgcacagtgggcggcagcgacaggccggcgaaaccgaaggtcaaagacgtgacgatgagcga

SEQ ID NO: 102318 - DNA, 358 bp, Zea mays
  Clone ID: MRT4577_24820C.1
cggttcgagttgcaggctcgtcccacgcgtcctggttccgaccgatacctttcttggaactcaagaaggatcttctcccctaccgacctagcgtaatcggcgatggcgactgaggcgatggacatctcgaagcccacgccggtggcgtgcggcgacgaggccgcggcggctgccaaggggaggatcggtagagtgttcttggagctagatcaggactacctgcatgtcattcacgacctgaagctacagagccattagaagactgacatctctcaccattattgaggcccaactgaatggcctcaactcccgagttacaatgctcagggaagagttgcagttgcttcaagagcctggc

SEQ ID NO: 102319 - DNA, 2651 bp, Zea mays
  Clone ID: MRT4577_24821C.1
gctggccgctcatcagcctctggcttgtgtttctccttcctcattcctaaccgcgagctcctcggacccggacgaaggcgccgccccgcaccccacatctgttccttctgctctgcgaggggaagcctctcccctccctccgtgctcgtatcgtaccctattttcgccgccgcagcttgctcaggcgggttatcttgagttcgtgagggcgtaaaaggccgaccctctccagcgtcctggagagtcgccctgactcaatcgcataaagcttaccgcgcacgccaccattcccgggccctcaacgcctccgtgaaccgccgccaaacttcgtattctcctgaacaaaacccgaatgtcggccctgcccgctaccacacttcaacatccgttatgggtcgcagcccatgcacagcccagggagttttcaggagcgcgttgtctaggaacgaacccccggaaacattttcccttcagacggttcaggaagcaattaaacctcagaaggaaaccgtgttggttctagaggagaatcagtccttggaaaatgctcttcgaactttgctgcaggagcttgtgtcatctgcggtccaatcggataaaaagattatgcagtacgggaattctttggatagcggagaaagtaactgcctgataactcgccttcttgatattgtgctttacctttgcgaaagagggcatgttgaaggtggtatggtattccagctgttagaagacctaactgaaatgtcaacaatcaaagactgcaaagatatctttgggtatattgagagccagcaagatgtattggggaagcaagaactttttggacgtggcaaactagttatgctaaggacttgcaaccaacttcttcgcagactatcgaaggcaaatgatgtggtgttctgtgggcgcattattatgtttctagcacattttttcccattatcggagcgttcagctctcaacattaaaggagttttcaatacatcaaatgtaacaaagtacgaaaaggatgctatggatggaatctctgttgatttcaacttctacaagaccctctggagtctacaggaacatttcagcaacccagctttgacttctacaaatccggcaaaatggcaaaagttctcttctaatctggcggttgtgttgaacacatttgaagctcaacctcttagcgatgatgatggaaaacttaacaatctgaacgaggaggaagatgctgctttcaatatcaagtacctgactagcagtaaattaatgggtttggagttgaaggacccaagttttcgacgacacatccttgttcagtgtcttatattttttgactatctcaaggcacctgggaaaaatgacaaagaaggtccaacagggagcatgatagaggaaattaaatcttgtgaagagcatgttaagaagcttctggaaattattccccccaaagggaaggaatttctgaaaagcattgaacatattcttgagcgggagaaaaattgggtttggtggaagcgagatgggtgtctcgcatttgaaaagccaccctttgaaaagaaaccaggtcaggctggtgccagaaaacggaagccaaggtggagactgggaagcaaagagctcagccaactttggaaatgggcagaacaaaaccccaatgtcttgactgatcctgaccgtgtccgcatgccatcaattacagaatattggaaaccacttgcagaagatatggatccatctgctggaattgaagaggagtatcaccacaaaagtaatcgggtgtactgttggaaaggactacggttttcggccaggcaggacttggatggattcgcgcggttttcggactacgggatcgaaggggttgtaccttcagaactactgccacctgaagtaaatgccaagttttcttctaaacccgcagagaaggttaagcggacgagaaaggaagattcaaaaagcgtgtcagctcatcagcccagagagcatcaggttgctgcgacacccgaaaccgacggcggtgttgacccggaagaaggcgaaggcgcggcgccaatggattccgacaacggcgcggtgggggatagccagaaacggagcccgggggaggtctctggccctgaaagcgggcagtgcgagcctgaggcggatggcgatgataacgtgaggacggaaactaccagtagggatgctcgtgccggagagatgaaatgaaacagtggcatgaagaggaaccagattttgtcgactcactcactgacattgaaagccgatcgagcgcgttttgaacagctgagatacattctcttgttggtgtgtactgtgtagtagacatcagtagccatccatttgaaggaaatgcttgccgtgacgtgctgctgcaaaaaaaaaaaaaaaaaaaaaaaaaaaaaaaaaaaaaaaaaaaaaaaaaaaaaaaaaaaaaaaaaaaaaaaaaaaaaaaaaaaaaaaaaaaaaaaaaaaaaaaaaaaaggggggggccgttttaaaaggatccaattttacttacccgggcttgcaaacgtaatagtttttttttagggcccccaaaattaaattaactggccggggtttaaaaacgtggggaacggggaaaaaccttggggttccccaattaaatggctttgaaaaacatccccttt

SEQ ID NO: 102320 - DNA, 878 bp, Zea mays
  unsure (1)..(878): unsure at all n locations
  Clone ID: MRT4577_24822C.1
actccttagggcgattgggtctctcgaggccggccgggatcaccaccaccccttcgccatcgccaccaccaccaccaccgccaacaccacccatctgaccttcgtcaaaatggccgatactgaagcaaccaagcccaccgtcgatgctaccgccacggagccgaccgccgaggccgaggccgagaacgacccccagtttgagcccgtcatcaagctcgagcagcaagtagaggtcaagacgcacgaggaggacgagtcggtcctcttcaagatgcgcgccaagctgttccgattcgacaaggaggccaaggagtggaaggagcgcggcaccggcgacgtccgcctgctcgagcacaaggagaccaacaaggtccgcctcgtcatgaggagagacaagaccctcaaggtctgcgccaaccactacgtcacctccgacatgaagctctcgccaaacgtcggctcggaccgatcctgggtgtacaacgtggccgccgacgtcgccgacggcgagccaaccgccgagacgctcgccatccgattcgccaactctgagaacgcgcaagccttcaagacggcattcgaggaggcgcagaccaagaacgccggctccaagtcgaccgacgctccggcccaggacgcccctgccgccaccgaggagaagaaggacgaggctgccgacgagaagaaggacgagtagaccaagaggcctcgcgaagccacacgagcgggcagcttgacgagcgagcgagggccccccatgtcctcgtccgccctggtccctccaccctctttcgtcttcaacgcacatctcctcctctcttttacgncgcaacctctgtgggatctcgaaggacgacgctctctttttctcttctttc

SEQ ID NO: 102321 - DNA, 703 bp, Zea mays
  unsure (1)..(703): unsure at all n locations
  Clone ID: MRT4577_24823C.1
ccggccgggccgaggcccgccgaccaaacttctgccagtaccgcttgcaccttacctgccaagctgcgtactgacggaacgccttgagcgagagcgaggttgcgctccactccactccactcgccagttcagttcttgcttcctgctcctgtcgtggtgccctgagtccctgactgcgaggagctagctatgcatccccgcggtggccgacgaactgcgtagcctgatcaaacagctgaataatctggggaagcaagcgtcaaggtaacaatgactgaaatgggagaagctctgagaacctgcatggagcggctggtggttgccagagaagagcgggagcagatcatcgtcgaggcggccaacgagatatcctccaagaagaagaaagtgcgcgagctccagctgaagctggaggacgcgaacaagaagatcgcgaagctcgccgccgagaacagcaacctctgcaaggccgctgacgtcaaggacgcgctgatcggggaggctgagggagtccgcagcggccactggggacaagctcgccgacgcgacggcgaggctagagtcggcgcagaaacaagccgggtcgtggaagtacgaggtgccatgctcagaaggagctggaggtccggggcaggagcgggagacgacctcnagtcgtcgacgccgcgcgccggcagcaggcggagcaccagagcggatcgcg

SEQ ID NO: 102322 - DNA, 249 bp, Zea mays
  Clone ID: MRT4577_24824C.1
atggcgcaccggacagtccgatttgatatctacattcttctttcacatacctataaaggagttatttttcatattttggataaaacagtgatcccactgctcaatctatcgatctatgagccaaacaagacacaaatcatggaacaagtggattgcctgcaacttaccatcagtgttgaagaatggttggatgacaaaggtcaaggagaatgttgtagctatgttattcaatttatatgtggtccatga

SEQ ID NO: 102323 - DNA, 411 bp, Zea mays
  Clone ID: MRT4577_24825C.1
acggacaccgaggtgtgtctactagccatcataataatgccgcagagcactgtttgcacgctggctggaccaggactatcatcactttccatgtactttgcatacaggaaagtgatcactgactgagctgagacattacatttactgctgaaaacatggatacccatgactaggaatatgacgttttttatttgccctcccccaatccatggcaattgtggtgaacaacaccattattggtttcagctgatatactttatgcttgtaaaaaaaatgaatgagcgccccttcttcataaataatcaagaagtgaaaggcggatacacgagattcatccgtctatgggagctcgactagagtatgagcactcgtacctgtgagggaacaaatgaaccgtgcttaatgcataca

SEQ ID NO: 102324 - DNA, 469 bp, Zea mays
  Clone ID: MRT4577_24826C.1
acccaaaaagggtttattcaaacctgttctgaaaaaaaaccaaccccttggggttcgacgggccctcgtagaccaagattccccccggggggaacaagcatacccccggggggggggctttttgggttatgggaaaaagggggaacccccagggggggtactaggcctgtttgtaaaccccacccaaaaaaatttgcccccccccaaattttataaaaaaaaagcggcccctgcatgcagggttggtttgttttggccccgggggttgctcaaaaaccaagaatttgggggggctcttttttaacaaggccggccgggacgaggaaattaaaaaggtttttcctttgaaccccctggagctgaaagacccgcccaagttttgggcccgggacccctggcccatgggagaaaaacttttttttgaaatttttggggatctggggggagcggaactcctttttaaaccccg

SEQ ID NO: 102325 - DNA, 473 bp, Zea mays
  Clone ID: MRT4577_24827C.1
agccttccacttccattggtccgttgattaattccggttcggcccccccatttccttgcaaagcccaatcttttgccaatttttttttggaaaaattatttaatcctttaggggccccaattcttgttgggaggggggttctgggaagggaaatccaccttttcttttcggctgaaccatccggggacctaaccaccgcgtcccccatgtcgaactccgagctgtccaagggcacgctagtgttcggcctccacttttggaagctcgtcgccatcggtgtcggtgccgaattcgtgctcttcctcgtcctcctttccctgttctgcttcttcgcctcccgccgccgacgacgccgccgagctgcccccgtcctccacctccccgccgtcgagcccaatgcccagcccaagcaccccaccaagccccccaaggacatccaagaggtgccctcccgcggcaccagggaccccgcc

SEQ ID NO: 102326 - DNA, 837 bp, Zea mays
  unsure (1)..(837): unsure at all n locations
  Clone ID: MRT4577_24828C.1
gggtacctcgaggccggccacaacagactgttcggntggaaaggcagactactctctaaagcaggcagagaaacattggttaaatcagtattaacagcccaaccgatttatcatcttacggtttttccagttcaaaaatggctgctaaagaaaattgataagctaagaagaggctttctttggaaaggaaacaaccctgaagcttgcagtgggggtcactgtttgatcaactggtctacaacatgtcagccaaagaacaaggggggactgggcattctgaacctagaacgcttcgcaagggctttaagaatcagatggctgtggatgcgttggaagaacagggataaggcgtggattggtttgcaatcgccatgcgacaaaatagatgaagaacttttcaatgcatccacggtggtcaacgttggtaatgggagaacagcaagtttttggaaatctagttggatccatggtcaggcgcctaagaatatagcaccaattctgttcaagaaagcaaggaagaagaacatctcagtttttcatgctcttagagccaatagctggattcagctatgtctgccatgcatacgagaagacgaaataaaagattttgtaaccctatggcaggctatcagtagcatgcacgaacttaataacttggaggattccatctcttggagatggacgactgatggtcagtacagcgcaagcagcgcatataacattcagttctcaacaaacttctgcacaatgaaaatctgttccatttggaaagcaaaaacggaacccaagtgtcgctttcttcgcttggactcttttacacaacagagtgttgacagc

SEQ ID NO: 102327 - DNA, 627 bp, Zea mays
  Clone ID: MRT4577_24829C.1
gccttggagtgctagattctgtttccattgtccattctcagtcacctgagcagccgaacgttctcagtcacctgcaggtcaggaaccaacgatgccgggcatccaccgctacaccgccgagctgctggtgctgctcaccatcattacccgcctcctgctgctggccacggcgtggccggcattgcccgccccagcgtcgctcgagccgtcgctgcttttcccgtccgccggcgccacctcgcccacgcagacccagtcagccggggtcgcctccacaatcccggccttcccggagcagtcagaggccgccgcggctgctgccacctccgtctgccagctcaccccgtcgcctccgctccttcccgctgtcctagcatcgtgcaacgccaatgccggcgggagtggcgtgacgctcccgccgcgcctaagatgctgcccggcgctcgccgcgtggctgtacactgcgtacgcgcccaccgcgctctcgggcagcggcgtcggagaagcgtcggtggccgcgtcggccgaggccgccgccgtggtggacttgccagtgctgccggacgacgcggaggaatgcgccggcgcggcggaccgtgcgctgcgggcggccggggtggcgctacc

SEQ ID NO: 102328 - DNA, 1800 bp, Zea mays
  Clone ID: MRT4577_2482C.1
ccggccgggaagcccggcccaaaacactcggccacaaacccatcaaggtcgggcccacgtgaggtccctcgggggcagtagctggccgtggacaacgccacgacgaccccgaccagagccagtccgctccgctccaccccttgctcacctccgcgacccgcaccaatggcgacgcccacggccccatcccacttacccctcgccaccgcctccgcgtccacctccttccccgaccgcttcctccgcacgccgtgcgcgctgcggccccgctcttggccccgcctgcgggcgggctccgtcaaggagtggcgcgagttcgaggacgacgcgggcgccgtcaaggagtggcgggagttcgaggacgccgtcaggaggaaggacctcccccgcgcgctccaattcctgcagtccgtggagcccgcggcggtgcaggtcgcggtccccgtgccgccggggcgggactgggaggtgctcgacgcctgcgtcgacgccgacgacatgcgcctcgtcggccgggcgtaccagttcctcgtcgaccgcggggtcctcgccagcttcggcaagtgcaagaacatcgttctggaagggccaagagaagtgacaccaacggttttgaaggagatgaccggtttggaagctgaaaaacttgcgccgaagaaatggggtctgtcgggaagttcaccgtatgttctcattggatttcttggaggcgtatcctttctactaacacaaggggtcgatctacggcctaaactgagtgctgtattgggattagcagcagccgatgcaatgttgctcggtggtacttgtcttgctcaaatctcatgtttctggcctccgtataaacgtcggatccttgtacacgaagcaggccatcttcttactgcttatctaatgggctgcccgatacgaggagtcattttggatccatttgtggcattgcgaatgggcatccagggccaggcagggactcaattctgggatgaaaagatggaaaaagaactagctgagggccatctatcaagcacagcgtttgacaggtactgcatgattatgttcgccggaattgctgctgaggcacttgtttacggggaggcagaaggtggagaaaacgacgagaacttattcaggagtctgtgcattctactgaacccaccccctgctgttgcacagatggcgaaccgagctcgatggtccgtcatgcagtcttacaacctcctgaagtggcacaagaaagctcatagagccgcagtcaaggcgctggaagacgggcacagtctcagcgttgtgatcagaaggatagaagaagccatcgcttctgacagcaaataaatatgaccgttgatcctttacatgtgttcttgtcaaccaagctttgttggcagcttccacaggacgcggaagaaggagaactttcttaattcgcgcgaagggttagtgtgtgttggaacatgagtggcgcttttcaaagaaagaaaggcagaagatccttggagctggagggaatagcggagaccacgaccagggcgtctgatggacggactagatcgagtgatacatccgttggagattttaaggaagtcaaaaggccgttgtgaacttgtgattagtgtcgatgccagatatggcagatgtgcatagggagatatgactatatgatgtcttgatgagtatgcagacatgagctattttgcaatggatggataagtaccgttggtacttgaggtacttttattgtttattatttaaaaaaaaaaaaaaaaaggcggccgaaaacaaataagcaaaaaaaggggggcc

SEQ ID NO: 102329 - DNA, 683 bp, Zea mays
  Clone ID: MRT4577_24830C.1
gagccctatccttttccccactcccgggtctccagcattcctatcctctccccgaccgcccgtgccgccgtcgtcgccgccgccgcggcttcccttcctctcccgagccaagatgcatgttgaaaagctcaagaagagggcaggtgctgtgcgcaccggtgggaagcgcaccgctgcgcatgaagtaacaaggcagtccacaagactacaaccacagatgacaaacggcttcccagcaccttgaaaataataagagtgaacagcattcctggcattgaagacgactgcatctttaaagatgatgttgctattcagtttgtaaatcctatagcgcaagcggctattgctgctaatacatgcgaggtcagtggaactccacatacaaagaagctgcaagatctgcttccgtcgattatctaccaggttggtcctgaccacctgcacaatctgcggacgctcgcagagcaattccagaagcacgcctctggtgcttctggtgcagaggctggtgccagcgctgagggtgttcatgacgatgatgatgacgtgcctgagcttgaccctgcacagacatttcaggaggccgcgttagagaaaaaggagtcctcatgatttagttacatgcccgctgttgctagacatgccattagaaggcacctgtcgagaactccgacgtaccttat

SEQ ID NO: 102330 - DNA, 205 bp, Zea mays
  Clone ID: MRT4577_24831C.1
agcctcatccacatggctaggagcggaacctgatatgccaactcataccaagggtggggggggagtatggatgaatttccctctaggccctagatgttccatgtctcacggagttggcttccataattacctgtcacacttggcctttcttgatatacatcatgaatgtatttgacatgaaacatctaatttatctattagccct

SEQ ID NO: 102331 - DNA, 449 bp, Zea mays
  Clone ID: MRT4577_24832C.1
ggccgcttttttttttttttttttctttttttttttttttttttttttttttttttttttttttttttttttttttttttttttttttttttttttcaacgggaaccaaaaaaaagttttttgtcccccaaaaatttatttaaaaaaaaacccccccaaaaccaacacaaaccatttgcccaaaaagataaaggaacccaccggccttaacattgcccttttgggaagaaaaaaacctttttgggccccgatcaaactgccttttaagggacccaggggggcccttccccccaaggggggcccaaaaccgggggggggggttggcccccgcccttggggggggggggggcccccagccccgaaaaaggagggatgggcccacccttcccctttggtgcccaacaaagaatgtttttccctcttgggccaaaaacacccttgttgaaaaa

SEQ ID NO: 102332 - DNA, 513 bp, Zea mays
  Clone ID: MRT4577_24833C.1
gaaaataataataataataaattggttggagtgcaagggttacggtttacagatataggacccccagatatcaaataaactaatctcacaactttcaaattccagcgagtaaggggtcaaaccctcaacatttccaaaaccaaccatatacgcgcccaagtaccaaactgcctgatttctttgaagtagctgtttcaaattccaacaaaaaaacacgagacatgagcaaatctgggcagatgtcacaaaatgacgctaaggtcataactttttcaaattccgtcaagaaaacatgagacattagcagatttggtcagatatcaccacgtaacgctagcaaatcgtgttccagtattgcatgatgcaacttatataatgagacattcaggggaaatgtgatcagatttggattcaggacaacttacctgggaagtcctgtagcaaagtgctagttcatatgtgtgcccgtttagtagaagagggcaatgattaggaatcaacttcagttatata

SEQ ID NO: 102333 - DNA, 484 bp, Zea mays
  Clone ID: MRT4577_24834C.1
aggactctgatacattctcttggctatttatactggatgctcttgtcagttgcatcacactcatgcaaccattcaatgatttgacaggaacccaactgccaccgacgcttatgctgcagctacccgctacatctaatgctaccgacagttttacatgtgcatcataaaccagccagatgggaatccatcagcggcatggatgggggctcttgacacttacaaagaaaggaacctacttcttggccttcctgaccacaccctttttagccgctgcgacaggaccttacttattctgagttggcaccttacttaggagccggcggtatccttttcttataggtagacacacccgacttcttggttgacttggcaattgaggacctgacctaggtgttgtaccacctttgcatgtcgccagtcgggctagagctacgcggaatcatgagcaacaggcttggccttgggctagggcttggccttgacc

SEQ ID NO: 102334 - DNA, 228 bp, Zea mays
  Clone ID: MRT4577_24835C.1
cccacgcgtctgttatatcgccaaaagtcgcacttccccaacggtatccaaccgaacccggcggcggcggcggcggcggctatggcggcggttacgaacgccgatgtggaggtggtcgactttgatctagatcacgatgacctcatggacgaggaccccttgccttattcagagccggtccccaccttgcgtctccgctccaccatcgttgggctatgacccgccttc

SEQ ID NO: 102335 - DNA, 944 bp, Zea mays
  Clone ID: MRT4577_24836C.1
gaataccacgcatggagctaatatctggcgatgatgcgtgcacggagcggctgcttcatgacgacggtgaagtccagcgcttccgccatttccaccgccacgccgtccaccggcgggcgccactccaagtcccgcaccatcctcgccacgaagtactcggcgtgctggcgctggtgtcgccgtcgtcgttcccgcgcgtggccttggcgtggatgagagggacgaacagatcgtcctgcctccgccgcaccgcgacgttggcctcccaccggctgcggaagagccgtttggtgactgcgggaaagaaggcgaagatcgggaaggtggtgagcgtcaggagcgcccggtgctgcagcccctcgatctcgtcgagcgtgtcctggcccagccgcacgccgaagcacatgtacactagcagctcgaacatggcgcggcggaggaacggcctcagcgtgacggtagtggcgtcgtctccggcagcgccagcgccagcgccagcgtcgctccgacgactgcgacggaggaggttgtcgacgaggccgtcgcacgcccaccgcctggcgggcgcgaagagggcgacgcgggcgggctgcagcgcctctgcccgcgaggttgcggcgcacgaggcgccagtatgcgccgtagggcgaggagctgacatcacggccgccggcgctgaagaggctgtttgggtcaacgggtggcgggcggtccgcgaaggtggcgccgccctggacgaggaggcggtgcgcgaggcggcggtcggcgacgaagacgagcgtgcgggcgaggcggaccgagatgacggggccgtagcgcgcgtgcaggtcgcggagcagcggagccaggtcgaagatggagcgccgcagcgcaaggaacttggcgaggaagagcagcgccggcggacccggcatcccgcgacccctcgagccggccttcgaggt

SEQ ID NO: 102336 - DNA, 294 bp, Zea mays
  Clone ID: MRT4577_24837C.1
taaataattacagggtcagcaaaacttcagtgtaccatcatgattgtcaactaagcacccaaggcaaagaacctatcaagattttgttttaaagaaatcttaatactcagttgttacatgttatgttgggtgcattttatagtttataaaaacagcaactgccttcccaagcatgttttttttggctaaaaggggaccactagcctgggtcatggttctggcacgcggttttcttattcacacacgcttcttgatccattactccattacatagtctaagctataaacaaataa

SEQ ID NO: 102337 - DNA, 878 bp, Zea mays
  Clone ID: MRT4577_24838C.1
ggatcccccgggctgtttatgcagattcacagtcgagcgatctttgtcacagcaaacttgccttttactacatatccgtagctttcgaggcttatcttgggtgagccgcgtttgacggattagcatcaggagttgcagcacttgtacggcatcttcccgcaggcagtgctgccattcttttttgtatccatagccttgctgatatagctacagtgctttgtgcaactgcaaatgttcaaaacaaatccttatcaaataaagggcccatgtaatctttcgcctttaagaatgagagggatcggtcgctgtaaatagccttccctgtggcaaccaggataagcccacaacggttgaaggagctggcacagttggtgaccctgcgaccgaaggaaagccaggatgcggtcctcgatgacatgcacacccatgtcgcggagtctgacgtttgatctcggaagcccccccaagttcccaagacccagccctaggtgtatatatatagttgttagactatcagtatatggtctaatagttatgtgaaatgtcgaacagttagcaaccacgacatatttatagctcgcccatatttaaacatgttcgaagaaaattttaatgtggatggataagatgtgtctttttgttagtttattggatgctacttgcagttttttttccttgagatctaccaacaatgagtaatacaaatgagttttcgagaaaggatctctcatcaaataaagggcccacgtcatctttcgccttttcaagaaaaaaaaaaaaaaaaaagcggctagctagttcagcaacagcccagatagggatacaaatgaaacagatcttaagtattcagctagttagaggactgaattcacttgtct

SEQ ID NO: 102338 - DNA, 348 bp, Zea mays
  Clone ID: MRT4577_24839C.1
cggttgcgtgggttcggcggggtcctagccgccccggccgtttctccaagcgctgtggggtcggtccacctccgccgagaaaaaaaaagctgcctttttatctccttcggcccggcgggcgcgcccagctgagatccggcgccgcacacctgggctctgggggttccggttcttatccggaaagggggggcggcatccgaggcggggcgccacgggcgccatttgacgagcggttggccaaggcgactaccggcgcgggaaagcgcatcggcaaggcccgcgcgccggggcttacataaggaggaacccgactggccctaccgtaccgacccgtgggaagggacccgg

SEQ ID NO: 102339 - DNA, 469 bp, Zea mays
  Clone ID: MRT4577_2483C.1
cccgggctcgacccatcgcgtccggatagacatgactagaacgggcttaagtcatactaacgcccaatgcaaagcatatacagtgctagctttacatgacctagaaggtgccacagcatctgatgagatacaaccaaacctatcagtctgatgctgtgtctgatatcagctgggaaagtgtgtttgatcagatcatggaagggttcttctgcaatgaagacaggtataccatctataaggcatgtctaacaacattaagggaacatcctgatcaatacatatctgctgcactaaacatggaatagtgaccatgtttttaaaacagaaataacttagtagagatttatttactaaatgtagaaatcgatgttcttactatagacttatgactaagggcctagggtataggtaactacagctacagacgatactatgcaggtggcattgtctcattagttgagcctttaaa

SEQ ID NO: 102340 - DNA, 1097 bp, Zea mays
  Clone ID: MRT4577_24840C.1
cattgggtacctcgaggccggccgggatcgccagattgctcggtagccagcgacgctggaactgtgggctccgctacagacgaggagaccgctgccgtcacagccgagcgccggcgccgagctacgtcctgggtgagcgccgctctcgctacggaccagtccgccttcggcatctacgacctcaaaccggtccccgccaccgtctcctcgccgctggccgtggtcgtcgtcgacgagtccgcgaagccggcgacggccacagccacggctacgaaatcatcgccgtcgccgaagtcgcggatgtcccctgcgaaggggaaagcgaggacgggcgctgcggcggcagcagcggcggcgctgacgaagacgtccgtgccgacggagtgggagagaggagaaggggcagaggagaggggcgaactggcgaaacggctcggagaggagtcaaggggttggttcctcggcttcgtggagcggttcctggacgctgacgtggcggcgtccgcgccgtgggaccgcgagcgcgcggccaggatgctcccgcagctaaagcgggtcaacgactggctcggcgagatcgcaaagcgcggcgagactcagtcgctgccgcctgccgacgcggacggtgaggcgaccaccacgagcaccgcccctgtccccccgaacgacggctgcggcgtgcccgaggagacgatagagcggttaaggaagaagatctacgaatatctcctcaccaatgtcgactctgccgccgcaatgcttggcggtggcggaggcagcgcggcggccgccccgacgaacgggaaaaagggctgacgcgtaaacgggacgaacgggaaaaagagctgacaggtaaacgtgtggtctaattgggccgttagttgtgtggaatttgattgggccaaaaaatgggctggatgagctaatgtaggcttagtttctgttgtttttttgctgggctttgagcctttctgcttctcttagtgtttcttattatggctacagggaaaaaaaaggtggtgaaaatttgacttgtattcccctttctctcaaattataagtcattttatttttaaaagttaaaaaaaaaaaaaaaa

SEQ ID NO: 102341 - DNA, 469 bp, Zea mays
  Clone ID: MRT4577_24841C.1
cccacgcgtccgatttaaggccaaaatatgtattcctctcaagccacatactcagagggagcaatctatattatagaactatgataaagcttaattgacatatcttttgatcttatatatctctttcagttggtacttgctctatattcacatttctgcttataccaaggttcaatatgtagaatttgtatcctcggaccgtacatgttctaaagtacattaatctacaaatattcatcacttgtatgcacaagtttagggggagcaattctctacacattaaatctttgagactaaccattcttccagtatatgttgtgcttagtctcaaaggaaaagcatttgaaacagggggagaattttcaaaatcttgaaaatgccttttgaaatcatatccttataccattggctattgtaatactcaaaagtgcaatgatgagaatagagataatctcaataatttgtggcc

SEQ ID NO: 102342 - DNA, 524 bp, Zea mays
  Clone ID: MRT4577_24842C.1
tagccggcattggggggccgcacgtgctctccctcccatttcctgcgaggtggttggtggcgatggccttcaagctgatcaccaagcccgaggcggcgtcgcccgctgctgcttactggggagatctcgcccaacaactgcgcaacgcccatagctaacgtagagaggggggatcgaagtgacatattgacattggatagcatcagacaagttttgattagactagaagacagcatcatatttggccttttggagagagcacagttttgttacaatgctgatacatatgatagcaatgctttccacatggatggttttggaggatctttggttgaatatatagctagagaaactgaaaagctccatgcacaggttgggagatacaagagcccagatgagcaccctttcttttccaaggatctgcctgagccccggttgccacctatgcaatacccaagggttttgcatcccattgctgattctatcaatatcaacaaagagatttggaaaatgtattttgatga

SEQ ID NO: 102343 - DNA, 537 bp, Zea mays
  Clone ID: MRT4577_24843C.1
gcacagacgacgtcctgaaagcctaccctcgcctccgactgagtcatggacgaaaggttttagaagttcgtccgatggtagactggaacaaggggaaggctgtggagttcttgctggactccctggggctagctgactccgacgaggtgctccctatctacatcggagatgaccgaacggacgaggacgcgttcaaggtccgtggtcaatttggttctttccttgtcatgttagaaaatggacttcgatgctttaaaacctgcaggttctacggggaaacaaacggggtttggggattttggtgtcatctgtaccgaaggaatctcaggcgttgtactccctgttggatccacctgaggtcatggacttcctgaagagactagtgaaatggaaggaggaagaagaagcacaacgaataacagtcaagcagttgttagtatctgttgatgactttagggttaacctctgacaaagagggactagggaactcgactgcacctgatgccaattctgcagtctatagccaatctcttcatt

SEQ ID NO: 102344 - DNA, 1213 bp, Zea mays
  Clone ID: MRT4577_24844C.1
gccggccgggctgcagagatcggtctccctcccatttcatcttgccattttccttgcccaacgtgctctccctcccatttcctgcgaggtggttggtggcgatggccttcaagctgatcaccaagcccgcggcggcgtcgcccgctgctgcttactggggagatctcgcccgggggccgcagggtacgagccgcgttgccttcggaccagcgcccaggaacaaggggctccgcgcggccaacaactccgcaacgcccatagctaagttttgcatcccattgctgattctatcaatatcaacaaagagatttggaaaatgtattttgatgaacttcttccaagattggtgaaagaaggaagtgatggtaatgctggatccagtgctctttgtgacacaacctgcttgcaggcactctccagaaggatccactatgggaagtttgtggcagaggccaagtttcaagagtcccctgaagcttacacgccagccataatagcccaagtctgcttttgttccaactattagtatttctagtactactattttcatttattttttattttatttcagagtttcagaacaaaatgatatttcgattcatttgaaaaatatatctatttctcgtcacatttggcaaaattcaggaccgtgatcaactcatgaaccttctcacatatgaaacggtggagcgtgctatcgaacacgtggtcggagcatgaagccaagatcatatgcaagaggggagcgtgctactaaggcacagggtgagccaccggtctaagatctttgggcaataggtgaacattggtgataaggacaacggcagcccaccggtctaaaaaatcaggccgagcttggtcgccaagctgtacagctacagaatcatgccgctaaccaaggaggttgaggtcgcgtacttgcttaagaggctggattgagtgtgtttacgtagctgtaaaactgccagatccgaactcctggtattaaaccataacatcggtaagtacccatttctgtggagaggatgatccgaattcctgtcattaaaccagaacatcagtaagtacatagtatataccatgtgtggcaagcaacatgcataatatcatctggagttgcgcttactcgcccctcgtgcgtaatgctaatggttgtggcctgtatggaatgctgggtcactttctttggctgggtgcccttttgaatcagagt

SEQ ID NO: 102345 - DNA, 637 bp, Zea mays
  Clone ID: MRT4577_24845C.1
gacgacccggccggggtcaaaaagcacaagcaaagcaaccagattaccagccaccactactcgcctgctccgctcgcgcatcccatcccagcggcggcagacagagagcagggatcggcgggtccgccgtcgacatggctcggtacgtggagatgctggacatgggcgtgcgcatcgcggcgaggttccactcgcactgcccgcagacggcgcgcatgtactacaagccgccgcagacgcagacgcagacgcagtcgtcgtcgtcgtcctcggccgacgacgccaaggccacgagctccaccctcgacgcgccgtcggtccggcggcccttcgcgctcgcggcggcggcggcgacggagttccgcgccggcgacaggtggggccaccagctgcacggcctcgacaccgcgcaagtcgtcgtgtacgaggtcgtgtgaggaatccacgaggggaggggaacaagaacgaccttcttggcaagtgccgcaagaaatttgctgcgagatgtgtactatgttctttgatttgtacatagctgtgtcggaaagttttcgtccaacacagatgaactgagaaaacattcattcattcaaaaaaaaaaaaaaaaaagcggccaaaaaaaaaaaaaaaagtccac

SEQ ID NO: 102346 - DNA, 1397 bp, Zea mays
  Clone ID: MRT4577_24846C.1
cattgggtacctcgaggccggccggggctcgctctccctcccatttcatcccggcattttccttgcccaacgtgctctccctcccatttcctgcgaggtggttggtggcgatggccttcaagctgatcaccaagcccgcggcggcgtcgcccgctgctgcttactggggagatctcgcccgggggccgcagggtacgagccgcgttgccttcggaccagcgcccaggaacaaggggctccgcgcggccaacaactccgcaacgcccatagctaaggtagagagggttgatcgaagtgacatattgacattggatagcatcagacaagttttgattagactagaagacagcatcatatttggccttttggagagagcacagttttgttacaatgctgatacatatgatagcaatgctttccacatggatggttttggaggatctttggttgaatatatagttagagaaactgaaaagctccatgcacaggttgggagatacaagagcccagatgagcaccctttcttttccaaggatctgcctgagccccggttgccacctatgcaatacccaagggttttgcatcccattgctgattctatcaatatcaacaaagagatttggaaaatgtattttgatgaacttcttccaagattggtgaaagaaggaagtgatggtaatgctggatccagtgctctttgtgacacaacctgcttgcaggcactctccaaaaggatccactatgggaagtttgtggcagaggccaagtttcaagagtcccctgaagcttacacgccagccataatagcccaagaccgtgatcaactcatgaaccttctcacatatgaaacggtggagcgtgctatcgaacacagggtggaggccaaagccaagatcttcgggcaagaggtgaacattggtgctaaggacaacggcagcccaccggtctacaaaatcaggccgagcttggtcgccgagctgtacagctacagaatcatgccgctaaccaaggaggttgaggtcgcgtacttgcttaagaggctggattgagtgtgtttacgtagctgtaaaactgccagatccgaaactcctggtattaaaccataacatcggtaagtacccatttctgtgaagaggatgatccgaactcctgtcattaaaccagaacatcagtaagtacccagttttggggagaggatggaaaatataccatgtgtggcaagcaacatgcataatatcatgtggagttgcgctttggctgtatggaatgctacgtcactttctttggctgggtgcccagtgttttgaatcggagtaaaattctctcattgtcgttggattttatacagatccgctcaagtgccatcgaaattttcaacttaaaaaaaaaaaaaagaa

SEQ ID NO: 102347 - DNA, 1376 bp, Zea mays
  Clone ID: MRT4577_24847C.1
cctcgaggccggccgggacgctctcagtctcactcccacggtcccactcctcacgagcgtccagagtttaggtgctcgtggagtcgtggtggaggtggtaggtgtcgatggccttcaagctggccaccaaggccgcggcggcgtcgcccgctgctgctcaccgcgggggtctcgcccgggggccggagggtacgagccgcgttgccttcggaccagcgcctagaaacaaggggctccgcgcggccaacaactccgcgacgcccgtggctaaggaagagagggttgatcgaagtgaaatattgacattggatagcattagacaagttttgattagactagaagacagcatcatatttggccttttggagagagcacagttttgttacaatgctgatacatatgatagcaatgctttccacatggatggttttggcggctctttggttgaatatatggttagagaaactgaaaagctccatgcacaggttgggagatacaagagcccagatgagcaccctttctttcctgaggatctgcctgagccccggttgccacctatgcagtacccaagggttttgcatcccattgctgattctatcaatatcaacaaagagatttggaaaatgtattttgatgaacttcttccaagattggtgaaagaaggaagtgatggtaatgctggatccagtgctctttgtgacacaacctgcttgcaggcactctccagaaggatccactatgggaagtttgtggcagaggccaagtttcaagagtcccctgaagcttacacgccagccataatagcccaagaccgtgatcaactcatgaaccttctcacatatgaaacggtggagcgtgctatcgaacacagggtggaggccaaagccaagatcttcgggcaagaggtgaacattggtgctaaggacaacggcagcccaccggtctacaaaatcaggccgagcttggtcgccgagctgtacagctacagaatcatgccgctaaccaaggaggttgaggtcgcgtacttgcttaagaggctggattgagtgtgtttacgtagctgtaaaactgccagatccgaactcctggtattaaaccataacatcggtaagtacccatttctgtgaagaggatgatccgaactcctgtcattaaaccagaacatcagtaagtacccagttttggggagaggatggaaaatataccatgtgtggcaagcaacatgcataatatcatctggagttgcgcttactcgcccctcgtgcgtaatgctaatggttgtagcctgtatggaatgctgggtcactttctttggctgggtgcccttttgaatcagagtaaattcgctcattgtcgctggaacttctacaaaacaa

SEQ ID NO: 102348 - DNA, 192 bp, Zea mays
  Clone ID: MRT4577_24848C.1
aaaattcaacagtcatcactcgcattacgccttcaccaggaggaaaatgtcaaaagacaaagccgaagacgcacaaggactcatcacctcgcgcgccagcgagacagactgtagtgcccaaagttgacatgtcatgggagaggctgtgttggaggctgtagagccgatccgcgggtgtagggaaggcgtcaa

SEQ ID NO: 102349 - DNA, 1368 bp, Zea mays
  Clone ID: MRT4577_24849C.1
ttgggtacctcgaggccggccggggaaaaaggacgggccgggaaaaattacacgctctccctcccacttcgtgcgagcgtcccgaactaagttgctcgtggtggaggtggtttgtggcgatggccttcaagctggtcaccaagcccgcggcggcgtcgcccgctgctgctcactggggagatctcgcccgggggccgcagggtacgagccgcgttgccttcggaccagcgcccaggaacaaggggctccgcacggccaacaactccgcaacgcccatggctaaggaagagagggttgatcgaagtgaaatattgacattggatagcatcagacaagttttgattagactagaagacagcatcatatttggacttttggagagagcacagttttgttacaacgctgacacatatgatagcaatgctttccacatggatggttttggagggtctttggttgaatatatggttagagaaactgaaaagctccatgcacaggttgggaggtacaagagcccagatgagcaccctttcttttccaaggatctgcctgagccccagttgccacctatgcaatacccaagggttttgcatcccattgctgattctatcaatatcaacaaagagatttggacaatgtattttgatgaacttcttccaagattggtgaaaaaaggaagtgatggtaatgctggatccagtgctctttgtgacacgacctgcttgcaggcgctctccaaaaggatccactatgggaagtttgtggcagaggctaagtttcaggagtccccggaagcttacatgccagccataatagctcaggaccgtgatcaactcatgcaccttctcacatatgaaacggtggagcgtgctatcgaacatagggtggaagccaaagccaagatcttcgggcaagaggtgaacatcggtgtggaggacaacggcagcccaccggtgtacaagatcgttccgagcttggtcgccgagctgtacagctacagaatcatgccgctaaccaaagaggttcaaatcgcgtatttgcttaggaggctggattgagtatgtttatgtagatgtaaattgccagatcagaactcctggcgttaagccagaacattggtaaataccggttttggtgtcaggatgcaaaatgtaccatgtgtggaattgtgccaacaaacaagcataatatcatgtggagttgtcgagtagtcgcgcctcgtgcgtactgccaatggacaatgtttgtagactgtatggaatgatgggtcacttcctttggcgggtgcccttttgaatgggagtaaaattctctcattgtcgttgaaatttatacagatccgctcaagtgcgtgcgaaattttcaact

SEQ ID NO: 102350 - DNA, 334 bp, Zea mays
  Clone ID: MRT4577_2484C.1
aaaaaaaaaaaacaaacttggggcccagccggggggaaatatgggaaaaattgtttgctgggggaaatttttatccccgccccttccccccaaattgggggcccgaaccaaaaaggggaaagcctggggggccttttggggggcccaccccggattaattggggtggcctaaatgcccgttttgggggaagaaaacctttcgtcccacttgccttaaagtaaccggccaacccccggaagaaaaagaggcttgggttttgggggctcttcccctttatcattaaatggctcccccccctcggccgctttgtccgggggaacggcttcccctccc

SEQ ID NO: 102351 - DNA, 1010 bp, Zea mays
  Clone ID: MRT4577_24850C.1
ctcgagccgccgggacggccgtctacttatgcaataaacccccggcatttcctcgcctaacatgctctcagtctcgtcccacccctcgcgagcgtccagagcttaggtgctggtggagtcgtggtggaggtggtaggtgtcgatggccttcaagctggccaccaaggccgcggcgacgtcgcccgctgctgctcaccgcgggggtctcgcccgggggccggagggtacgagccgcgttgccttcggaccagcgcctagaaacaaggggctccgcgcggccaacaactccgcgacgcccgtggctaaggaagagagggttgatcgaagtgaaatattgacattggatagcattagacaaggtttgattagactagaagacagcatcatattcggccttttggagagagcacagttctgttacaacgctgatacatatgatagcaatgctttccacatggatggttttggtggctctttggctgaatatatgcgtagagaaactgaaaagctccatgcacaagttgggagatacaagagcccagatgagcaccctttctttcccaaggatctgcctgagccccggttgccacctatgcaatacccaagggttttgcatcccattgctgattctatcaatatcaacaaagagatttggaaaatgtattttgatgaacttcttccaagattggtgaaagaaggaagtgatggtaatgctggatccagtgctctttgtgacacaacctgcttgcaggcactctccagaaggatccactatgggaagtttgtggcagaggccaagtttcaagagtcccctgaagcttacacgccagccataatagcccaagtctgcttttgttccaactattagtatttctagcactactatactcatttatttcttatgatatttcagagtttcagaacaaaatgatatttcgattcatttgaaaaatatatctagttctcgtcacatttggcaaaattcatgaccgagatcaactgatgaacct

SEQ ID NO: 102352 - DNA, 433 bp, Zea mays
  Clone ID: MRT4577_24851C.1
ccaaaatattaataaacgctagttgctatgaaaaccatttgcctttttgactcttcgacgccgtctactagtgaggaacttgcattgatctttctgcatagtacagtactacttgctttctttacagtaaagtattagctagtatctgatgtgtgtctccaatttatatatatttttggaacctcatgtgtggccgttgtgagatctttctcgatggtagatattgaggacttgttttcaaatgcttcgagttaagaataagacaacataaaaagtgttaaatattaaagtccttcgcctatcaagacattatgtctcttcgggtataataaattcttgacgaaggttaatgaaggaaaaagccttcgtgaacacaatggatgataaggaagaattcatatacgaaatacgaaaaattatatagatatcatta

SEQ ID NO: 102353 - DNA, 169 bp, Zea mays
  Clone ID: MRT4577_24852C.1
aggccgcttttttttttttttttttgcatctcaatcatatttgattatttctagaacacatgccgcttgaggcccattatcgatactctcatatgtatctaaagaggcacctccaacgatgggtgctgccacaacagggaagggtttccttcaaaagaaaaaccggttt

SEQ ID NO: 102354 - DNA, 419 bp, Zea mays
  Clone ID: MRT4577_24853C.1
ctatattatattgttgttttttatgaaccacccaaacgccgacggaaacaaagaaggggggccaacaaacaaaaggtccaagggtaaaaagaacaaccacaaccggcaagtgggggggggggggcaaccaaaaacagaacgagagttggaaaaaaaaaaaccgggttagaaaaacagaaaaagatacatgagccccaaataaactgtggaccttacagggaaaaaaccagggttgcaccgggacgaaatagggccccgaaaaaagtagagagcaaaaggtcctgccaaaaaacggtttaaaagcgggcttgtttccgctaaaaggcccttttttaactggggagggaaaaaacaatacttaatttacgggcctaagggggggcttatttaaccgggggtggctcataaggaaaggaaaa

SEQ ID NO: 102355 - DNA, 286 bp, Zea mays
  Clone ID: MRT4577_24854C.1
gcaagatggcgggtgaaaaggcggagaagcctgataaaaaggagcagaaacctgcagccaagaaggctggcggtgatgctactgccccccgggcccggcccgctggtgcggtcaaaaagagtagttctaaggctaaaaagttgaggaagagtaagccccattgcagccggaaccctgtcctggtgagaggaatcggcaggtattcccgatctgctatgtattccagaaaggccttgtacaaaaggaaatactctgctgccaagacaaaggttgagaagaagaagaa

SEQ ID NO: 102356 - DNA, 551 bp, Zea mays
  Clone ID: MRT4577_24855C.1
agctattccaattcgctcggaaaattgaggaattaatgtacaacatgagccctggggagatgcccttccaagttggaatgtcaaaggtagattttcgcaagatgttgaagtctagcttaactggacttgacaagacaatcaatgcaatgtatagaaaactacagaagaatatgactgccgaggaattgctgccttcgctatgggaaaaatgcaagaaagagtttcttgataaatacgcaacattcctcaagttgatttcgaaaatatatcctgacgagaaggtgatatctgtgaacgaaatgagagatactctagcttcactgtagctatttcgttagaaggttcgcatgtccgttggtttgcttgcgcatataagttgacctgattcagcatcatcttaggttcttgatcctcactgaaccaactatctgatatgtgatcccttaccaattatctgattcatggtctgtcgtggaacctttaagggcttgttcaatctatttggattgggtgggattgagtgagtttcaatccaaataagttaaaatctt

SEQ ID NO: 102357 - DNA, 111 bp, Zea mays
  Clone ID: MRT4577_24856C.1
cagacccaaacgtagttaccagacacaattgacagtgaaattccacttgtggctgtgttgggataaagctagaacacacgaacagggtgtacctgtttgcccacgcgttcg

SEQ ID NO: 102358 - DNA, 1351 bp, Zea mays
  Clone ID: MRT4577_24857C.1
ttttttttttttttttttttttttttttttttttttttttttttttgtgcactgccaccgaaattacttagccaaaagaggcaaatgcaatggttgtgataaaaggacatgcttttagtctagtgtactgtcaagaaataccctaactatcaggagaagagagctgatttgctgtcctacgatcaccagtcactgacttatcattgctacgcctacttctttccagcgcggggttttcctttcacgtcagaatcctgtgcactatgtagaaatatatttgtctttgcagtagaaggattatgcttctcagcacctttgctccaatcataacataccgcgtaagcaaatatagagccatcatgattgaatgcgctgcatgtgatgggggatggacacctattataagccttcagcctttgcttactgtccttatcccaaaagttgaaacttccatcaaagcctgtagtagcgaatgtaccatgcacaggatgaaagttcaacgagctaatagcgtatatatcattgccatcgcggggacacttgaatggaaagttttttccttgctgagactcttccacatgatgaacaccaactcgtccttctatagacccaatcaaaaaaccttgttgatcaggaaatgcagcaagacaccttgtctggagcttcaaaggtgacgtaatcctcttgaattcagcctgtggattctgcagattgaagactattacgttgcgatcagcagtgccaaccaccatgagaggataacaaagcgatagagcatagcaacgctcaggaagttgctgaacatgcactggttggggttgcctaatgtcccagtacctcaaagtcttgtcccagctcccactgacaagaagattcatctgtggcacccaagcgagttctttaataggtgcctcatggcctgagaaaaccgtgggctgggcacctgagagcaggggccacattttaacctgcttatcacagcctcctgagaaaacagtcaacccatcatccttccaagccgagcacagcaccggttgatcgtgcgaaatggaggccttcgcttggcaggccccaccagccatgacctcccagcaccgaacctggttgtcccatgaggtggcaacgaggtggttcgccttggggctgaagctgaggctggacaccgagtccccaggcgccggagtcacctcgaaggatttgttgggattatggttggcggcgctggcgccggcgggattgaagctcgccattgcagtgggcgggtggggtggcgttcgacgaatttgggagcggagaggggagacggggaggggaggtcgcggggaggggaggcgaggtcgcggggattttc

SEQ ID NO: 102359 - DNA, 196 bp, Zea mays
  Clone ID: MRT4577_24858C.1
taataaaaacgtgctcaagagcttgttcaaggcctggctgcatcatcagaggcagcctcaaaccttttatgcgtttcgctgctgcaactgcttcttatctacgtttacttttttgtatatatataggctagcagtgcgatgaacttttgtctattcaactatgaatttataaggcccaaattaataaataaatatt

SEQ ID NO: 102360 - DNA, 294 bp, Zea mays
  Clone ID: MRT4577_24859C.1
agcggccgctcatccttagaaatgcttaagatgagaaccactaacaccaccattggataccttcatattgcttattatcaattgaaggtatccaatggtggtgttagtggttctcatccttaaatatgcttaagatccttagctgaaagcacttgtatcatgcaagattataacttcttgatgcactaatcaattctactctcctctgtatcagtatcatgtttctcatgggaaacatgtgctagtttggaatatataactatatggttgtaagagctgattcttccttgcttt

SEQ ID NO: 102361 - DNA, 401 bp, Zea mays
  Clone ID: MRT4577_2485C.1
tgggaccctcgaggccggccgggccggggttcttatccccaccccacctcgtgcctcccctcctccccccttcccctctctcgaccctcctccctccgtctcgtgtcgcagggcatggcagaagctggagcaccgggactaatagcaagcgggagataaacaggaagagctaggtgaatacttgcagaaaaaggcccccacaccccccacgcaggtgaatactacaagtacttatacttggaagagagtctgtctgcccgtgactgcgagtgaattgctaggtgtgtggtggctagttgaggtcacgatgatgggaggcgcgctgatgatggatcagagcgtgttgttccctggcgtatttttttcttggatctcctgcagaagaagggggagaagaaact

SEQ ID NO: 102362 - DNA, 708 bp, Zea mays
  unsure (1)..(708): unsure at all n locations
  Clone ID: MRT4577_24860C.1
gatcagtgagcaagccggccggcccagtacactacaggtgcggagacaagcaatagcttgctgatcgagcaggaacgatggagcactctttatattattactgccgcagctggttgcttgtatgctcctcggttctcgcgctgtgcctcggtagccggggccagctgacaccgggtttctaccgcagcacttgccctcagctgtactacaccgtgcagcgccacgtgttcgacgccatgcgagctgagacgaggatgggcgcctccctcctcaggctgcacttccacgactgcttcgtcaatgggtgtgacgcttccatcctcttggacggcgacgacggcgagaagttcgcactgcccaaccggaactcggtcagagggttcgaggtcatcgacgccataaaggcggatctcgagagcgtctgcccggaggtggtgtcgtgcgctgacatcgtagcccttgccgccagctatggagtcctctttagtggagggccttactacgatgtgcttctggggagaagggacgggctggtggccaaccagtcaggagccaacagtggtctgccttcgccgttcgagcccatcgactccatcattcacaggttcgccgccgtcgacctcaacacgccgaacgtcgtggtcttgtcaggagcccacacgatcgggcgagcccggtgcgcgctgttcagcaaccgnctgtccactt

SEQ ID NO: 102363 - DNA, 218 bp, Zea mays
  Clone ID: MRT4577_24861C.1
ctactcgttcttgtactgcacctaccccagggacagggagatggcgcgggctgaggcggcgcgaaatagaggggattatggcgatgaaggatttggatccgaggacgaagacaatggcgagaggaagctgctgccgcagtgagtccctatggtcactggtcaggttcgaagagaccggcgtccgttggggagaagaatagacgtgagacgtttcatct

SEQ ID NO: 102364 - DNA, 411 bp, Zea mays
  unsure (1)..(411): unsure at all n locations
  Clone ID: MRT4577_24862C.1
gatgcacgccacgtaagctcggaattcggctcgagagagcacaacatcagtttcacttgatcaaactcaaagcttcagattctccatttccaccttgagtttgaggaggggtgttaaggcccattagacccggctcactatatatatatatatatatatatatatatatacattcngacggactggctgactcatgtctatacatttttcgacagccagcatacttcagactggctggcccgctgcagaactcaccaaagagaggggaagaaaggatttcttttcttgatttactcaaaaatatacatactcatttatggaagaaagtttttttctgtttctttctgtctgtacgtgcgtatgtttgtctgttcattaaactatcttaatgggagggagctgtatctattc

SEQ ID NO: 102365 - DNA, 243 bp, Zea mays
  Clone ID: MRT4577_24863C.1
gctgagagctagactgagcacgcacgtaacgtaacaagctcttctcccatctccgtctctggcaagagagagagagagcgcagaagatgatgtggtcgcacgagccggcagcggagcagaaggcggcggcctcggcgccgcctacccggcagcggagctccgtggccaagctgacgacggcctcctcgtccttggccaacctcctctccgccttcgtcagcgcgaacaactcctccccagacc

SEQ ID NO: 102366 - DNA, 236 bp, Zea mays
  Clone ID: MRT4577_24864C.1
tacagacacttgtgctaaacccgcacgagacgacaccatgtcgaggagctcgagggcacaagtcatggccggcgtgaactccagcgtcttcgggctcaagccagccgcggcactgcggcaggcttcgtctgctcaacgcccgggaaaccttttcaacttggctggccccatgggcggctacgctccactgctcggcttaacggccttcttcgccttaacggcaactacaggttcgg

SEQ ID NO: 102367 - DNA, 422 bp, Zea mays
  unsure (1)..(422): unsure at all n locations
  Clone ID: MRT4577_24865C.1
ggccgcttttttttttttttttttgtgggggagggggggtggtcntgngttgtacagccatgagagcagagtggaaaacaagaacaaacaatgagaagaacacacagcacaggatactctgaagagccacaggcacttaacaggagagaagatcttcatgcgcaagaacgaaagagagacatgaggtaagcgagggtgaggggaggagaacgaaactcgactggtcacacattgcggagagcgccgacacatctaagaagcgggatgcttggtagaagaaccgacctgatattggccggtgctggaacctcctcatagaggctgcgccgttggcgaggcttgaatgcgagtgacctttgttgtaaaggaggggagagcggcgtcgggccccgaggggggaccaggtccttgaagcatgacgt

SEQ ID NO: 102368 - DNA, 302 bp, Zea mays
  unsure (1)..(302): unsure at all n locations
  Clone ID: MRT4577_24866C.1
nnnnnnntttttttttttttttttttttttttttggtgtgggtttttttcaattgggatgggatttttacacaagccaaaaaaaaataagattgggaacttaaccaccccaccatacaataagaaaccacccaccccagggggggcacaaaaaagtttaagcccaacatagggctcccaagatcaaaaagaccaacacggcggagctcttcgtaaaaaacttaacgggtgatacatgcaaacctttgtacaaaacaattaaaaataccggaaagaaaaataaaagccggcctttaccacaag

SEQ ID NO: 102369 - DNA, 444 bp, Zea mays
  Clone ID: MRT4577_24867C.1
ttggaccctcaggccgccggggttcccacccattagtaaaccccccggagacgcatgagcgtgacatacacagaggagagcccgctaggaggcgtctctgatgtccaagtggtagaaaaagcgcatgagcgggctgataaagatccgccgaagatgagacagaaatccagcttggctggtggagattgtggatggtggtgtcggcatagttgtgttacgtttcttagaagcgtgagttcatggagaagatgtcacatcctagttcgtagtcaccgtttgacatgggtacaatggctcgtcttggaaacctgcactttagtaggccatcatatggtggtttctagctatatccagagttttgtgctaagacaaatcattcatgtcgttatgagaagctattatgatggagctttatttgctgctaatatcgacctacctattaag

SEQ ID NO: 102370 - DNA, 432 bp, Zea mays
  Clone ID: MRT4577_24868C.1
ttatctttttttttttttttttctttttttttgttttttttgttgttttttttccatttctggttctgagaaaggcccacatggggcaacatattaagacaggggtaaattttacttacaaagaaggaccaacgaagggggccctttttaatccaaattaccatcgggaacaccttagttttttaagatgtgcggtgagggccccttttatttaggaaatacctcaattgcggattcaatggtgtcaccggccacgtgcctgtaaagtttccatggaacgagtctctttgatgcacaaactaccatgtcgttgacgcactcctccattataaacgggagagttggataggcctataccgtgcatggcacatacagggcattaatcaagattcaatacacttataggaaaacaccagttggggactatttggc

SEQ ID NO: 102371 - DNA, 336 bp, Zea mays
  Clone ID: MRT4577_24869C.1
acgatttattattcgaatccacaaaggacgactgagaaaagagaaggaaccaagaagatcatgaacatacagcatccgggttacagttttgacacaacgctgtcgaacaaggtttataagcctgaggcttgctgcgcatggaacacgagataaatggcacagatcgctataagggagacgatttgatgtctgggtattttatgtggtaaatcaaggctgtgctatcacaccccttcacaaatgtgagccagagctgtttttgccttgcacttttagtttgggacttcagaaggaaaccttgacatcgagcaacaccatgatcttggacaccaactg

SEQ ID NO: 102372 - DNA, 400 bp, Zea mays
  Clone ID: MRT4577_2486C.1
ttcgtttgaagcttaccaaaccaggtttttcttttttcgtccccattatcatttagaagtattgcttatgtttactaggggggcgtcaaccattcccttttcgtaagcataacctattcgctggactttttcttatctcttttgaagaaggactcctacctgctttactatgccagttattccaccatatttgttaggtgtataactagttatcacttcggatcactttatcttattatatctgtctcctaccatgattttttcaattaatatgtttatcttccactgttatttctttttgtaggtttgggttatatctatttctctattttttttatttatcttatacttgagtcttttttattaattaatggattttctaactacatcttatattatt

SEQ ID NO: 102373 - DNA, 397 bp, Zea mays
  Clone ID: MRT4577_24870C.1
aatccacctcaatacatcttaatacacccaaaatgccgcgccaattcttcgtcggaggcaacttcaagatgaatggagtcactgactctatcaagtccatcgtctctaacatcaacaactccaagcgtgacccgtccaccgaagtcgtcatcgcccctcccgccatctatctcgcgctcacccgcgaacttgccgacccctcagtcggtgtctcggcccagaacgtctatgacaagcctagcggtgcttataccggtgaattgagcgcggagcagctcaaggatgccaagattgattggactatcgtgggacacagtgagcgtcatgttttgttgcgggaggacgacgatttcgttgcgcgcaagaccaaggctgccattgatggccggttgagtgt

SEQ ID NO: 102374 - DNA, 307 bp, Zea mays
  unsure (1)..(307): unsure at all n locations
  Clone ID: MRT4577_24871C.1
tgagggggtctccnnntgatcgggcgggggaaagggtgcctcttctggtgcttagctcangctttgccccctggcnttgcaggcgcattctacgcattgctcatgtccatcgccgccattggctcgttnactggctcatgggttggtggnttgctccttctttgtgggggggggggggaacagaatttaagaacctctgggccgcngtcttgatgcggggtgtgatgaggctgctaccactggcgctgctgtccttggcgcccgaagggatccgaattccactctggtcccttccgttttgctgcct

SEQ ID NO: 102375 - DNA, 271 bp, Zea mays
  Clone ID: MRT4577_24872C.1
cagctgtactgtgtgaacgagataaagacaataatacgaacccctactctggctgcacggtcgcttatggcagttccacacagcagttggcggccaatggggggtccctgagacttgcatgtaaaactagtctagatgtcttctttttttgtcagttttatttttgtaattgtgcatgtaaagcatcattgaatcactggatctgttgaagaactcagctgctggaaaccatgcaaaatgttttgaattgcccttaaaatatgggaaatgt

SEQ ID NO: 102376 - DNA, 242 bp, Zea mays
  Clone ID: MRT4577_24873C.1
ttttttttttttttttttttttttttttttttttttttttttttttttttttttttttgcaccaaacaaaaaaaagggtaaaatggcgaagcagtggaataaaaccatccgacaccttttggggagggatacacactggaaaaaaccgcactctaaaacaaacggactggagggttccaaaaaaaaaccgaaaaacccctaaagcaaggaaaaaccaccctacgaaggaagttccacctggg

SEQ ID NO: 102377 - DNA, 234 bp, Zea mays
  Clone ID: MRT4577_24874C.1
ataccaaagaaatgcactttcttatcttctagggaagccacaaacgtcagacaaaaaactttattcatcgaactataactcataagaaatgctaaaagagggcaccaccaacagttgggttgtaggttgaacacctgctagtttgtcaaagcaagttggttgaatgtgaccaattgttgcatttgtaagagagataccaatgttaggcccaccgcgctggcagaacggaaacaa

SEQ ID NO: 102378 - DNA, 264 bp, Zea mays
  unsure (1)..(264): unsure at all n locations
  Clone ID: MRT4577_24875C.1
aaacaaccacaaggggagagctggccatttttgataatttcaaatgaacacaaaccatggtttatggcacaatttaaaggatcgtgccaaaatattaacttaagttttatttttagggacagggactccgcgttttgcacgttgtttactttaataagcttttttaacgaagcaaagttcttaatttttgtcacaacgcagggctgttaatttaactgtttaagtcattattntcagtttttttttcaacggatgcaaaaggat

SEQ ID NO: 102379 - DNA, 294 bp, Zea mays
  Clone ID: MRT4577_24876C.1
gcgggtgcaccaaaaggaatggcagcgctaggctccctgcgacttctccaggcccgggccggcgctgcggccaagtgcgcagccgtgggtggccggacatccgcgcggcgagcgccacggccactgttcgccgtgcgcgcctcggctgctgacgccgccaacagggatgccgtgctcaaggccttccgcgagaacagggctctcaagataattcccggtcttcagaactttgacaggatcagtgttgcatctgttgccacagctgcagataagggaggtgcaacacatgtagac

SEQ ID NO: 102380 - DNA, 301 bp, Zea mays
  Clone ID: MRT4577_24877C.1
tggtttttttttggtcggaggggcaagtgtacaggatgctccatatgggctgtaggaatactatgtgtacagattggatataaatgcacggtgtcagtgctaggtcttggtgagagttggacctattacatcaaattcctattttttagcatgagtactaaagccaggacatgtttgtggaggtaaaaatacaaatggggcctatgggggtcgaccaattggtgacttaatccacagtggatatagagtcacaatttgttcactgaatggcgcgtctcattctatttggaactcccagagt

SEQ ID NO: 102381 - DNA, 1113 bp, Zea mays
  Clone ID: MRT4577_24878C.1
ccgcaaattttttttttttttttttgcggttagttccataaaattaatcatgcaagagtactgagttgctcttaaccatgagcacgactgatataccagttttagactctatagaggttgtgccctttatccacaagtcgtgttacccatttgccaagggatcgcgacttcccattcatctctaccgaggagacaaggcagggtagcactacgaggcctttacaaagttccactagtttcagaaaacccgctacggttttgagaagggcaatatacgagtccctcgtccgaaaatccatcgcagcatgatcgacctgagaacctccctataccgcagctcctctaccgcccttgccactttcgggtaaggtagtcctccactagctttcctaattagtcagccaacggcgtcccattccaccccttgtggtggcacgtgtttctcaagttaagctccttgttccaattaaaaatataatgatcttgacatgaacataaataaaataacagaataactggaacatggacataatgtgatattaatcccaaaaccatataaagcaatagcaaaaactacccaaataattcagggataaacaaggtaacaagataagcagactagggtgacctattgggtcccataaaaattaaacctatgcatgaataaatgattataaagaatattattgggtaaaaagtgatcaagggcacaacttgtctgtgacttgagatttcaggtaccaggatgatcttcaggtgactcgtgacctcgcgcgaaaatttatgcacagagccaccaggtccccggtgaagcgagggtcagccgcatccatgaatccgcggtggagaatcccagtctccatggttgtccatcgctccctcaacagccacaaagatgctccttgaactccaggggttgaccctggccatccgccgacggtggggtggcgctgcaagcatgagtcgaccgcggcaggttgtgtttccgcggtgctcacaattatcggcgagcaattgaccctaggaccgaccgcaactccacacgatgagggtgccaacggttgcgtgactccggtgaaggacgcaccccggccggcctcgaggtacccaatg

SEQ ID NO: 102382 - DNA, 451 bp, Zea mays
  unsure (1)..(451): unsure at all n locations
  Clone ID: MRT4577_24879C.1
aaaaaaaaaccaaaacagcaggaccnccggcncggagaaagaaaaaaggcagagcagcgggcagcggnaaggacaccagccccgagagcccagcgacgaggcacggccacgcgcnncgagacgaggggggcaacagagccaccgacaccaggngcagccacgcccgccacaccgacgccgacgacgggaggcgacnccccagcaacgagggggcgggagggcgatctttttattngatggactccgctaataaggacgcctccctgaccggaagatgctgcaaccccgcggaggacaagagctccgacgactgccagaactgcaaggcgacgccgcccggcgaaagataggagtgcggcgactataacttaaacctgaccgagcccccggactgaacaccgaggccgggggaccgntgaaacagagtgaaactgcacaaggagacacaaca

SEQ ID NO: 102383 - DNA, 1237 bp, Zea mays
  Clone ID: MRT4577_2487C.1
cttcgagacaagacgctagtcgaacacgaggataagctcctgcagccagtggttggttggttggtttcctcgcccgtgccgtgcgcagctgaagccgatggaatgaggctcgccgcagccaagcctgccgccatcaccgtcgcccagcggcagccgatccccatccccacatgcagctccagccggaatcaggccaagaagagccgccgtagcgcatggagggtcgcagtggcaagccgcgacgccgccgacggcgacgcagaggcgggcgcgggccagggccagggccaggcaccgacgggacggcgggcccggctgtcggcgaggcggcggcagcgcgtgccgctgccggacggcgtctccggcgccggcgtcggcgagttcctgcgccacccggacgccgtcgagtccatcctcaacaccggcgcgctcgagagcttcgcgcccgcggggcccggcaccttcacctgcgcgctgcgccgcgtcgggctcctcggcttcgaggtcgccccggtgctggacctccgcgtcgccccgaccagcaccgactgcaccatcgagatgctgtcgtgcaggttcgagggatcagaggtgcttgagcagcagaatgaactcttctcagcattcatgagtaaccatataacgtggagcgacgacgccgaggagccctgcctagacatccatgtcaaactggaggtcactctggaggtctacaccaagccattcagcatgcttccgttgtcagcagtggagaagccaggtaacctgttgatgcaaggcctgctggacaggctcgttcccgtgctgggagagcagttgctgagggactaccattcctgggctcaggctcagcagcagcatgaatcgtcttgatgagattggaggtcaagggaaggaggagagattggtcgctcatgtatctacgccactacaagtatccaaggatttagcgaatccagatatacaaggactcgtaaatcaagacgcttgtttttttttggggtgcaccaactggccatcgtcagtctgtgcttttgtcctgtgtccaatactccatcagtaaacaaaaattctactgtttttacttcgtcaataccgcatcctgtagataaaagctctgttgtttcttcatcagcaagtgaaaaggtacagaggaacaggaataaaaatgattgaagttacagcagcgacctgcgggttgccttcaagaatcccacttctgcaaatttgttgactg

SEQ ID NO: 102384 - DNA, 509 bp, Zea mays
  Clone ID: MRT4577_24880C.1
ttttttttttttttatatccgaaaaaaaggaaaaaggaaatttgcattacacgtccatgatgcactatgtcatttacaatcacaagtaaaaacaaagaaattaaacatgcatgtacatcaagcaaataaaggcttcttgttgacgtagaaattcaacaagcaaataaaaacaaagaaattcaaaccacggatgttgccatcttgcattgccagcgatcttgttgccgatccctggaggcctggactgcaacgtaggaaggaaacctggacttgcctttgccgatccttggactgcaacgtaggaagcaaataaagggtggttgccgatccctggactcgccagcgatcttgttgcaatgtatattattcatcgggtgttgccagcgatcttgttcccgatgcctgggctgtgtccgggagccgtgggccgcccgtcggtggtcgccatcttgctggtcgtcgtcgccgtgagaccttgcaccggaggactgcaaccaccggcgcatgct

SEQ ID NO: 102385 - DNA, 2241 bp, Zea mays
  Clone ID: MRT4577_24881C.1
aggccggccgggccagaccagcaagcaagcaacacagacccaaccaaaacccctccatcttgacttcttcccaaccgactcccagttccactctcgcttccttccctccctccctcccacgcaaatggtggccgctcgcctccgcctcgcgctgctactctccgtctgcctctgctccgcgtgggcgcgcccacgcctcgagccggccatccgcctgccgtcgcagcgcgccgcggcggccgacgaaacggacgacggcgccgtcgggacccgctgggctgtgctcatcgcaggctccagcggctactacaactaccgccaccaggcggacatctgccatgcataccagatcatgaagaagggcggactcaaggatgagaacatcattgtcttcatgtacgatgacatcgcgcatagcccggagaatccgaggcctggtgtcatcatcaaccatccccagggtggcgacgtctatgctggggtgccaaaggattacactgggcgagatgtcaacgtcgacaatttcttcgctgttctgcttggcaacaaaactgctctcaggggtgggagcggcaaggttgtggacagtggccccgatgatcatatctttgttttctacagtgaccatgggggtcctggtgtccttggaatgcctacgtatccatatctctatggtgatgacctcgtagatgtcctgaagaagaagcatgctgccgggacctacaaaagcctggtcttttaccttgaagcatgcgaatctgggagcatctttgagggcctcctgccgaatgacatcaatgtgtatgcgaccaccgcgtcaaatgcagaggagagcagctgggggacatactgccctggcgagttcccgagccctccaccggagtatgacacttgcttgggtgacctgtacagtgttgcttggatggaagacagtgatttccacaatctgcgaactgaatctctcaagcagcagtacaagttggtcaaggataggacagcggttcatgacacgttcagctatggttcccatgtgatgcaatatggcgcactggagttgaatgttcagcgtttgttttcgtacattggcacagaccctgctaacgatggcaacacgtttatagaagataactcactgccatcgttctcaaaagccgttaatcagcgcgacgctgaccttgtctacttctggcagaagtaccgcaaattggctgatagctcgcctgcgaaaagcgaggctcggaaggaactgcttgaagtgatggcccacaggtctcatgttgacagcagcgttgagctcattggaagccttctctttggctccgaggacggtccaagggttctgaaagccgtccgtgcacctggtgaacctctggttgatgattggagctgcctcaagtccatagttcgcacttttgaggcgcgatgcgggtccttggcgcagtatgggatgaagcacatgcgatccttcgcgaacatgtgcaacgctggcatccttcctgaagcagtgtcgaaggtggccgctcaggcctgcagcagcattccgtccaacccctggagctctatccacaagggttttagcgcttaagaaccataggcgaggcgaactccctgacgctgcagctctcagggaggtcttagttcttgaacgaccataggtgaagcagacttatgtataccctgccacattgcgtacctatggccagtttccggtgtacatatatagtcggaaatttattcggcaattgtattggtcgttggtgtatatattccctatagtttgttagcagatgtgtttgtttgtaatcccgtaataaatgaagaatgcatgatgttcatgcggaactttacctgattcttgttgggcaatggatgaatggactatcggatccaaaaaaaaaaaaaaaaaaaaaaaaaaaaaaaaaaaaaaaaaaaaaaaaaaaaaaaaaaaaaaaaaaaaaaaaaaaaaaaaaaaaaaaaaaaaaaaaaaagggggggccccccaataagaaagttggtcaccccgaaaataaattcggaacgggaccttgaggggtaccaatttttccttaaagggagtcaaataaaagttgggaaaaaaaagggaaaaagttgttccctgggaaaaattgttttccgttaaaatttccccaaaaaaaacaacccgaagctaaaaggggaaaacccgggggggccaaatgggggaccaacccaaaataattggggtgggcctaactgcccgtt

SEQ ID NO: 102386 - DNA, 810 bp, Zea mays
  Clone ID: MRT4577_24882C.1
ccggtcgacccagcgtccggtttcaattgggctcatgagcaaaaagttgtgactatatttagtgcacctaattattgctaccgctgtgggaacatggcatcaatcctagaagtggatgattgcagggagcatactttcatccagtttgagccagccccaagaaggggagagccagatgtaactcgtaggacacctgactatttcctgtgatgcaaaagtgatgtggatctgcagcaaaggtttgatagataggtgcagtttcctggttgcagataattttttttgctggaatccctccgtgtgctattcttattatttttgcccatggcgctttggctgtcgcgggctgctttgccgcatcatgattcaagtgtatacctactacagctggaaggactggattgtgttctcacttatctctaactggttgatgcttttggcttggtgggggctgcagtggtggggtttcaagcatcaagcagcaatctgtattatgggaggaaacttttcccgttgtattcattttgttcccctttcttcctcacctgattttcttctctttcttcttttttccttttttgtgattcttgtagaggtgaacactttgtatggttctatgttgggccattagttttttttaactctctttctctgactgccccgatttgccgtatagaattacatttctaaaaaaaaaaaaaaaaaaaaaaaaaaaaaaaaaaaaaaaaaaaaaaaaaaaaaaaaaaaaaaaaaaaaaaaaaaaaaaaaaaaaaaaaaaaaaaaaaaaaaaaaggggcgggccgttttaaa

SEQ ID NO: 102387 - DNA, 126 bp, Zea mays
  Clone ID: MRT4577_24883C.1
gggagaagagtatttgtttgcgaattacaagggtatagctttacctcatcaaaaaaggtaattcttccttaaaggcgataaaccaaattaaaacgtcactgcaaatccttattttggggtgtgggg

SEQ ID NO: 102388 - DNA, 2209 bp, Zea mays
  Clone ID: MRT4577_24884C.1
gctacgagtctacgaccagttcggcagcacggcgagcatcccgtccgaccatccgctcgctcctcagagctagcctccaaactcgcaactatataactaccgtcccttgcaacttgccaggccttttgcccccctgcttcctccgcctgcaccctctcacgagcgcccgctcgcccagatctagggttccatccgcgggcaagatgagcagcccccatggcggcctcgacgaccagatcgagcggctcatgcagtgcaagccgctcgctgagcccgaggtaagggctctgtgtgagaaggcaaaggagattctgatggaggaaagcaatgttcagcctgtaaagagtcctgttactatatgcggtgatattcatggacaatttcatgatcttgctgaactcttccgaattggtggaaagtgtccagatacgaactacctgtttatgggagattatgttgaccgtggttactactctgtcgaaactgtcacacttttggtgtctttaaaagttcgatatcctcagaggatcaccattctcagaggaaaccatgaaagccgacagattactcaagtttatgggttctatgacgaatgcttaaggaagtatggaaacgcaaatgtctggaaaacatttacagatctatttgattacttccccttgactgcattggtcgagtcagaaatattttgtttgcatggtggattatcgccatccattgagaccctcgacaacatccgcaacttcgaccgtgtccaagaagttcctcatgaaggtccaatgtgtgatcttctgtggtctgatccagatgatcgatgtggttggggtatttctccacgtggtgctgggtatacctttggacaggatatatcagagcagttcaaccataccaatagcctaaggcttattgctagagctcaccaattggttatggagggtttcaattgggctcatgagcaaaaggtcgtgactatatttagtgcacctaattattgctaccgctgtgggaacatggcatcaatcctagaagtggatgattgcagggaacatactttcatccagttcgagccagccccgagaaggggagagccagatgtaacccgtaggacacctgactattttctgtgatgcaaaagtgacgtggatctgcagcaaaggtttgatagataggcgcagtttcctggttgcagagatatataaatatatatctactatatatattggctggagttcctccgcgtgctattcttatattatttctcgcccatggcgctcttggctgtcgccggctgctttgctgcatcgtggttcaagtgtataccctactacagctggaaggactggatcgtgctcttacggtcttacctgtctctaactggttgattggcttagggtgggctgcggtggtgtgtgtgtgggttcaagcatcaggcagccatctgtattatgggaggaagtgttcccgttgtattcattttgttcccctttcttcctcatctgattttcttctctttttttatttgttccttctctgtgattcttgtagagttcagcacttgtatggttctatgttgggccattagtttttttttaactctctttctctgactgccccgatttgccgtatagaattacatttctaagcgcaactagccaacctgtagcattttctgtcaccagcatttgaagttttgaactgagccctggtcgtgtccctgaggtttgatgtgctcttggtgtactactcgtatttgctaattagaaaaggaccttttgtgggtttgctagcgtttggtaataacgcccacgctagaatgttttgacttggacggcatggaattcatggttgcttctctggtgttcatcccgcccgtcgtgatcggttgaccgcccgagcaggatccggcctctccaaggccgtggcttcctggctggtgccgcctcgcccacagatcgtgcagtgccatgccatgtggtctgggggcaggtttgggattcgttgggcgctcgctattccctcgtttcgctgtcgcaaccagctaatgctgtgggttgaagctgagatttcagtggtttagggccaacataaacaattgggcctcctttatacatataatattttatagtatacatttatataatgttataatatattgataaaaaatagtgtgatatcaaaatattatatcaaataaattttacaatccctt

SEQ ID NO: 102389 - DNA, 749 bp, Zea mays
  Clone ID: MRT4577_24885C.1
gggaatcctgttctccttcctccgctcgctcgcaccagcgccggacctcgccgtgttgtgcttcccgcgccaagccactgtcggtcgattccttgcccgaagtggagcatgccaagacccccttccttttctctgcaattgccctcgatcctttcctccacccgatgcgaatttctttccccattcacgagcgctgtctatggtaggtggctggatcttcaatcatcggagatatccgttgttctagagtcgattcgccccagctttgtccctataagaaccacccaatcccccatcgtcgatcacacgcattgacaccctctcccgtgctctcctgccctctgctcatgctcaccatcgccgccgcaccgccattgctcgtggccaagtgcctttgaagcttctctacccacgctaaggctactgtggtggagcccaaagattgttgctgcttctccgcatcttccccgactcggtccagccctacagcatcgcttcgacctcactggagccccaccggccgtcgttcctcattgtccgccgtccccaccgcctcagccccccttgttggctaggagtccacaccgccaccgctccttgggagtccacaccgccgttccggaagcccggaggcctggccacgaaggtcctcggggggtccgtgccccaggggctgggcgcccccgttctcgcggtgtcccaggcccgggggtttgggcgcctccggctttcctcattttcccgcgggg

SEQ ID NO: 102390 - DNA, 383 bp, Zea mays
  Clone ID: MRT4577_24886C.1
tcccatcccacactgctcagcagtcattcaacactcggcaaccacatgcctccgctcagcccactggtctaatgcaactctcagatctccaggaaacttctgcagacgacccggttagggccgctcacatggccgacgctgaggacatgcgctaggtcgaaagggcgtcccgatacatccgtgacgtcatcaccagcatgggatacgttacgatcatgctcagctgcatatggaatagaacgttgcacttatgaccttgactttatgccctggtggagcaataggtacaactagatatggttacaagtacactcagcgtgcataagctagttaatggcttgcaatcaatgtccatgaacccatcattgatgttaccctgtatg

SEQ ID NO: 102391 - DNA, 147 bp, Zea mays
  Clone ID: MRT4577_24887C.1
tctttgttgcatcggcagcaagaaaccttgggacagcgtagcatagatcgcggcggtgatgtcttccaaggtgaggacggatctggacgtgggcgccgacggcgtgtccgttatcaccatctacaattcgcccgtcatcttcctctc

SEQ ID NO: 102392 - DNA, 110 bp, Zea mays
  Clone ID: MRT4577_24888C.1
cattcatggccagcgcccttttgtgcaaaccagagaccttaccgggcgccataaaagatgagactctgtcgatacacctcgagctccaaaccctacacatatcctgaaaa

SEQ ID NO: 102393 - DNA, 810 bp, Zea mays
  unsure (1)..(810): unsure at all n locations
  Clone ID: MRT4577_24889C.1
cgggctacnngccggctcggagacacacacacacagacacacagagggaccgtccccttcccgtcgcgcgtcgcctctcgcctgctagtgcctgcccaccccgcctccatcgatcgatcgatcggcgttacgcacgcgtcgtcaagcaggcagtacatgagtttctagtgccctccctcctctctctagtcatatttctgcgcaatgtcgaatgcaaaagcggtgcttgaacctgcatttcaaggagctggccataaaccaggaacagagatatggaggatcgaggatttcaagccagtccctctgccaaaatcagattacggcaaattctactgtggggattcatacatagttctgcagacgacgtgcaaaggaggtgcttatcttttcgatatccacttctggatcgggaaggattctagccaggatgaagctggaaccgccgcgatcaagacggttgaactcgacagcatgcttggaggtcgcgcggtgcagcacagggaaccacagtgctacgagtccgacaaattcctctcgtatttcaagccatgcatcatacccatggnagggtgggttttgcctctggctttaagaagccagaagtggacaagttcgaaacgcggctgcatatttgcaaagggaagagagctatcagagttaaagaggttccctttgctcgctcgtcgttgaaccaggacgatgtctttatcttggacactgaaaaatagatatatcaattcaacggcaccaactcccacattccaggaaagacccaaagcgttgggaagttgatccaacattttgagggag

SEQ ID NO: 102394 - DNA, 659 bp, Zea mays
  Clone ID: MRT4577_2488C.1
gagaagatggagaggagcgggaacaggactagggtatatcattggtgactccgagcgtgtgccaccgccgcgggcgtggagggcgcaacaccggtggctctacgtgttgcactgtcgcccatggcgttcgttgcttcgccaccactcgccgttcgtacacccctgtcggtggttaaggcgaaggcggaggcctggacgtgagccacgaaggagtgcgccacgttcgtgctttgaggccttgccaaggaccacaccgacccacttcgccccggcgtcgatgccgccgagtctgccgtgaagaccgtcgttggccccgtctgcggcctgccctcgacatcctcgccttcgttgaccacaaggaggcgctcgcgttggcgttgctcatcgatgatgtgaagaagtttggcgactgccagttcgacctctggaagcagtattacgtggccacatgcgtcactgtgttcgacaagctccggcgcagccatcgcttggacgcggtccagagcggctgcaccgcgctgtacatcttcaaataggggggacctcatggtcgtcgccaacgtcggcgactatcgggttgttatgggtaccacatccgacaacggtgccgtcataccgtctggctcatcatccacctgaagctcacctcccacaggagt

SEQ ID NO: 102395 - DNA, 619 bp, Zea mays
  Clone ID: MRT4577_24890C.1
ccgccacaaagcccaagcccaccgcgaagccgaaagccgtagtgaagccgaagacacccgccaagcccaaggccaagccagctgccaaggcgaagcccaagaccgccggcgctaagccaaagccacttgctaagaaggccggccgccccgccaaggcggcgaagacgtcggccaaggacacgccagggaagaaggcgccggtggccaagaagtccgctgctgccgcgaagaaggcccctgccaagaaggtcgctccctcgaagaaggcggcgaccccggcgcggaaagcgccgtcccgtaaggccaagaagtagagcggccaagaagggggtgcaatgttgtaaatttgatatcagaggggctcgggtacactggtcattcagtatctctgcaccttcctcgtacctctgctgtacgtcctatgttttctttcagagataatagtcttcctacatggttttatgagctcaaaaaaaaaaaaaaaaaaggggccccaaaaaaaaaaaaaaaagcggccgtgttattattaaaaaccgaagttgtatttctgtagctgaattgtggagttgcggatatcattgtgcttctaaggttaatgtgccgataaagttaatgtcgg

SEQ ID NO: 102396 - DNA, 610 bp, Zea mays
  unsure (1)..(610): unsure at all n locations
  Clone ID: MRT4577_24891C.1
ggcgcgcctcttcaagaggcggagggcgggagccccgtgagcgtggtggactacgcggtgcccagcatcatgggcggggagctcgggaaggtgctggacccgcgcgcgccggagcccgcggcgcacgaggccgaggcggtggagctggtggcgtacaccgccgtgcactgcgtccagctggagggcaaggaccgccccgccatggccgacatcgtggccaacctggagacggccttcgcgctctgcgagggaagcgaccgcgaccgcgggaccggcgcgttcgggaacagctcctccagcgccagcctctccgtcacgtccatggaccggtcgggagccctggcctgagctgagcctgacggacggacggatggatgagtccattcttttccggttttcgttcatgcatcaaccgccgcccatggcgaagggagggtggtcgaattcattgccgttcattcttcattcctcgttgcgaggtgtgtgattctgtcacacgttttgttcaaaanaaaaaaaaanaaaaaaaaaannaanaanaaaaaaaaaaaaaaaaaaaaaaaaaaaaaaaaaaaaaaaaacccanaaaaaaaaaaaaaaggggcggccg

SEQ ID NO: 102397 - DNA, 416 bp, Zea mays
  Clone ID: MRT4577_24892C.1
attcggctcgaggggagcttgcttgctagcttttcaaaacgggtggggcagcatgatggacccggaagtcgaatggattcccttgaagacaacgttagctgcaaacaaaataaccccatgcaccactgcgcggctccagttgtacgagcgctcaggactaacgggggtcagtttcaatacctacgaacataggcggcttctgtgattctttgagatcatctctggctgtgtgagcacatccgaggcgtcgacctcagattcagagaaacacttgccaaccagcggcgatcagacggtgattgcataagcatcacttcacgtgggggggccataccttgacgtcatcgcctcacatgtacccgcggtgggcatgggacaagctctactagtcgggggaaaacttttcgtcttcaata

SEQ ID NO: 102398 - DNA, 290 bp, Zea mays
  Clone ID: MRT4577_24893C.1
ctgccttctgcctcgcttgccagatctcttctctctgatggggggttcggtggtggaggacaaccacgacctcgaccacgacctcgacctcgacgatactcccttagcatctgcctcttctaaatcccaccagcaattccatagcttcgatttcaggatacaagtgttctagatttgcggcgctacatccatctttaacataacacgtatgagcaggagtatttattttgtcttaattaaagccaagatcaacctcttgcttccctttcgcccattcgccattctcctac

SEQ ID NO: 102399 - DNA, 271 bp, Zea mays
  Clone ID: MRT4577_24894C.1
cacaatccaaatttcgcctttttatcgcagatggaactgcgactgtttgggctaatacggtggatgggggtcatgatgctggcaaaacccggcatgagtatagtgtttggttttattgacaagtccattcctaaacaaaaaaaccctacatctatgattttgattgccaaaaacatttgtctttgtctaaaggtttaacaagtgctccctttgaaatgccgattaaattttcagttgggaattattgtgtgtatgattaaacctatactgg

SEQ ID NO: 102400 - DNA, 670 bp, Zea mays
  Clone ID: MRT4577_24895C.1
tcccctttcccccctcctccctccccactcgccaaaaatcctcgatccaaatccccactccggcgacgcgacgcggccatgcgcagctgccgataggcgacgactgcagcgaccacgcgtgagcggccatggacgagggctacgccagcctccccaccagccacctcctcggctccgtccccgctgtggctgtggctcccgatgagaggaagcccggtgctcccgccgaagttggaaatgccgctgccacctcgcgcctgcagcagtttccgcctgctcctgctgcgaacggaggagggtaccagcctccagggagccctctaggtggagatgtagaaacacagacaaactggaaaggatacttcaatgttgcctcttatactccatatttcaatgttgatactgatgtcgttgttgacagacttatcagttcagtttatccaatggaggggtttttcaggaagatagatgctaatcctgacatgtatgggcccttatggatcaccactacactgatatttatgctggctgcattcggaaactttgccacttatctaatgcaaaggaaaagtgatctgaatatatggaactttgatgtcagctatttcagtttggcggcatcagtcatgtacggttatgctatcgtggtacctgttgcattctttttcct

SEQ ID NO: 102401 - DNA, 308 bp, Zea mays
  Clone ID: MRT4577_24896C.1
gatatcgcgccgccgacgctgccgcggacgcaaccgcaacaatgcagtctcacaagaacttcaggatcacgatgaatctgccgaagaagatgcgcgataaccgctgcatcccctactggatccgcatgagcactgacaataccatcatgtaccacgcaatcagcctgcactggcgatgctcctcgctctgcttctgatcgtcgtgattggacggctgctgcggctgaaggctagtgtctaggagccatctgccttcagcctgatcagtgtgtcagtttatctgggagctaccaagtgttgcgatgacg

SEQ ID NO: 102402 - DNA, 506 bp, Zea mays
  unsure (1)..(506): unsure at all n locations
  Clone ID: MRT4577_24897C.1
cggcgtgtggcatccagatcgcgtcgagtcatttgccaacgaccatggttaaccgcaccaacgccctcgtaagttcgcccttcaaccgaattccgaaccgcctcattcggaaaagccggcccaaaacccaagtcgccatgaaaccccattcaacaccgtctttgatgccaagcgtctcattcggcaggaggttcaatgatgcgtctgtccagaatgatatcaagttgtggcccttcaaggtcatttctgggcctggtgaaaagccaatgattgttgtccagcacaagggtgaggagaagcagtttgcagctgaagaagatctcctctatggttcttatcaagatgcgtgagattgctgaagcttaccttggtagcacgatcaagaatgnnctgtgtcacagtccctgcctacttcaatgactcacagaggcaggccaaaaggatgctgggggtgattgctgcccttaatggcctgcgtatcatcaacgagccaacagctgcagcta

SEQ ID NO: 102403 - DNA, 451 bp, Zea mays
  unsure (1)..(451): unsure at all n locations
  Clone ID: MRT4577_24898C.1
aaaacggcaacaaacaaccggggacagagggaggcaaaaagaaaaaagggcccaggtccaggaggaacagcaaggccggnnnangggccagaagccnacccacaccaccagaaaccgcaaaaaaaaaaaaccaaccggaaacgggggacgggaggggaaaaaaaagcacccaaaaagggaaggagccccacaaccaaaaancccaaaaaggcaagcaaacacgggaaaggcaaacagcaaacaaagcncccgcggaagccaaaaaaaaagcagcagcacaagcngggcagggaacaacagcacgggcccaacccancaaagcagcaaaggacgacacggaaaggcncacgagcccnnagacgnggaggagcaaaggcaaaacaacagcgaaggannccgcacaacaagaaagacgaagaaggcaggggaaacaaccaacacaacacacaag

SEQ ID NO: 102404 - DNA, 807 bp, Zea mays
  unsure (1)..(807): unsure at all n locations
  Clone ID: MRT4577_24899C.1
aaaaaattacaaaaaaaaaaaaaaaaaaaaaaaaaaaaaaaaaaaaaaccttctcgaaaccctaggtccccttgctccatttctcagccggccgccaattccctttcccgtggctcccgcaacccgcttgagtggagaaagaagagatgggccgggcaaggggcggatggggccgggtctaatcggctatcgatctccggcacgaacgtacttcttgcggtcggcgtgtgggcagcacgaaccgcgtcgaagatcattggccaacgaaccaggggaaaccggcaccacngcccttcgtacggtcgcctttcaccgaactccgaagcgcctcatcgggagatgcggccaagaaccaggtcgccatgaaccccatcaacaccgtctttgatgccaagcgtctcatcggcaggaggttcagtgatgcgtctgtccagagtgatatcaagctgtggcccttcaaggtcatttctgggcctggtgagaagccaatgattgttgtccagcacaagggtgaggagaagcagtttgcagctgaagagatctcctctatggttcttatcaagatgcgtgagattgctgaagcttaccttggtagcacgatcaagaatgctgtggtcacagtccctgcctacttcaatgactcacagaggcaggccacaaaggatgctggggtgattgctggccttaatgtgctgcgtatcatcaacgagccaacagctgcagctatcgcctatggtcttgacaagaaggctaccagtgtcggtgagaagaatgtcctcatctttgatcttggaggggtacctttga

SEQ ID NO: 102405 - DNA, 773 bp, Zea mays
  unsure (1)..(773): unsure at all n locations
  Clone ID: MRT4577_2489C.1
aaaaaaaaaggataggttctattgccagcgcgctccggctgctgccgtaaagctctactctagaaccgcagctcgagctggagaagcatggagaggcagcgggagcaggcacagagggtatatcaccggtgactccgagcgtgtgccgccgccgcgggcgtggagggcgcagcaccggtggctctacgtgttgccactgtcgcccatgccgttcgtcgcttcgccatcactcgccgttcgtacacccctgtcggtggtaacactctatctcccggtgctcccgccctccgtccgtagcgcacgcagcatcgacaggtgcggcaacgacaggtcaaggcgaaggcggaggcctggacatgagccacgaaggagtgtgccacgttcgtgctttacgaccttgccaaaggaccacaccgacccacttcgccccggcgtcgatgccgccgagtctgccgtcaagggcgtcgttggccccgtctgcggcctgccctcgacatcctcgccttcgttgaccacaaggtgaatagtgtcgcgcgcgtgcttcctgacgcgagctatcagttgttattctaggtttgcctctctaaagtgcaactcaatctctctttgctgtcccntcggattggtgtcagcctctaaacatggaatttgatttcggtagtgcgttataggatggattcgatttcgaatcgttccagcatgctcgggacctctgctgagacatcagcacctaatatacttcgtcaacaaaaacaggttcccattgcttcccg

SEQ ID NO: 102406 - DNA, 874 bp, Zea mays
  Clone ID: MRT4577_248C.1
gccgctccgagccggccgggccgggaagcagagcatcgcagagaccggcgtcttcgtactcgcctctctcgcgcgcttccgagctttgtccttcgtcctcctcccccgacctctccagcagcgtagcgtagcgcccgcttccgccgttccgacccgccgccatgagggagtgcatctcgatccacatcggccaggccggtatccaggtcgggaacgcgtgctgggagctctactgcctcgagcatggcattcagcctgatggacagatgcctggtgacaagactgttgggggaggtgatgatgctttcaacaccttcttcagtgagactggtgctgggaagcatgtcccccgtgctgtctttgttgatcttgagcccactgtgattgatgaggtgaggactggcacttatcgccagctcttccaccctgagcagcttatcagtggcaaggaggatgcagccaacaactttgcccgtggtcactacaccattggcaaggagattgttgacctatgcctggaccgtatcaggaagcttgcagacaactgcactggtcttcagggattcctcgtcttcaacgctgttggaggtggaactggctctggccttggttctcttctcctggagcggctctctgttgactatggaaagaagtccaagcttgggttcacagtgtacccatcccctcaggtctccacctctgttgtcgagccatacaacagtgtcctgtccacccactctctccttgagcacactgatgtggctgtcctccttgacaatgaggccatctatgacatctgccgccgctcccttgacattgagcgcccaacatacaccaacctcacaggctcgtttctcaggtcatctcatcctgg

SEQ ID NO: 102407 - DNA, 826 bp, Zea mays
  Clone ID: MRT4577_24900C.1
ggtaccactcgggttcggccgggcatcgaaacaccatcccgctgatcgattctgaggcgccgccaatcccttgcacgagctacgcaaccgatgagtgagaagaacagattgccggcaagggacatggcaccggctatcggcatccatctcggcacgacgtactcttgcgctggcgtgtgccagcacgaccgcgtcaagatcattgctaacgaccagggtaaccgcaccacgccctcaaacgtcgtcttcaccgactcctagcgcctcatcgcagatgcggtcaagaaccaggtcgccatgaaccccatcaacaccgatctttgatgccaagcgtgtcatcggcaggaggatcagtgatgcgtctgtccagagtgatatcaagttgtggcccttcaaggtcatttctgggcctggtgagaagccaatgattgatgtccaggacaagggtgaggagaagcagtttgcagctgaagagatctcctatatggttcttatcaagatgcgtgagattgctgaagcttaccttggtagcacgatcaagaatgctgcggtcacagtccctgcctacttcaatgactcacaggggcaggccacaaaggatgctggggtgattgctggccttaatgtgctgagtatcatcaacgagccaacagctgcagctatcgcctatggtcttgacaagaaggctaccagtgtcggtgagaagaatgtcctcatctttgatcttggaggtggtacctttgatggctccctcctaaccattgaggaaggaatctttgaggtcaaggccacagctggtgacacccatcttggtggtgaggacttt

SEQ ID NO: 102408 - DNA, 341 bp, Zea mays
  Clone ID: MRT4577_24901C.1
cagatcgataccataccaggctccatcaatggactccaccaagttatccgcgctgctggcgctcgcagtgctcacgctctattcgacgtcgctcgctctcgcgtgggaaaaggcgcatcccgagtgccactcgtgcgagtcctgctcgccgccctcaaccggccttcccctgccccctatcagcataccgtcagtccccctgccatcagtcatcataccgtcagttccactgcccactgtcagtataccgtctgtccacatcccaccggtcacccatcttcccacagtcctcagactgccgccagtgacccttcctgccattccgatcatcggatgaagcc

SEQ ID NO: 102409 - DNA, 719 bp, Zea mays
  unsure (1)..(719): unsure at all n locations
  Clone ID: MRT4577_24902C.1
gggtaccnctcgggccggccgggcctctcgacaccatacacacgtggtccattgtcagccagccgtcaatcctttcccagcgctccgcaccacggtgagatgaggaaagaacagacggtccgccttggggcgatggcgccgggtatcgtgcatctatctcgtcacgacgtactcttgcgtcacagagtgatatgacgaccgggtgaagatcattggaaacgaccagtgtatactcgcaccacgcccatcctcggtccgctttaccgactaacgagccgcctcattggagatggcggccaagtaaccatgtcgacatgaaccccatcaacaccgaactttgatgccaagcgtatcatacggaaggaggttcagtgatgcgtctgtccagagcgatatcaagctgtggcccttcaaggtcatttctgggcctggcgagaagccaatgattgttgtccagcacaagggtgaggagaagcagcttgcagctgaagagatctcctctatgggtcttatcaagatgcgtgagattgctgaagcttaccttggtagcacgatcaagaatgctgtggacacaggccctgcctacttcaatgactcacagaggcaggccacaaaggatgctggggtgattgctggccttaatgtgctgcgtatcatcaacgagccaacagctgcagctatcgcctatggtcttgacaagaagctaccagtgtcggaga

SEQ ID NO: 102410 - DNA, 474 bp, Zea mays
  Clone ID: MRT4577_24903C.1
ttttttttttttttttttttttttttttttgttgggttttttttttttttttttgggtttttaattttttttttttttttccccccaaccaaaaaacccggcccctgatgttggaaaccggggcctttgcctttattcaaacccaacctggcccattgtttttaacaaggctagcaaaaaggggcccctaaaaaaaaaggggggccccccccccccttgagaacaaaaaaggggggggaaaaaaaaagagtccgggggggaaaaattcaaaaccgggggcaaaatcaaaaacttcggccccttaaaaaacattgggcccccttttttgtttacccaaaaatttacgggggctccccgggcctattttttaaggggggggaccccagggggaggggcgcaatacggtttttaaaactggccccccaaagttttttcccttttggagggatccttaaattttggggaacctggggg

SEQ ID NO: 102411 - DNA, 480 bp, Zea mays
  unsure (1)..(480): unsure at all n locations
  Clone ID: MRT4577_24904C.1
gattaaagaaaactgcttggaaaatagctctgaagccgttagtctcacataaattcagaagttcacccgtgtctatgaaatacaaatgccctcgactgaccatattaatcattccttcgttcccgcaaggccaccacaacacgacgcggtatcctatgaagcatatccatatgcttatgtatncagagcgatggcttgcttagagcactctaattaatacaaagaacggcgccggaggcaccacccggcctgacaatgcctgcgatcgcatggaccgctgaagggtctagccggtccattctagccgtgaggcggaccggacggccctgcccaatggccaactgcgaactgtctaactggaacaacttaaatgtacgctatgggggctgggattacgcgctctgctggcaccaaacttgccctacaatggatcctggtagagggattttcattgatctcattgcaattaccatacactaa

SEQ ID NO: 102412 - DNA, 424 bp, Zea mays
  unsure (1)..(424): unsure at all n locations
  Clone ID: MRT4577_24905C.1
cctatcctctgctccattctcagctttcgccaatcccttcccgtggtggggancggcggactgaaaaaaagagatgggcggcaagggcgatggcccggctatcggcatcgatctcggcacgacgtactcttgcgtcggcgtgtggcagcacgaccgcgtcgagatcattgccaacgaccagggtaaccgcaccacgcggggggggggggccttcaccgactcctatcgcctcatcacatattccnccaacaaccaggtcgccatgaaccccatcaacaccgtctttgatgccaagcgtctcatcggcacgaggttcagtgatgcgtctgtccagagtgatatccagttgtcgcccttcaaggtcatttctgggcctggtgagaagccaatgattgctgcccagcactatggtgaggagaagcag

SEQ ID NO: 102413 - DNA, 509 bp, Zea mays
  Clone ID: MRT4577_24906C.1
ccggctgcggaggtgctgcgggggtggggggggaggtaaaaaaaaagccccttcacgcccggagaggaccccgctatcctggcccctcacgccctgctgggcaaccggtgggccgggctctcgcgccttttgccggagcgctcctacaactccgctaagaaccactttatctgggggggggggctgaatctcgccaccgactcggcgacctccatcggcgagggagtgctgaccatccgtgcaagcgctcaacccctggcccggggagcccatcagcgtctgaccgaaacgacctcagccactgctgcagcaccattcacgtgttccttcccgtgccgcgcgccctaggcttcaacgccatcatcgccgaaaacgttcgccctcttttctcgacagcaatcctagacgatgacccgctcaccatcctctccctctcgctgccggagctggaccattcgccttctggcttccaccactacagcgcccggagccactttcaggagctctcc

SEQ ID NO: 102414 - DNA, 703 bp, Zea mays
  unsure (1)..(703): unsure at all n locations
  Clone ID: MRT4577_24907C.1
gctctctaaaacctaggcatgtgctgcagcccagcaggcgtcaatcctttcgcgtgcttcgtagctgcagattgagaagaagagatggccggacaggggaacgggccaggtatcgccatctatttggggacgacgtactcttgcgtctgctggtggcagtacggaccggcggacgattatctggcaacgagccagggtaacacggaccacgaccagctcggcgtcttgagctactcggaccgcctgatcgcagacgaggtcaagaactacacgctcaagaaccgcatcaacaacgtctttgatgccaagcgtttcatctgcaggagggtgagtgatgcgtctggccacagtgatatcaagctgtggcccttcaaggtcatttctgggcctggtgagaagccaatgattgttggccagcacaagggtgaggagaagcagtttgcagctgaagagatctactctatggttcttatcaagatgcgtgagattgctgaagcttaccttggtagcacgatcaagaatgctgtggtcacagtccctgcctacttcaatgactcacagaggcaggccacaaaggatgctggggtgattgctggccttaatgtgctgcgtatcatcaacgagccaacagctgcagctatcgcctatggtcttgacaagaaggctaccagtgtcggtgagaagaatgtnctcatctttgatc

SEQ ID NO: 102415 - DNA, 661 bp, Zea mays
  Clone ID: MRT4577_24908C.1
ctctagaaaccactactcccctgctgcattcttagtcgccggcaattccttcccgtgctccgaaaccgctgagtgagaagattagatgtgccggcaaaggcaatggccactgcctatcgggctcgatctcggcacgaagcactcttgcgtcggcgtgtggagcacgaccgagttgagatcattgccaacgaccagggtaaccgtaccacgcccttgtacgtctgcttcaccgactcctgagcgcctcattgcagatgcgggcaataaccaaggcgtcatgaaccctatcaacaccgtgtttgatgccaagcgtctcatcggcaggaggttcagtgatgcgtctgtccagagtgatatcaagctgtggcccttcaagggcatttctgggcctggtgagaagccaatgattgttgtccagcacaagggtgaggagaagcagtttgcagctgaagagatctcctctatggttcttatcaagatgcgtgagattgctgaagcttaccttggtagcacgatcaagaatgctgtggtcacagtccctgcctactttaatgactcacagaggcaggccacaaaggatgctggggtgattgctggccttaatgtgctgcgtatcatcaacgagccaacaggtgcagctatcgccctatggtctttgaca

SEQ ID NO: 102416 - DNA, 695 bp, Zea mays
  Clone ID: MRT4577_24909C.1
cattgggtacctcgaggccggccgggatgtctaaccctactcccctgctacagtctcatccgccgcccatcccttcccgtgctccgcaaccgctgagggagaaaaaaagatggacggcaatggcgatggcccggctatcggcattgatctcggcacagacgtactcttgtcttggagcgtggcagcacgaccgcgtagagatcattgccaacgaccagggaaaccgaaacacgagcctcgtacggccccttcacgcgactccgaacgactacgtaggagatggaggcaaaaaccaggtcgccatgacaccccatcaacacaggctttgatgaccagcgtctcatcggtaggaggctcagagatgcgtctgtccagagtgatatcaagctgcggcccttcaaggacatttctgagcctggtgataacccaatgattgttgtccagcacaagggcgaggagaagcagtttgcagctgaagagatctcctctatggatcttatcaagatgcgtgagattgctgaagcttaccttggtagcacgatcaagaatgctgtggtcacagtccctgcctacttcaatgactcacagaggcaggccacaaaggatgctaggggtgattgctggccttaatgagctgcgtatcatcaacgagccaacagctgcagctatcgcctatggtcttgacaagaaggcta

SEQ ID NO: 102417 - DNA, 346 bp, Zea mays
  Clone ID: MRT4577_2490C.1
aagaaacctaaagtcaccaggattttcacaaacccgattcgctcagtggacacgattcaataccccccacctcacacatgattcgaacaacgatgtctctgactcgccgtggagatgctgtctatgtattctctgatgacagatgggaccttgacgatggcatcccattaggctctggaagctccagcaacaacggactgtaccctgcggtcgaaggcactaacagatttcacacggccgcgttcgctggtgctcgaatgtaccgacaggaaactccagatgcacaggtcttcacaaccaacttcacagggctgagaaatgatgatgtgaaggtgcatctggaaga

SEQ ID NO: 102418 - DNA, 633 bp, Zea mays
  Clone ID: MRT4577_24910C.1
ctctcacaaccctattcttgctcattctcatgcgccggcatcccttacgtgctcgcgcgaatcgctcgtagcagacgaagaagagatcggcctggcaaggagtcgtagcgtccggctagtcggtagtcgatctcggcacgacgtactcttgcgtcggcgtgtggcagcacgaccgcgtcgagatcattgccaacgaccagtgtaaccgcaccacgccctcgtacgtgggcttcaccgactccgagcgcctcatcggagatgcggccaagaaccaggtcgccatgaaccccatcaacaccgtctttgatgccaagcgtctcatcggcaggaggttcagtgatgcgtctgtccagagtgatatcaagttgtggcccttcaaggtcatttctgggcctggtgagaagccaatgattgttgtccagcacaagggtgaggagaagcagttagcagctgaagagatctcctctatggttcttatcaagatgcgtgagattgctgaagcttaccttggtagcacgatcaagaatgctgtggtcacagtccctgcctacttcaatgactcacagaggcaggccacaaaggatgctggggtgattgctggccttaatgtgctgagtatcatcaacgagccaa

SEQ ID NO: 102419 - DNA, 217 bp, Zea mays
  Clone ID: MRT4577_24911C.1
agtggggctcctgttgctgtccccggagacggcgccgtcccgcgccgaggcggagttcacagtgtactatggcacggcggcgagcgcggcgaactacggcggataccgtgggaacgcgagcaagaaggacacggcggagtacctgtaccattttttttgaaagggtggaaagagccgctggtgttcaatgtggaaaaaggcaccaacggcacggact

SEQ ID NO: 102420 - DNA, 354 bp, Zea mays
  unsure (1)..(354): unsure at all n locations
  Clone ID: MRT4577_24912C.1
tctacagncccatcttcgccgcccctcgctcggctccgatccagtttcgccggcggccatgtcgcagccggcggcgacggtggccgcggcggcgcagccgcagggtcgcggccccgcggggcgccagggcggcctggggcagagcatcgcaggcatcgcgcggatggcggcgctctggcactttgcgtccaagctcttcgggcccaagcgcccacccgcggaccccgggatgctcatgtccaacctcttccacaagggcgagccaatggatatgtggatgcatttgccacacaacgagaagctcaacgatcttgctaacgaggatgcacttctttggcacgaggccaacatacc

SEQ ID NO: 102421 - DNA, 168 bp, Zea mays
  Clone ID: MRT4577_24913C.1
aataggcacgaggccggaggccctcaccatgaggcaattttacaagcagctccatgctaaacgggccaggctccgtgacgctggcgctgtcatgccacaggactacaccaagctcggccctcactgcgagcccgagggcgactgcttcaagacccgccatctactact

SEQ ID NO: 102422 - DNA, 154 bp, Zea mays
  Clone ID: MRT4577_24914C.1
gcgtcgtaagcttttacactctgacggccgcccggggggggtgtttttggatccaatacttgccttcgttcaatctccattggggtaatgcatctttttttggggttgcaaactctgcattgctgttactcagtgcttcgcaactgttcaggcg

SEQ ID NO: 102423 - DNA, 593 bp, Zea mays
  unsure (1)..(593): unsure at all n locations
  Clone ID: MRT4577_24915C.1
gnctagttctagatcgcgagcgtccgcctccctccccgcgccgccgctcgccggagccccgcgtctccgccccagcctcgccgcgccgcgtcctgtagcaaaaatgacggctggctacattgttggctcactggtcggatcctttgccattgcatacctgtgtgacacatttgtttctgacaagaaggcttttggaggttccacccccaagactgtctctgagaaggagtggtggcaggccacagacaccaagttccaggcctggcctcgcactgctgggccaccggttgtcatgaaccccatcagccgccagaacttcatcgtcaagtccactgagtaggctggagaagttggttcagcaacgtgttgccaccatgaagctaaagttccttttctaggtcttaattgattgtaataaaacgaactacagtcaggctttttgtgattttcactcccatctgtgaacaaacactggggctttcagcttacttgtcattcaatgggttctgttccttggtgaaatttcccgccaggcagtaaagaattgcaacgttttctataatatatgcttttgctattttgctatgcagccc

SEQ ID NO: 102424 - DNA, 248 bp, Zea mays
  Clone ID: MRT4577_24916C.1
gttagacattaaacctctgagagcgccctaccgacacacagggtgcagatgactcttgcctttgctgagggcctcaactcaatgagtgaggtgctcaccaggcctattaccacgcttgcatctgcactctaaggtatctgaacacttaggtgcgtatgccaacatgcaacaacatgccctcgccgggagagctttaaaacaaccaatatgtgaattgcaacaacaatctttggcacatatcataatac

SEQ ID NO: 102425 - DNA, 560 bp, Zea mays
  Clone ID: MRT4577_24917C.1
gcctgcgtgtaccgggctcctattacacggtcgacctcagcgttcgttcatacaaatgcactacctcattttcacccaagggtgccaaaatatagcactgccccgcccttggtggtgctggcagcaagcacggggaccgatactttaattccagaatgctaacagcaatacctttctgctgtggcaggaagggaaaattgaattgcccaactattcagggtctgcatggtacaaagagccgttcaagcaagaatgcttaaagtgattaccacaaacgctgcaacaaccatatgctatgttgcaacatccatacatagagcatgtgtgtctacaaagaatgtggaacagacaactactacaacagctgctaccaagcataaaggctaccgcggagggaaccatggtggttaccttcaggccaacagtttcttgcattgaatccaccagctggggggaaccctggtataaacttgcgggcacagcagctaccaccatgttaccaacttgctccggagcccttatgccgtcttaccggaacaacagattgtggcattccatat

SEQ ID NO: 102426 - DNA, 771 bp, Zea mays
  Clone ID: MRT4577_24918C.1
ccggccggatcttcgccgccatcctttctccccccctcgttcaaccgtccaggcagcaacatccatccaacctcgaaatgacctcaatttcgacgttcaacgatacgcggcaggtggtgctcatcacgggctgctcgtcgggcctgggacgggccatggccgtcgagtttgactcgctgcccggctaccgcgtctttgccacggcgcgcaacctcgactcgatccgcgacctcccctcgggcatcgagcgggtacagctcgacgtcaccgaccgcgacagcatcgaccgcgccatcgccaacatcacaaacgagacacggggacgcatcgacatcctcatcaacaacgccggcacaaacaccgccgtcgggcccctcatcgatgtcgatgtcgaccgggtcagaaagacctttgagccaaacttctttggcctcatcatggtcacccaggccgtctcgccgtacatgatcagacgacgctccggcgtcattgtcaacatcggatcaacggcaggcctcaccgctctgcccttcggcgcgacctactcggcgtccaaggcggccgtccacgccctctcggacgcgctgcgcctcgagctgcgcggcttcggcgtcaaggtcgtcgtcgtcgctccgggcgccatcaagtcgtcgatcgccgacgccgggtcaaaggacctcgacttccccccccgactccttctatggcgaccgtcaaggacctccatcgagtaccgcgccaacttttcccagcccggcagccccaccccct

SEQ ID NO: 102427 - DNA, 492 bp, Zea mays
  Clone ID: MRT4577_24919C.1
aattcggcacgagggcgcatagacagtgccgttccccgatctccgatctacttggcaatccaagatgcagatcttgcgtgcagaccctgactggaatgactactcaacctgcaggtgcagtcttctgacaccattgacaacgtcaaggccaagatccaggacaaggagggcattaaccgggaccagcacgggctcatcttcgctgacaagaagctcgaggacgggctcacacttgccgactacaacatctaaaaggagagcaacctctaccttgttctccggctcaagagatgcatgcacgatcttcactaagaccctgactggaaagactatcaccctcgaggaggagacttctgacaccatcgacaacgtcaaggacatgatccaggacaaggagggcatctctccggaccaggattggttcatttatgctggctagcagctcgaggacgggcgcactctggccaaatacaacattcataatgagagcac

SEQ ID NO: 102428 - DNA, 676 bp, Zea mays
  unsure (1)..(676): unsure at all n locations
  Clone ID: MRT4577_2491C.1
aattcggcacgaggacagaacccagcagctccaattaatggactgcgcaacagcgcagcgcagcgcagcatttcaaaccgagccaaaccggccgcagcatcgcagcgcaacgcagcgggcacgcgccttgggggtggagggaatgacggaggcgtcggcgatcctctcgttctccgcggccgccgtggtggaagacgtgctgcggcagcacgggtgccgcctcagcgaacgcgacctcgcgtcccgcagggccgaggaagccgcggggaggaggaacgaggcggcggggtggctgcgccgcacggtgggggcggttgccgcgcgcgatcttccggaggagccgtccgaggaggagttccgcctcggcctccgcaacggccagatcctctgcggcgcgcttaaccgggtccacctgngtgccgtcccgaaggtggtcgtaaacacggcggcggactccgtgctccaggccgacggcgcggcgctgtcggcgttccagtacttcgagaacgtgcgcaacttcctggtggcggcgcaagagatcggcctgccgtgcttcgaggcctccgatttggagcanggagggaagagcgccagggtggtgaactgcgtcctcgcgctgaagtcatactgtgactggaacaatgccgtggcaccgggccgtggaagtacgggggga

SEQ ID NO: 102429 - DNA, 403 bp, Zea mays
  unsure (1)..(403): unsure at all n locations
  Clone ID: MRT4577_24920C.1
ataatacatattctatgtaacactgtttgttttggtgaaaattcccattgatctctcatagagaaaaaaggcatattctcacacacaaaaaaaaaaaagagaattctgtcttatatatgtttgagagcatcaaacataatatgttgacttctttcaacagcttacatatatgttaaatcagattccttgtttttgtatcaaaccattcaattgagagactggaacctatgtggttcatccgtttagaccactattcttcatggttttgtatccatcttgaaaccctgaggtatttgatttattttttatagtcancgctttactttttaaatttttttttgtctttcccctgtagcctttttagatcatataattatcttcttttttttttttcatttttttt

SEQ ID NO: 102430 - DNA, 280 bp, Zea mays
  Clone ID: MRT4577_24921C.1
cggaagctcggaattcggctcgagctggcattcgccatcgactgaaccccagcggagcaatggtcagcggggggcaccgtatcaccggaggccccgattgtcgccccgacgggatggagcaagacactaagcagggggcatgcggacctttacgacctgaggagagccgtgatggcggcggtcaacctagtgtacttcggcgcctgcgcgcgctggtacaggttcaagaacccggccgccgccgacgtcgagcagctggagctggagttagagggaaagg

SEQ ID NO: 102431 - DNA, 700 bp, Zea mays
  unsure (1)..(700): unsure at all n locations
  Clone ID: MRT4577_24922C.1
aattcggcacgaggttggaatagagcagacaatgcttatctatgatgatttattcttcctgcttcaggcaaaccttttcattttgactggtatagtagtttggttggatattgttggaatagcctataacatgtgactgtttaacaaaatgaaacaattcttttatcttttttcttcatagtttgcttccttttctgaagcttggtgctgcagtcagtcagaatcattcactaccaataacatcatcagttcactgctctgctacactctatacttgatttgtcctgctccaacttgaatcttttgcaagcatcaatagttgctcctgagtttcccctgttaatttcttgatttttaattgaaacttatgtgattcgtgagtctagcttttgcagatcagagtgtctagacatgttggcaaaaactcttccattacacatgcaacaccgtagcccatgcgacaacgaccgcgaatagggccgagccttagattcatgctttggcgtgtgacagattaggggatgttttcaaccacaacctgaaattgcttcccagaagtaatcgaacctangacctgaggagtgctactcagaccacgtaaccaactcaactaatggctctttcacggctatgatttaactgattaggaattaatttggctgatcagaaatctacttgataccaagaatgttatgttggg

SEQ ID NO: 102432 - DNA, 825 bp, Zea mays
  Clone ID: MRT4577_24923C.1
gtgcggcgctcgaggcggccgggtccggaggacgcagccaatgaacgagttgagtggcttcctccccaccacaaggctccccccaccccgctctatctctatctcttctcccgtcctcccttagctcggagtcggacacccacccgccacgaccaccccagaccactcgcttccccgaagcttcagctccgcgcttctctgttcgagctagccagcctccagcaagagcgagcgagcgagggcaacgggcatggcggcggctgtgtccttctcccgggtgcgagctctcccgacgtggtccagctccgtgtccggcgacgaccaccaccgctcctactccgcggcgctggccatgtcggtgtcggtgcggccccggtgtcgcgcgcggtcgccggcgcggatgatgggcaacgtgaacgccggcaaggggctgttcgcgccgctcgtggtggtggcgcgcaacatcatcggccgcaagcgcttcaaccagctcagggggaaggcaatcgcgctgcactcgcaggtcatcaccgagttctgcaagaccatcggcgccgactccaagcagcggcagggcctcatccgcctcgccaagaagaacggagagaagctcggattccttgcctgagacgaccatgttctacgcacatatataagtatataatctataagtactacatcatcaagtagtggcggacaatgataattatattgataccttcttccttgctccgatcgaatcctctatcaagtggtagctagtgcatgtcatgtgatgattcttcaatccagcttccgatgctcgaccaaaaaaaaaaaaaaaaa

SEQ ID NO: 102433 - DNA, 863 bp, Zea mays
  Clone ID: MRT4577_24924C.1
aattcggcacgaggggaacaggaaaagtgagcccaaaccctagacccatggaagcgtggccgcctctagcccccgcggcggccgtagccgccaccccggtcgctgcctccgacgatgcggcggtcactcccgctggttccggggcgtggggacccgcggcaacggcgcagcggaaggccgtggagcaggagtcagcggcgcaggcggtgagccgcatcgtggcgagctgcgccaactccagcggcgtggcggtcgccgtggtggacgccaacgccgttatctccggcgcccccgccctctccacatccgcggggcgccttgtcaccgtgccggaggtgctcgaggaggtccgggacgcggccgcgcgccgacggctcggactcctccccatccccgtcgagaccgttgatcctgcgcccgagttcgtgaagaaagttaccaagtttgccagggagacaggagacatccaaacactctcagatgttgatatcaagattattgctttggcttacatgttagaagctgagatccatgggagtagccatttgcgggagcaccctcctcctctgcttgaggtgaatgtcagaaagctgtcagaagctccactgcctggttggggctctaatgtgcctaacctgaaagagtgggaagaattggatcagatgtcagaagctggtggagatatcaattctagaatacttcctctgaaggacattgagaatcaagatctcccgatgagcgagaccaacagtgtgtgtgaggcacaggaggatacagaggaccagccttcagagaaggatgcacctgttgcatgggaagaggatgagaataatgtaggttggatgcctgctgttagccgcagc

SEQ ID NO: 102434 - DNA, 275 bp, Zea mays
  Clone ID: MRT4577_24925C.1
ggctagcatgcactgggctgggagcacaggggaagaaatgtaccgctgacttgggcctgacgtgtttagtgtacctagacgcaaggaggaagctgatgcccacacggcgacactcgctcacttgtctaaatgcatgcaaacgagccagttaggagtgactgtacatgggtatcgtgaagggccggtttagggaggacctggacaggggaccaattccatacctagactggttagacgagaggcttgtagaaggcgtaccaagagtcttagctcaa

SEQ ID NO: 102435 - DNA, 1995 bp, Zea mays
  Clone ID: MRT4577_24926C.1
caggccggccggcggccgggagccccaaaccctacaccctcatggaagcgtggccacctctcgcccccgcggcggccactccggcctgtgccttggcgtggggagcagcagcaacggcgcagcggaaggccgtggagcaggagtcagcggcgcaggcggtgagccgcatcgtggcgagctgcgccaactccagcggcgtggcagtcgccgtggtggacgccaacgccgtcatctccggcggctccgctctctccacttccgcggggcgccttgtcaccgtgcccgaggtgctcgaggaggtccgggacgcaaccgcgcggcggcgcctcgggctcctccccgttcccgttgagaccgttgaacctgcgccggagttcgttaagaaagttaccaagtttgccagggagacaggagacatccaaacgctttcagatgttgatataaagattattgctttggcttacatgttagaagctgagatccatgggactagccatttgcgagagcaccctcctcctctgcatgaggtgaatgtcagaaagctgtcagaagctcaaatgcctggttggggctctaatgtgcctaacctgaaagagtgggaagagttggatcagatgtctgaagctggtggagatatcaattctcgaatacttcctctgaaggacattgagaatcaagatctcctgatgagcgataccaacagtgtctgtgaggcacaggaggatacagaggaccagccttcagagaaggatgcacctgttgcatgggaagaggatgagaataatgtaggttggatgcctgctgttagccgcagcacacacagaagatatttgcggaggaaggcaaggcgtgatgccctcaaagaatctggacaaagttttgagacgagttctgttgctgcatcaattgatagcgataaagttctctctgaaaatggagggttggagcatggtctgacttcaacaggtggcctctcttctgtccctgagaaaatcagtgcaagttctgatggtcttgaacttcaagcagatgctgaccctgaaattgctggagaacagttgcattctgaccagctatcttatggtgatgatactgatgcatgcaccaaagaattggataaactagatataaaaggtgaggatgagggaggtgatgatgcacattccgtagattatgagagcagcgaacagagttgggccctgaggtccttatctgaatcaactatagcatgtgttactagtgattacgcgatgcaaaatgtcatcctgcagattggcctccggctcatagcaccaggtggcatgcagatacgccagatgcataggtgggttttgaggtgccatgcttgctataaggtgacccaagaggttggcaaaatattttgtccgaagtgtggcaatggtgggaccttaaggaaggtctcagtgacagttggtgaaaacgggatcactatggcttcacggcgcccacgtgttacacttcgaggcacaaaattttcgctcccaatgcctcaaggtggaagagatgccataactaagaaccccattctacgtgaggaccagcttcctcagaaggttcttcatcctaaattgaagaagtccagcaaggcggatgatttcttgggcgttgaggacatattctcgcacagtggtgataagaaggcgtcactgaaacctccagttggcaaggcactggcaatgttcagcgggaaaaggaatccgaacgacaaccacttctctcgcaagaagcactaagctgtgctgtctccttttcatgcacacacctaatggtaccctagtttgtaagcaagcagagtggctgagagggagagtctatctgtattcatgtacgcacacagatataagcatgttaagctatgcagttttgcagcatccatgcatggtttccgtgctggtgtttctaattccaatggatttgaattttttttaatcttgaatattcacatggatctagcttcgagtcgacgcgggccgc

SEQ ID NO: 102436 - DNA, 160 bp, Zea mays
  Clone ID: MRT4577_24927C.1
caatctcatgaggtcctgacctacagggaccgtaggtaccggtcgatgtctacgacttgcggcacgtcctccgtttcacggtaaggccgcttccagtccatcagccagcgcccgaagtcttcggagtccggacttcttccgttccttaacttcttctgcc

SEQ ID NO: 102437 - DNA, 528 bp, Zea mays
  Clone ID: MRT4577_24928C.1
ttaaaaaaaaaaaaaaaaaaaaaaaaaaaaaaaaaaaaaaaaaaaaaaaaaaaaaaaaaaaaaaaaaaaaaaaaaaaaaaaatcacaaaaaaaaaaaaaaaaaaaaaaaaaaagttttttcctttggccggccccccttttggggcgttttttggggttttccttccccttgggggccgtttggccttcctttttgggggcccatttcccctttttgggggtcgttttccatttcattggccgggtttttccaccttggggcttgggaaacccttgggtttccccacttttttccctttggggcctttccccttttccccggttgggtttttagggaaggggccccaccggttcgcctttcccaccttttgcccaccttttttgggaatgggccccccctttttcggcccctttatccccgggggttgtgggggttccccccagggggccctttccttttgccgggcccttttcccccgctcttttcgttttttccctttctttttttccccctttggcggtttttcc

SEQ ID NO: 102438 - DNA, 669 bp, Zea mays
  Clone ID: MRT4577_24929C.1
ctcattagttcaagagagagagagagagacgaaaaggcgaagatgagccgaaggctggacatcccggagaagttgctccatgaggccgccgtccacgaagggaccacgcagatcaacaccggctacgtgcagccgcgaccccatgggtccactgccacgataagtgtcaattgtcagctcgagaacattaccttcaccgccaaggatgtcaaggttcctcatctggagcacgctttcatcacactaattagactgagatttatgattatacctgatatgctcagaaacgctcccatgctccagcgcttggaagcgacaattatactgaaaggatgctgctattgtagttgtccgaggacgggcagttgcaatgcgcgctcgacctgcttctgttcgtgacgtagctgctgctgctctaggtaccgcgcctcctgtgaggagagagattttatggcgtcatgtggcttttcgtgtctggctgaggatggtgcagtctgatgctaggacactgtcttggcaggcaaaactgccggaatgtataattcaacgctcttaagagtatgaatgtgcaacctcttattgttgaatgtaatgtgttagaccgctgcctgatgttccttgctctattcagatgggctggaccaaaaaatatcatgagatctcgccgac

SEQ ID NO: 102439 - DNA, 166 bp, Zea mays
  Clone ID: MRT4577_2492C.1
cgacccacgcgtaaaccttcatttttttcgcctctccttttcgattccaaatcatacatatccccattgacacgggtcaattcaataacacctgctcatacagtccatcccaatctatacctccaccctcttctcaattactaccccatcaaaatctttgatcacc

SEQ ID NO: 102440 - DNA, 489 bp, Zea mays
  unsure (1)..(489): unsure at all n locations
  Clone ID: MRT4577_24930C.1
gggtgtgggggggtttttttttttttttttttttttttttttttttttttttttttttttttttgcgggcgaaggcctatgatcattgatcagggcttcatgaacaaagcatacaactcacaccagttgaacaaaaaatcaaccccctcccaaagggtaagctggggggtaantttcacccatataccccttcttattacacacaaagacacaaacacaagggccgggggtttctgaagttccttaaaccgcccccctgtttgatgatctcattgtttttgccctgcttcctagaagggggaaaggaaaatgcagtactggcatattctggtctacagacttcctcagctcatcggtggtttccatgggtccctgcggccgtcccatcatgccctttgctccccctggggccctgtgacccccgaggggcccttccggggagatctttcccccctcggaaccttttgccccgggttggggttttggggg

SEQ ID NO: 102441 - DNA, 2332 bp, Zea mays
  unsure (1)..(2332): unsure at all n locations
  Clone ID: MRT4577_24931C.1
cctttttctcctcccccctccccaaaccgccgcctcctctccccccctcgacctctccggtgctcatagtctcacccgagtcacctccacacacacacacacctcgaggcggcgacactctcggacacacacacaccgatacacggacacatacacgcgctctccctcctcctcctcctcctccagtcccggcaacggaaggtccactgcggcgccggcctcactggcatcaccatattgccaaccgcgcatattttcagtttgtagaagccatcttttaaagaacattttgggcagagattgccagtactattacttgtggttaacatggacttctcagctggttcctacttctcatcatggcctgtcaattctgcttctgagagctacagtttggctgatggttcagttgaatcctatggaggagaaggaatcatgccaccttcaagctacttcatgacagccagatcagatcacaatttaaaattcagtgtgcatgaacaggattccactatgcttccaaacgaccaattgacctatgctggcgctaggcagactgatctattacctggcgagactccatctagggataagctttgtgagaatcttctggagcttcaacgactgcagaataacagcaacctaccgagtaatttagtgcccccaggggtacttcagcacaattcaacacctggggcctttcatccgcagttgaatactcctggactttcagaactgcctcatgccttatctagttcaattgatagtaatggaagtgaagtttctgcttttctcgctgatctaaatgctgtttcttcagcctcagctttgtgttccacattccaaaatgcttcttcattcatggaaccagtaaatctagaagctttcagttttcaaggggcacaaagtgattctgttttgaacaaaacaacccatccaaatgggaatatctcagtatttgacagtgctgccttggcatcactacatgatagcaaagagtttatcagtggtaggctcccctcatttgctagtgtccaggaaacaaacgtagctgctagtggtttcaagactcagaagcaggagcaaaatgcagtgtgcaacgttcctatccctacgttcactgcacgtaatcaaattgcagttgctgcaatgcccggatcactgatccctcaaaagattccttcatggatcaatgaaaacaaaagtgagggtcctgttagccatccttctgatgtacaaatccaaccaaattcagttggaaatggtgttggtgtgaagccacgagtaagggctcgtcgtggacaggcaactgatcctcatagcattgctgaacgacttcgcagagaaaaaatttcagataggatgaaaaatctacaagatcttgtcccgaattctaataaggcagacaaggcatccatgctggatgaaatcattgattatgtgaaatttcttcagcttcaggtcaaggtgttgagcatgagtaggctaggagctccaggagcagttcttccccttctcgcagaatctcagactgagggttaccgcggtcaacttctgtcagctccaaccaacgcacaaggattactggacacggaagaatcggaagacaccttcgccttcgaggaagaggttgtgaagctaatggaaaccagcatcacaagcgcaatgcagtaccttcagaacaagggactctgcctgatgccagttgcccttgcttccgccatatccacccagaagggcgtctccgccgcgtcaatccctcccgaacagtgaaataaagacatgctgctgctcccatgagtacgaggaaacaactgcagaagacagaaaactcaagatggctgaagaatgcagcaaagcccgtatagagtacagggtaggaagttagtctgaccagtgttcatgacctcatctactaatttgcttttcagaatcagctttttggtatctattgcgcataagttggtttttccttttcccttgctctgtctctctctctccctggggccgtatccgggtgctccgtggatagttgcgtttcagaaacttgaactgtatctggatgatctatctggtttctcttttgtgcatagaaaaaactgtaaaatcttctggttctgttctgctagatgagataaaagcccggaccgggctctcctcccccccaatccccaattccccattgtcttcgtcctgcatccggacctgtggccccttttccggctgtcagtttgttagctgtagccatctaccatcagtttccaaggatctgctgtaaagcgttggcagggaacgtctgccttctgtnnnnnnnnnnnnnnnnnnaaaaaaa

SEQ ID NO: 102442 - DNA, 387 bp, Zea mays
  unsure (1)..(387): unsure at all n locations
  Clone ID: MRT4577_24932C.1
cgcggggggggggggngggggggggtggtgttgtgtttttattatcttttttttttctttttttttttttttttttatttttatttttattataaaataaaaaaaatatatacaacantacagcncgggtcggcgcggaggaggaggagaagcctccacgcctccccctcccccccctcctcctcccccgaacaaaggagagngaaaatagaggaggagggcacggacggcgaggccgnggacgagtaacgtcactaggcangcgtacgagacgcgagtataaggtaccgccctcctgaataaaggtgagcgacgcccggctcaaaagacgggggagagggagggtgggttgttttttttttttttttttttttttttttttttttt

SEQ ID NO: 102443 - DNA, 338 bp, Zea mays
  Clone ID: MRT4577_24933C.1
gggaccccggaggatatcaatggaaacccggagagggaccacgaaagctagcgagagccccacatgacaaactggagcccttcatggaggaactggcgccatgcgacacgccggtgagaaaagagattccgctagaataaagcaatgaacaccaacctggagaaggagatgacaaaagcgggggggctaaaagagaaagcctactgaccttaagagaacccagaccaactcaccttattaaagaagaaagcccctggagcgggctagaagaaagatcagcccaacccccggggaaagggggtaccggcgtggaccaacaggaagttcttttttccccc

SEQ ID NO: 102444 - DNA, 826 bp, Zea mays
  Clone ID: MRT4577_24934C.1
ggaaattaaatttgaattcaaaatatttatgagtaagaaaaacagaaaagtaaaagaaaaacaaaaaagaaaaagaccccaactgggctccctctcgcgattttggcccaatttcgtgcttccctacgcgcggcccagagaatgcagcgcgcgctatgggccactggcgtgtgggaccgaagggcgaaacgttagcttgtgtgctctgcagactcgtggggacgctgcgctgtggggccaatacgtcagcgccgtcttcccgaaaatctcgcaggccatgggcggcttcagttgaacccgcgcgatttctcgggctccgaatgatcctcgccatcgttgactcgatcctctccctgcatggatggccgacctcctgcgcttccatgtgacccggggcgtagtggctctccccctttcttctctccaggccgcaccagatgtgcgacaaagccgccgccgcgtcaatccctcccgaacagtgaaataaagacatgctgctgctcccatgagttactgcagaagacagaaaactcaaggtggctgaagaatgcagcaaagcccgtatagagtacagggtaggaagttagtctgaccagtgttcatgacctcatctactaatttgcttttcagaatcagccttttggtatctattgcgcataagttggtatttccttttcccttggggccgtatccaggtgctccgtggatagttgcgtttcagaaacttgaactgtatctggatgatctatctggtttctcttttgtgcatagaaaaaactggtaaatcttctggttctgttctgctagatgagatctatggccggac

SEQ ID NO: 102445 - DNA, 281 bp, Zea mays
  Clone ID: MRT4577_24935C.1
acaagctttttttttttttttttttttttttttttttgttttttttttttttttttttttttaaaaagatattataggaatactgtttaattgtaaaaaaggagccacacccgagggcatggcaacaaaaaattgggaacaacacaaaaaaacctgggcccccacccccccaagggggaaacccaaaacactggcggccaaaacaaaaggacccgagcccgaccccaagcaaggcaaaaccaaggccaaagccggcccccgggggaaaggggaaaccgcaa

SEQ ID NO: 102446 - DNA, 366 bp, Zea mays
  Clone ID: MRT4577_24936C.1
tttcttttgtgaacagcctgggggtcaccctggagaacatgatgttgtctgcgattcctgcgatgttcccaccaccccactcgatcgggtaaggaggaaaacaataagacgaccaccgctgcgtgccggtcgaaagtatcatacagggatgggctgcaaccgcggggctatttgggacagcgaaagtctgatacaggaaagctcgcagcataaggtcttagagctgatacacatgtccaagcagaggaacctgtgtaggtatctgtgaacaacgtagatccgaagctgtgtgcatggagagatgctactactagggggtcccgttgctacaggcgctacagatcatgggtgatgagcggggaggac

SEQ ID NO: 102447 - DNA, 289 bp, Zea mays
  unsure (1)..(289): unsure at all n locations
  Clone ID: MRT4577_24937C.1
cacnanacnncaaagcaaaataacagggtggggacacctagctgaagaaccagctggggcaacaagctcatagagtatgctctgcacttaaaacacaccacggaaatggaccaataaggttttgcccctctgaaaaaaatctatagcccgtccaaattatacaccaaaacctcccaagaaaacaaccaacggtggcgaaactcgaaaccaggaaaaaaaaaggggggggggggggctaaaaaactgttacctaaaaataaacactaagggcgcgaaatctactttttaa

SEQ ID NO: 102448 - DNA, 411 bp, Zea mays
  Clone ID: MRT4577_24938C.1
atagtgagtcgtattactcgcggcgccctcttattatgtcttccttcgggttatggttcctttatggttttgttggatgggtatttgtgttggtccagtgaagtaccgttgccacgccagaggatttgcatgcgcgaagggtaactagtcaccggagaaagacatcggtcaatacagccagatacactactccagcgacaaccatgagcagacagatgctcaggttcacggcaatcacattcgtaagactcacgagaacgaaagttctgcactagtccaacaagaccggcaaacgaaaggcacacggatgttttatcatggttgcttaatgggccctttcgggcacgatcagcatcctcctgcacgacgccgctgtccaactctgctccaaaagccggcgggacttggggg

SEQ ID NO: 102449 - DNA, 346 bp, Zea mays
  Clone ID: MRT4577_24939C.1
gttattctaaatgttaattacatacatgttattttttatcctggaacaaacccctacatttgtggttttcaaataaaacaacaaaacccttttggcaagcatttttacaaaaaattttctttgaatgttaaaaccgggaaaacaaaatttggtgcgaagaaaacaataaccacaatttttttatcaataaaattaacccctcttgcagtttccctttttaaactttaaaggtaaatgcccatttgatttaaaatttggccaaccttaatttagagctttatagttaaaaagggggctaaaatccttcaaaattttcaaagctttaaattttgggggggacccaaac

SEQ ID NO: 102450 - DNA, 165 bp, Zea mays
  Clone ID: MRT4577_2493C.1
attctaagggtggaacacaaatctgcattaaatgatgaatttaaatacatacacatacataatcagaacagcggtttaaaatgacgaatgccattaaaccatcgctacttaaagaaccaaaacggccagagccgtattacgagaattcaccacctttaaaaaccg

SEQ ID NO: 102451 - DNA, 862 bp, Zea mays
  unsure (1)..(862): unsure at all n locations
  Clone ID: MRT4577_24940C.1
ccgtccgcaagagtaaaaccagncactattagnaacatcatggacatgaaggcaaactttgggtcatttgctgctgcactcaagagaaagagtatgggtgatgaatgttgtgccacatgatggaccaagcaccctcaagataatctatgatagagggctgataggcagcaatcacgactggtgcgaagccttctcaacctatcctcgaacatacgatcttctccacgcatgggcagtcttttctgaccttgataaaagaggctgcagtgccgaagacctgctccttgaaatggatcgtatcctcaggccgactgggtttgccatcgtgagggacaagggcaccgtcattgagttcatcaagaagtacctccacgcacttcactgggaggcattgactgtcgtggacgctgagcccagcccagaatcagaggagagcgaaatgatcttgataatccggaagaagctgtggctaccaaaagcaggcccgcaggattccggcacgtagttcttctcgtacctgttcctctcccagcacctgcagctcagaagccaggcgcagctgcaccatccaaaatggttcgacacttgtagctcctgagatagagtcagtcatgatttctagccctaccgcccacatgaagataggttgtttacgaggatactgcaagtagtatgtagcaggcttggattaaaaaaaaggccccttttttgtcgcgacagatatggattggtgtttgttatctagtttggttaggaaataaacattctttttcttttaggtgtttcgtgtccatttttttgaagtctgctatagtctgtagcaagtgtatttggtgttttcttgaaagaactcctgcccccc

SEQ ID NO: 102452 - DNA, 2224 bp, Zea mays
  Clone ID: MRT4577_24941C.1
ccctttcgccggcggcgtaggaagagatggcagagcgtttgacccgtatcgccatcgtcagcgaggacaagtgcaagcccaagaagtgccgccaggagtgcaagaagagctgccccgtcgtcaatccggaaatgtccatttgatgccattgaaatcatcaaccttccaaaagacttggaaaaggataccactcaccgatatgggcctaataccttcaagttgcacagattgcctgtcccaaggcctggtcaggttttgggccttgttggaacaaacgggattggaaagtcgacagctcttaaagtgttggctggcaagctgaaacctaacttggggcgcttcaaaaacccacctgattggcaggaaattcttacatactttcgtgggtctgaacttcagaactacttcacacgcatattggaagataacctgaaggcaatcatcaaacctcagtatgttgaccacattccaaaagctgttcaagggaatgtaggacaagtacttgaacagaaggacgagagggatatgaaatctgaactgtgtgttgatcttgaattaaaccaagttattgaccgaaatgtaggagatctttctggtggtgagcttcagagatttgcaatagcagttgttgctgtgcaaaatgcggaaatctatatgttcgatgagccatcaagctaccttgatgtgaagcagaggctaaaagctgcacaagtcgttaggtccttgcttaggcctaacagctatgtcatcgttgtggaacatgatttgagtgtcttggattacttgtccgacttcatttgctgtttatatggcaagccaggtgcttatggtgtggttaccttgccattctcggtccgagagggtatcaatattttcttggctggatttgttccaacagaaaatcttcggttccgagatgaatctcttacatttaagattgcagagactcaagaaaatgctgaggagattgagacgtatcagcggtataagtaccctactatgagcaaaacacagggaaatttcaagcttactgttgttgagggtgaatttactgattcccagattgttgttatgcttggtgaaaacgggacagggaaaactacattcatcagaatgctggctgggttgttgaagccagacacggtggaaggaactgatattgaaattcctgaattcaatgtgtcgtacaagccccaaaagattagcccgaaattccagaataccgtgaggcatttgctgcatcagaaaattcgggattcctatatgcatccgcagtttgtgtctgatgtgatgaaaccactgcaaattgaacaactcatggaccaagaggttgttaatttatcaggtggagagctccaaagagttgctatatgcctctgccttggaaagcctgcagatatctatctgattgatgaaccaagtgcttatcttgattcggagcagcgtattgttgcctcaaaagttatcaagagattcattcttcacgcgaagaaaactgcatttattgttgagcatgatttcatcatggcaacatacttggctgacaaggtcattgtttatgaggggcgaccttctattgactgtactgccaacgcaccacagtctttagtatctgggatgaataaattcttatcgcatctcgacatcacttttagaagagacccaaccaactataggccacgtataaacaagttggaatcgacaaaggacagggaacagaagtcagccgggtcctactactacctcgatgactaatgaggaagtgcagattcttcttggagagccatatgtcgcataatctttccagagcatggaaaggagaagctactttgaagctaccactgcatcatggcatgtgacttgttgaataattggttgcaggagtagagtgcgccggttataacttataaagcagagcatgccgtgttgatactgagttttttgttggcttgacctatatgaagagaaggatcggtgttaaaatgagatttgcgagggggaactaatttctgtttttaagcaatactgtactgtcgttttgctatcaagtatatttgaccctcgattatatagattacattgaagtttttgggcaacaatgtgaaatcttgtgataaatctctgtgcttattggttatctgattgtaactcgtcctttgtaaactttgtttgaatgagcaagtgaactgattgtcgatagtttgttccaaaaaaaaccccaccc

SEQ ID NO: 102453 - DNA, 276 bp, Zea mays
  unsure (1)..(276): unsure at all n locations
  Clone ID: MRT4577_24942C.1
cggccgaaaaaccgggccgccgacgcgtccgggccgtgctacacaacatccaacgggggggcttcacagtggcaggcatcntaccacacagggtggtcttcctaggcaaaaagcgctccctcaacaaacaccacctcacctccataccgatcgtgctatgcggcgctgcgccacttggcaaagacctccacgacacactcttagcccgggtggcacaggacgacttccgacaaggatacgggatgacggaagacaggccctggctgttcatatgcc

SEQ ID NO: 102454 - DNA, 2264 bp, Zea mays
  Clone ID: MRT4577_24943C.1
aagttactcataagaatcagaagaaaaggacccgagcctagggttcggtctgcctcccacagccgccgctacgctttggctgcatcactcgctcctcttcggagcctccctttcgccggcggcgtaggaagagatggcagagcgtttgacccgtatcgccatcgtcagcgaggacaagtgcaagcccaagaagtgccgccaggagtgcaagaagagctgccccgtcgtcaagactgggaagctttgcattgaagtaacttcggcatcaaaactagctttcatttctgaggagctgtgcatcggttgtggtatctgtgtaaagaaatgtccatttgatgccattgaaatcatcaaccttccaaaagacttggaaaaggataccactcaccgatatgggcctaataccttcaagttgcacaggttgcctgtcccaaggcctggtcaggttttgggccttgttggaacaaacgggattggaaagtcgacagctcttaaagtgttggctggcaagctgaaacctaacttggggcgcttcaaaaacccacctgattggcaggaaattcttacatactttcgtgggtctgaacttcagaactacttcacacgcatattggaagataacctgaaggcaatcatcaaacctcagtatgttgaccacattccaaaagctgttcaagggaatgtaggacaagtacttgaacagaaggacgagagggatatgaaatctgaactgtgtgttgatcttgaattaaaccaagttattgaccgaaatgtaggagatctttctggtggtgagcttcagagatttgcaatagcagttgttgctgtgcaaaatgcagaaatctatatgttcgatgagccatcaagctaccttgatgtgaagcagaggctaaaagctgcacaagtcgttaggtccttgcttaggcctaacagctatgtcatcgttgtggaacatgatttgagtgtcttggattacttgtccgacttcatttgctgtttatatggcaagccaggtgcttatggtgtggttaccttgccattctctgtccgagagggtatcaatattttcttggctggatttgttccaacagaaaatcttcggttccgagatgaatctcttacatttaagattgcagagactcaagaaaatgctgaggagattgagacgtatcagcggtataagtaccctactatgagcaaaacacagggaaatttcaagcttactgttgttgagggtgaatttactgattcccagattgttgttatgcttggtgaaaacgggacagggaaaactacattcatcagaatgctggctgggttgttgaagccagacacggtggaaggaactgatattgaaattcctgaattcaatgtgtcgtacaagccccaaaagattagcccgaaattccagaataccgtgaggcatttgctgcatcagaaaattcgggattcctatatgcatccgcagtttgtgtctgatgtgatgaaaccactgcaaattgaacaactcatggaccaagaggttgttaatttatcaggtggagagctccaaagagttgctatatgcctctgccttggaaagcctgcagatatctatctgattgatgaaccaagtgcttatcttgattcggagcagcgtattgttgcctcaaaagttatcaagagattcattcttcacgcgaagaaaactgcatttattgttgagcatgatttcatcatggcaacatacttggctgacaaggtcattgtttatgaggggcgaccttctattgactgtactgccaacgcaccacagtctttagtatctgggatgaataaattcttatcgcatctcgacatcacttttagaagagacccaaccaactataggccacgtataaacaagttggaatcgacaaaggacagggaacagaagtcagccgggtcctactactacctcgatgactaatgaggaagtgcagattcttcttggagagccatatgtcgcataatctttccagagcgtggaaaggagaagctactttgaagctaccactgcatcatggcatgtgacttgttgaataattggttgcaggagtagagtgcgccggttataacttataaagcagagcatgccgtgttgatactgagttttttgttggcttgacctatatgaagagaaggatcggtgttaaaatgagatttgcgagggggaactaatttctgtttttaagcaatactgtactgtcgttttgctatcaagtatatttgaccctcgattatat

SEQ ID NO: 102455 - DNA, 2559 bp, Zea mays
  unsure (1)..(2559): unsure at all n locations
  Clone ID: MRT4577_24944C.1
aaaataaacaaaaaaaaaaaaaaaaaaaaaaagtcggacataaaaaccagaaaaggggagccgagcctagggtttggtctgcctcccgacgccgccgctacgctttgcgcctttgcctgcatcactcgctccttcggagcccctctcttcgccggcgtcgtaagaagagatggcagagcgtttgacccgtatcgccatagttagcgaggacaagtgcaagcccaagaagtgccgccaggagtgcaagaagagctgccccgtcgtcaagactgggaagctttgcattgaagtgacttcggcgtcgaaactcgctttcatttctgaggaactgtgcatcggttgtggtatctgtgtaaagaaatgcccatttgatgccattgaaatcatcaaccttccaaaagacttggaaaaggataccactcaccggtatgggcctaataccttcaagctgcacaggttgcctgtcccgagacctggtcaggttttgggccttgttggaacaaatggaattggaaagtcgacagctcttaaagtgttggctggcaagctgaaacctaacttggggcgcttcaaaaacccgcctgattggcaggaaattcttacatacttccgtgggtctgaacttcagaactacttcacacgcatattggaagataacctgaaggcaatcatcaaaccgcagtatgttgaccacatcccaaaggctgttcaagggaatgtaggacaagtgcttgaacagaaggacgagagggatatgaaagctgaactgtgtgttgatcttgaattaaaccaagttattgaccgaaatgtaggagatctttctggcggtgagctccagagatttgcaatagcagttgttgcagtgcaaaatgcggaaatctacatgttcgatgagccatcaagttaccttgatgtgaagcagaggctgaaagctgcacaagtcatcaggtccttgcttaggcccaacagctatgtcatcgttgtggaacatgacttgagtgtcttggattacttgtccgacttcatttgttgtttatatggcaagccaggtgcttatggtgtggttaccttgccattctcggtccgagagggtatcaatattttcttggctggatttgttccaacagaaaatcttcggttccgagacgaatctcttacatttaagattgcagagactcaagaaagtgctgaggagattgagacatatcagcggtataagtaccctactatgagcaaaacacaggggaatttcaagcttactgttgttgagggtgaatttaccgattctcagattgttgttatgcttggtgaaaacgggacagggaaaactaccttcattagaatgctggctgggttgttgaagccagacacagtggaaggaactgatattgaaattcctgaattcaatgtgtcttacaagccccaaaagattagcccgaaattcaagaacaccgtgaggcatttgctacaccagaaaattcgggattcctatatgcaccctcagtttgtgtctgatgtaatgaagccactgcaaattgaacaactcatggaccaggaggttgttaatttatctggtggagagctccaaagagttgctatatgcctctgccttggaaagcctgcagatatctatctgattgatgaaccaagtgcttatcttgattcggagcagcgtattgtggcctcaaaggttatcaagagattcattcttcacgctaagaaaactgcatttattgttgagcatgatttcatcatggcaacatacttggctgacaaggtcattgtttatgaggggcgaccttctattgactgttctgccaatgcaccacagtctttagtatccgggatgaataaattcttatcgcatcttgacattacttttagaagagacccgaccaactataggccacgtataaacaagttggactctacaaaggacagggaacagaagtcggccgggtcctactactacctcgatgactaatgaggaagcacagattcttcttggagagccatatggcgcatagtctttcgagggcgcggagagtgcggaaacgagaagctactatgaagctaccacactacatggcatgagacttggttgcaggagtagagtgcgccggttataacttataaagcagagcatgctgtgttgatactggtttttttttccctttttggcttgacctatatgaagaaaaggatcggcgttaaaatggtattgtgaagggagaggtttttaagcaaaatgttgtaccgtcgttttgccatcgagtatatttgaccctcgattatatagatcacattaaatttttggagcaacaatatgaaatctcgtgacaagtcgttgtgctttttggttactgattgtaattcattcttgagtttgaatgatcaagtacactgataaaaaaaaaaaaaaaaaaaaaaaaaaaaaaaaaaaaaaaaaaaaaaagggaaaaaaaaaaaaaanggggggccttgggcctccagttttggtccctttaagggggggtaaatggccccctgggggaaacaagggcaaaagctgttccctgg

SEQ ID NO: 102456 - DNA, 387 bp, Zea mays
  Clone ID: MRT4577_24945C.1
ttctagatcgcgagcggtcgccctttttttttttttttattttcctttttgggtgttttttttgggcaaaggaggggattctttttattgccaacacacacaaaaaaagggttaacatttttttattggtttacatcaccattcaaggggaaaaatgaatgggcagagcaagaatgtaattgctttgtttttatttccatgctcctgccttgtgccattagataacctccaaactcattggctcttttctatcttcatcccaatgcatagccgtaagtgcattcactgtatttccaacatatggaagccctaaaaatttcccaataaagatgttttgacaagggtaaaaagtaaaggtaaaattgtagctcacttaaaatctttatc

SEQ ID NO: 102457 - DNA, 544 bp, Zea mays
  unsure (1)..(544): unsure at all n locations
  Clone ID: MRT4577_24946C.1
aattcggcacgaggccaacttccctctcattcgtcttcccaaaccctataaccctagcaccgccgccaccatgtcctcgtctccatcttcaatgaaccgccgtcccccgggcccgctagcgttggggctggagtccttggcgaagaagaagacacataccggtgctcctcctctggatctggcggtcaactccatcacccgcagcttctatggcacctcccctagtccccctccatcgccgccttcacccaccgcttctatatcgccacctctctcattgtagaagaagacactgaggatctggtgagcttccacctttttagcttattccgtttagatctgttgtctatatttgattctcgttatggaagaagctgctagtgcttgcttgcatcatcgctgaggatctgctggtaggatagattagctggatcggtgcatccatgcgtgcaatctanacttggagtgtacaactgcgcctanaatgtttgtgttttggttagggggtttgtggagcgctggggggggggtggggggggtgggg

SEQ ID NO: 102458 - DNA, 327 bp, Zea mays
  unsure (1)..(327): unsure at all n locations
  Clone ID: MRT4577_24947C.1
gcgagcatcccggcgctgctctacagggagtacgcatcgactgggcggccggcgcggacgccggcggcggtgtcagcgtcnccgtcaccctgccggactggtcgctcgtgcacgagcagttcggcgctccgccggtggtgccccggcacgcggacccggcgctcgccagaacggggggggggaagcgcaacccccggcggtcggtcgccggggcgttcaccgtccagggcggcggcggccttgcggggggcttgccggactggccgctcgacgagttctttgggttctccgagtacagggccgggctccccttttctgagaatgaca

SEQ ID NO: 102459 - DNA, 283 bp, Zea mays
  Clone ID: MRT4577_24948C.1
tgtgatgctctggagaggccgcgtcgaagctcggtagttcgcgtcgagcagataggagtgctagaaccacaggattggtacaattgtcataatacgcatggttagaggtttggactctctagtatttataatatcatattacattaaacttaactggactaaatgtgtacatagggtggcaattcacttactatgtgatgttccgaatgggttatcaatgtctaatacggctagcagacttgccctgctttggagaatgtgtatttggaagacactaggctct

SEQ ID NO: 102460 - DNA, 616 bp, Zea mays
  Clone ID: MRT4577_24949C.1
aactaagctatgtttaaactgcatgcacggatgcaccgaccagtttatcagaaaagacctaatcaaaagagaaagatttctaggtggagttctagattgcaagtttagattgcacgcatggatgcaccgatcaagctaatctatcctaccagcagatcctcagcgatgatgcaagcaagcactagcagcttcttccataacgagaatcaaatatagacaacagatctaaacggaataagctaaaaaggtggaagctcaccagatcctcagtgtcttcttctacaatgagagaggtggcgatatagaagcggtgggtgaaggcggcgatggagggggactaggggaggtgccatagaagctgcgggtgatggagttgaccgccagatccagaggaggagcaccggctgctggatccaaaggaagagacaagacgttccatatccgaccattggagggcaacgactggatctagaggaggtttgcggtgagcttcttcctatgtgtcttcttcttcgccaaggactccagccccaacgctagcgggcccaggggatgacggttctctgaagatggagacaaggacatggtggcggcggtgctagggttatggggtttg

SEQ ID NO: 102461 - DNA, 435 bp, Zea mays
  Clone ID: MRT4577_2494C.1
atactgtcattttgccctttgcacctctgctgtgctgggttcataaaaagccccttcatctgctaagactgctgcatgcattgcttgtcaaggtacagagaacaaactgatgttccatctggacagtttcagctctgattgttcatttatttttcaaccctattttcgtgtgtgtatatagatatagagcaagtacatacggtggaactaatgacttgcgattgatcattattgtttccctagaaaactaaaatcttccgttccgtttaatttatgaatgatgatatggctggtgttgttccaaagattgacaacaacactacctactggtgtcacggtaggttccatgaaaagtagtaatctttatagcttatattcatttgattgagatcgtttgtactggtgaccgattagtatttgtgatgatctctgatt

SEQ ID NO: 102462 - DNA, 1073 bp, Zea mays
  unsure (1)..(1073): unsure at all n locations
  Clone ID: MRT4577_24950C.1
nnnnnnnnnnnnnnnnnnnnnnnnnnnnnnnnnnnnnnnnnnnnnnnnnnnnnnnnnnnnnnnncgcctcttcctgtttactaaatagtgccaatattataactcctgaatcggcactagtttgaacattattaatcaatcaggatgcactcattagtcatgatcaattagcatctttggatcaggattattaggacacaagcgccacctagaacatagcaaaaacaaacaaaacaaaaactagtgactactgcttctacaacacaacgcaaaccaggtacaatgtgattgattgatcgatggacatggacggcgagctgcagcttgctgctgcagcctgcagggtttcatgtcatcctcagggtgaggtactgccggcactgcagcagccacggcgcgtgctgccgcatcatcatgctttcttcaaggtcaaacgccacggccctctggcacggcggcggcggcgcgtggaacgccgccgcaggcccgtcatcggagcagtactcggccgacgaaggcgacgataggacgctcgcgccggagcagtcgggcccgaagggggaggagacggcgccggcgtcgtcgcgaggctctgctgcttgcctcctcctcctcctcctgtcgctcttgcgacggccgtcgggtgagcagcgcccgccgacggcgagcgtcagctccagctccgtgccggcggcggcgtcctcatcctcgtcggcgctggctatgtactcgtcggccgggagctgcaggcccagcggcagcgcccgccgcggctgcttgctgcgccggcggggggtggtcaccggcttggctccggtcaggtcgtcactcgtcgtcatcgtcatcagctccctctgtatacggtacaggcgatgcagctcgtggacctgctgcctgaaggtttcttcgtgcttgagcatggccatcttcatgacctcaatgtcgcattgcctcacgcgctgcctgtccaccatcatcctcttacggtcttacctatagctagcccgctctcgcttaatattggatgtaacaaaacacacgagagcagctaggagcaggttttgggggttgaa

SEQ ID NO: 102463 - DNA, 269 bp, Zea mays
  Clone ID: MRT4577_24951C.1
catttgtcgtagcagctttattgggcatatcaagatatgcaggttgtaacaccttttttggtttcagaatttgtaatttgcttaaaacttatctagatgcagttacagagcttcgtaatcgctgggtgccaaaattttagcttccaaatacatatgactgtgcgataggctatatcatgttcttatgctgttatgcattcatgctgctgcattttacttttttctacaagtactttattgtctcatgataagaaagaaacagtggttga

SEQ ID NO: 102464 - DNA, 310 bp, Zea mays
  Clone ID: MRT4577_24952C.1
ccgggtagggagtgagagagagacagagagatcatcgatcgatcgacgaccatggcgaggcaacgacaagttgctttcatgcttgcagctgctctgctcgttgcaacgacgtttgcgtacattcctacaaccgtgcactgcatcggcgtctgctacggaacgctgggcaacaacctgccgttcatcatcgacgtggggcagctctacaggtgcaagggcatgaaaggcatgcgcatatacttcgccgacgccaaagacctagacaacctgcgcaactacggaataaggctgatactaaacaccgtaaacg

SEQ ID NO: 102465 - DNA, 450 bp, Zea mays
  Clone ID: MRT4577_24953C.1
ctaggtggggtcgtttcaacaaatcttttgttttccccgcccctacagaggccagaaggccctattccctaacaaaaaaaaaaacccagagccgggcctgcctacacggaaagggggggctccggacagggacttgatagacaaaactttttttttagcggagggggagattccgcacttctgggtcccccacaccccaaaccacgggggcggcggggaaagggagattaattccgccacaagcttagacaggctgactggggcaatggagccccctactaaaaatccccccccgaaacaaatttcggttccccccccacaaaccgaaccttccccacctttagtggggcgcgacctgtgtcgcgatatatttcgggacctccgcttcggcccaggaacctttttgtgttagccaagccgagcaatatgaacttccccttctcttcctca

SEQ ID NO: 102466 - DNA, 702 bp, Zea mays
  unsure (1)..(702): unsure at all n locations
  Clone ID: MRT4577_24954C.1
ccggccggggtaatttcgattagggttttcctaattttctagccgccgtcgcggctttccaccatcctcagccgtcgtcgcggccttctccctcctccatcctcagccgccgtcgcgaccttcccccacctgcgcacgtcgccgttcgccgccccatcctcagctaccgtcgcggctcgccgtccaccgccgcgactgtcgtcacggccttcccccacctgtccgcgtcgccgtccgccgccgtggccttcttttgcgccccaccatcgtggtcttccctctcccactgtcgccgtcacaccgcggatctctgcccgcgccgccgtccgccggacttcgcgcagggaggcatcacagatctctgcccacggatctctgcccgcgccgccgtccgccggacttcgcgcagggaggccgtcgcggatctgcaccctcctgctcccaccgtgcagggagccctccagtgctcgtgtcgctgtcgcagatacgcagcgcagggatttctccctctggtggccgtcgcggatctgtgctgccgtcgcacttctgcgccgttgcggcactgcccctgcccgaactccgcactcatgcgcagtcgctgcaatgacgccctcttgcgcagtcgctgcatctgctgctctactgcgactttgcacgttctcgntcaaaactgcagccggcgtatcctctattcatccgcta

SEQ ID NO: 102467 - DNA, 494 bp, Zea mays
  unsure (1)..(494): unsure at all n locations
  Clone ID: MRT4577_24955C.1
gttggaacctttgggctgatttatgtgcttgggttaatgagcctccttcgtagacgtcgcgtgagtgttggtttgggtgtcccgcttagactacggatcttactgttgattcgggatcggaggctattaatgctaatgctattctttatgagagttctgcttctaatgctccttgtgttgttaggtgggataacgaggcggtagcgtaggtggatagatcgagggatctgtcgtcggaggcgacgtgggagttgcatggtgcacggctgctgctggtgttgtttgcggggacgagtggtagtggtactgttgatgcgaagtacgatagtgcggatacgaagtctgacggtactactgatgggtaggtggtattgagtgctgtagcgggggccctagaggactatcatggtggtcataattactcntcntaacattctgtccgactaccacccaaccgtgcctgcctacgccgaaagcctgactaaatcactaaa

SEQ ID NO: 102468 - DNA, 613 bp, Zea mays
  unsure (1)..(613): unsure at all n locations
  Clone ID: MRT4577_24956C.1
acccacgcgaacacggacgcgtggnccaggacaagtcttataatgtattcccttcataatattaattattacagtgaattcccgttgctgtcggtggtcggcaagtgggccggcgccttggaggtggacctaggctcttggacggtgtcgatgctgcgggcggaggtggcgcggcgggttggggacggcgtggagcccgagtgtgttggcctcatcttcggcggccgcgtgctcaaggatgatccacccgcctcgttgcgggaggctggacttaaggccaacgccaaggtgctatcctccctcacctcccctgatcgcgctaaagaaatcgatgctcaggccgccaaagcgaaggctgaagaggagcacgctgcaaagcttgtcagactgtgggaagctgcaaaagcgttgtctcaaaggcacacggatggctcctaccttgcggaagaagactacaacttagatcttgaggatcaaagtggccaaaaagtgatgtttggatctgtagatgataaaaaggcccgacagcaacgatgtctctaattcttcaccaaaaatctaaaacccatattaataatgtaatttataattaaccactagattttttaataat

SEQ ID NO: 102469 - DNA, 493 bp, Zea mays
  unsure (1)..(493): unsure at all n locations
  Clone ID: MRT4577_24957C.1
ggccgcttcgaggccnggcctgggccttcgaacatgagcatcaagcaccgagagccgtgacgcatgtgctgccatcactgcgcgagagagacgagtcaccactgcgggaactccgttctgatcgccgccgagcctctgaagttagccaagatgtttgcccaaacatcaggagcgtgtgagggaaactttcgggcgaggtcactgtcggagagtcaagaatttctcgccggagacatgccaccgccacggatccgccttgagctgtggtcggcacctcgtgtgcccttaacaccggtcaagagcaggtaccactagaggagaattattatgaagagtttgaagagatctaggccgtcgtttcccagtcaactgtccctatggagaagttatcttagctcagagtattttatttagttatttatgtaaagacatttcattatgtaataaatattgtgacattagttttcaaaaaaaaaaaaaaaaaaggccccta

SEQ ID NO: 102470 - DNA, 424 bp, Zea mays
  unsure (1)..(424): unsure at all n locations
  Clone ID: MRT4577_24958C.1
cccccggaaaacaaaaaaatgnaataattaaaaatggccggagtagtttataattaatgcaagcgtgaaaaaagtagtttttccactaaatttttggttgaaccgaaaatgccccatttatttaggggggtttggttcctaaaatcacacattataaatgcccttgatgggaagagaaaaaaatgctgttcagttaacataaaattggggttttcaccaaaaaacgatttttatcaggcagcaaacttttggtcctagagagttagacgtttcttatcccatcttgacaggccaagccctcctgttcctacctttggaattgaggaaaacattttaagagctgaggagtcagtgatggggacacacctttgggtttctttttttttttgggggatcaattaccaaacctccaacagattttcca

SEQ ID NO: 102471 - DNA, 600 bp, Zea mays
  unsure (1)..(600): unsure at all n locations
  Clone ID: MRT4577_24959C.1
attgcatcaggaatgctgttaggataaatcaggctctttgtccacaaataactgaatcggaaagtctggttgagtcatttctcacagcattcccttcagttagtcctctgtctgcacacatgatacttntctgntctggcagtcttaatggatnnttcctcagnaatggtgcacatgagccaacgtnnnactcaggcgtgttgaaaagtatcatttgccaccgcagagcatttctctcttcagtgctttgtgcaaattcggtgaactaggtgaatcaaagtctgtaatgactgaatgctcttctgttgattcagatatcagtagtactttgctgcagtctccgaggaaaaagaaaaggcgtgccgcacaagacttttccgttgcagttagtaatcctgctttccctaatccatgtactcaattgcatggtgactgtgtagaaaatgacaagatattctcaccacctaatttaaggaaattctttcacatagaggatacaatgtctgacctccccgaagtctttatgattgatcaacggttgaatatgggtagtgnaaggtgtcntcttgtcagccaagaaagtatgatgtggatgctgta

SEQ ID NO: 102472 - DNA, 391 bp, Zea mays
  Clone ID: MRT4577_2495C.1
cccacgcgtccggaaggaatctgcagagagcacaatggtagcttataaggcagctcaggatattgcattggctgaactgccacctattcatcccataaggcttggacttgcacttaacttctcagttttctattacgagattcagaactctccagacaaagcttgcaatcttgccaaggaggtaggtgtacatttatctttctattgctgtactgggtttctgagttataactatcttcggtgttgttagtttgaatctgggctgaaagaaaaggtgcaaattgcatatggattgatctttgaaaactcaagcacagtgattttaccattttcaccgtagatattgtttgatccttctattgcttggtactcatatggactttactttcag

SEQ ID NO: 102473 - DNA, 441 bp, Zea mays
  unsure (1)..(441): unsure at all n locations
  Clone ID: MRT4577_24960C.1
ctgcagtacctatcctnaattcctttgggggggcacgcgtccatatcacttacctatagcaagtatctccctctacttttttagaggatagtattcaatctgggcaagcgctcacctgggtgagctatctagttcaagcgaccatatggcgtcaggtcaagaaagcatgaaagagcttgaccgcaagggccgggagggcgagaccgtcttccccggcgggaccggctgcaagagcgtctatgcccaatagcacctctcctaaaggcgcatccttggaggccatacttgcatggagcaacttgggcaacatgggtacagctagattgggaaaaaaggctgtctgagcaccacggacaagtcctgcggcgagcgcgctctcagggatggcgttattatttacgagttcaagttcaccaagtattcctatcgcgtgcgtgcgta

SEQ ID NO: 102474 - DNA, 490 bp, Zea mays
  Clone ID: MRT4577_24961C.1
gggcaggcccagttctgcagtcttaacaacgggatcgggaacaatggccataaaacccaacggggcggggaacaatggtcatcagtcttaacagctcaaataggcccagatcatattatccatcactccccctaccaaataaattgggccacgtttaccaaccccccccagcctagtcctatgaaccttaaaaaggggggaacctggggccggccttggggcccccggagaccgggtgcttggcaagccccccgggggggcccaggccccccggggtctggaccccgcggggggggacggggggcttcttgttatagcgcgccagcttgggggactcggccgggggcttctcaaaaatgtccttgatgaaggggttcatggtggacatggccttggaccaaatgcccatgttggggggcccctggttaagcaccttgaaaatggaaaacttgaagggccccacggactttttaaacttttttttcccctt

SEQ ID NO: 102475 - DNA, 708 bp, Zea mays
  unsure (1)..(708): unsure at all n locations
  Clone ID: MRT4577_24962C.1
ctgcgatttgtaatataaaaccggggcgatttaacctcctctccccagcacacccgtcgtcaataccgcaaccatgggtaaaggaaagccaagaggtctcaacgccgcccgcaagctccgcaaccatcgccgcgagggacgatgggcggacctccactacaagaagcgtctcctcggaaccgctttcaagtcctctcccttcggtggatcttcccacgccaagggcatagtcctcgagaaggtcggtgttgaggccaagcagcccaactccgctatccgaaagtgtgtccgtgtgcaattgatcaagaacggaaagaaggtcaccgctttcgttcccaacgacggttgcttgaactttgtcgatgagaacgacgaggtcctccttgctggtttcggtcgtaagggcaaggccaagggtgatattcccggtgtgcgtttcaaggtcgtcaaggtttccggtgtcggtctgtccgcactgtggaaggagaagaaggagaagcccaggtcatagaggactcgtctgcaaggagtcaaggaaggaaacgaacgtggaccacaagcccgccatgaacgaatgatggaatccgcggatcactatgggaggttaccggagtctttacattgggatatctgtgcttctactcggcatatgaaaagtcatgatatgcntggagagttagatagagaatctgactcgttcaagcgccc

SEQ ID NO: 102476 - DNA, 2396 bp, Zea mays
  Clone ID: MRT4577_24963C.1
ccctcgaggccggccgggaactgctaaaaccacccaccttctccccgtgactcactgactcacgactccagatctcgcaccgctcgccatggacctcctcgacgcgaggcaccgccacacgccggatttgagctcctcccaagatgccgcctccaacatggggctcccgctcgccggtgccgcctaccagccctacgtttctgagcttctttccttctccatcgagcgcctccacaaggagccggagcttttgagggtcgacgcggagcgggtgcggcggcagatgcaggaggtggcggtggaaaactacgctgcgttcatcgccgcctccgaggcgctctccttcgtccgcgcgcagcttgagagcttcgacggccacctcgaggccatgatagaggagataccaaacttaacatctggctgcactgagtttgttgaatccgcacaacaaattttggaggagaggaagcttaatcaaacattactagccaaccacactacattgcttgacttgcttgaaattccacaattgatggacacgtgtatacggaatgggaactatgatgaagcacttgacctagaagcttttgtgagcaaaatctagaagctgcacaaggcagtcctgatttacctaaggaaagcagttaggagccactgaaatcaagaagtctgtttagcgcactttcacagcagtcactgatcaaatattctcagccgagtgacctgggctagtgacgaacatctgcgctgaattgaagttttcagtggttcacaattgcgcttacagttcctgaggtgcagggaagcttggctttcttgaatttttatagataaagtcctaaagcaaggtttggtttagccaaaaagagaagaaaattctccaaaggtatatattattagagatttttatatagttttgttcacagtctaacagtgtaaacaaggtaacactggatatctgtatctcactttttttttgactcgggcaattcaacaagttagtaatcaccttggctatcttcaagttatggtaccaagcataacaaaaggtgggtctctgttcaacattcttggagtacaccatttttgttcaatgggtcttggcttagatgggtttgatttccgtggcctcctttcgccaatccttgaggagtaattggtgtttaaattattgaattttatcaccgactctaaaggggctttgttattgatgctgttatctgcattttgcagcgcggttcttaatttattctcaaagaatatgagtacggcggttgtaaattttcaggttgttttggattcacactgctgggttccgatgccatctgttggttttgtagcaaatggtgttgtcgatgagacttctgatgatgtgactccaccttccgttttaatggagcatccacctcttgcagtgtttgtcaacggtgtttcagcagcaatgaatgagctaagaccgtgcgcaccattgagcttgaaagttgtccttgctcaggaggtggtcaagggactacatgcagtctctgactccctagtaagatacaaagctatgcggatgcttcgtggaaatgagtccgctcttttcctgtcactctgccaggcatttatcgaggttgtacatccttattgtgccgcatgttttggtcgatgctactcgaatggggcaacattgatctcagagtgtcaaggcacactggacgctgtccgtcagctattgaccataccggcaagatctaacagttccagtatcgaaagaaagcagtcaggagccattgaaagaaagcaatctgttgagagctctgggacagcagtcacggataacgagctgtcagccgatggacctgggctagagatcaacgatgctgctacaaccaccaccccaccggtagaggacgacgtgagtacccatccaccaggaagtaagtagcttggacctccgtttgaatttgttaaagctctttatcaaggcctggtttagtcaaccagagaagaaattgctgcaaacattatattcatcgataataattcatagttttgctccagttctacagtgtacacaatatctcactggatatttgtatcttatttttttatcactcattaaatttttagctgttcattgttatagtcaatacctagatgttgtagagtgtgtccaacccgaacattcagtaatatgatgagtacaaaccgtgttcatcgtgttgactgcacacttctgaaatcaaagatctgattcatgagtcatatttttctaactgaatctatccagctctagattaaattcagcagaaaaaaaaaaaagctgagtatcaaatatacggatgacccatgccgttgagcatatcatgtcataaaaaaaaaaaaaaaaagggcggccaaagactagtgagctc

SEQ ID NO: 102477 - DNA, 1558 bp, Zea mays
  Clone ID: MRT4577_24966C.1
aggaaatatctcacgtagacggactcgccgccgccccgtctccggtccccttccccgatcccagccaatatcccagacggaatcgatctacggctaacctagggttcccgtcccgtccggatccgtcgatggggaaggagggcgtggtggcagggccgccggcggaggggagtaaatcgcggccggagtgcatcaactcgtccaacccgtaccacgagtgcactgactactgcctccgcaagatcgccgaggccaggcagcgtctcgacgacgagctccccgactcgtggcagcgcccgcccgagcaccgcaccgtccaccgggactgcatcaacgcctccaacccctaccacgagtgctccgactactgcttcaagcgcatcgccgacgccaaatcagggcttgagcgtggggagcaacagccaccagctgacgtggccaccgctgccggcacgtctgatgccgtggagcagcagcagcagcttgaagataacgatgccgacggacaggagggcgcagccgcggatgacggctacccgcagatgacggaaaagcagaagaagctgttcgagctgcgccttaagatgaatgaagcgcggaaagcgaatcagcaggcgatggttgccgagaagaaaaggatggagccccgaggcgagagccgaggtgtttcgaagcagaagtggctagacgacaggaagaagaagatcgggaagctgctggactcgaatgggcttgatatgaaaatggcgtacatgctcgatacgcaggagactgcagaagccaagtacaagaagtgggagaaggaacctgctccatatgggtgggatgttttcaatcaaaagaccttgtatgatgcatacaagaagaggaccaagaacatagaagttgacatggaggcgtacaataaagccaaagaagctgatcctgaattctaccgtgacgcctccagtctccagtacgggaaggtgtccaatgtccctgaagaaaacattgacaagatggtcaaggaactcaaggagcgggaagagaagcggaaatcgttcagcaggaggcgcaagttcaacgaagacaaggacattgattcgatcaacgaccggaatgagcacttcaacaagaaggttgagcgcgcgttcggcaagtacacgctcgagatcaagaacaacctcgaaagaggtactgccttgccggactaaaactgtacacagcagctcggtatcaagaacagcatgggaagagaggtaaggtactggcttgccggactaaggaccttacacagcagctatcttatggcgctcaagctaaccactcgcctagaggcgtgtgtccctggtgttttccttttcgcatggttacttcttgcctgtatgctcggaactcgtggccatggttccattttgatttgtaagaaaccggggactgggttgtcatgacgttaggttgaagtaatgtacagaccaagttgtgcctgaatggaatggttgatttgtaattgtgtatatgccgcgacgaggtttatgtaatttaaaatcaattctgagacaaaaaaaaaaaagcggcc

SEQ ID NO: 102478 - DNA, 766 bp, Zea mays
  Clone ID: MRT4577_24967C.1
ggccgcttttttttttttttttttggatttaatctagagctggatagattcagacagaaaaatatgtccagtagtgttagattacatatatgactcatgaatcagttctttgacttcaaaagtgtagtcaacacggtgaacacggtttgtactaatcacttaatcagattattgaatgttccggttggaaactctacaacatctaggtatcgagtataacaatgaacagctagaagtttaattgttcgagtgataaaaaagtgagatacagatatccagtgagatcttgtgtgcactgtaagactgagaacaaaactatgaataattctctattaatataactttgcagcaattttttctctggttgactaaaccaggccttgatgaaggactttgacgattcaaacggaggtccaagctacttactcgctggtggaccgtcgtctaccggtgagggtggtggttgcagcagaactgttcgtctctagcccaggtccatcggctgagagcccgttatcagtgaccgctatcccagtgctctcaacagactgctttctttcaatggctcctgactgccttctttcgatgcctcctgactgccttctttcgatgctggaactgttagatcttgccggcacggtcaatagctgacggacagcgtcaaatgtgccttgacgctctgagatcaatgttgccccgttttgggtagcatcggccaaacatgcggcacaataaggatatgcaacctcgatgaatgcctggcata

SEQ ID NO: 102479 - DNA, 1567 bp, Zea mays
  Clone ID: MRT4577_24968C.1
tttgggtccctccggccggccggcccgcactttcatcctctcccagtatccacgggctcggcctcgcacgcagtcgccgccgccctgcccgtctccttcctgtcgtctccccttctccaatcgcttcccgatcccagccaatatctcagacggaatcgatccaaagctatcctagggttccgccgtcccgtccagatccgggctcgtcgatggggaaggagggcgtggcggcggggccggcggcggaggggagtaaatcgcggtcggagtgtatcaactcgtccaacccgtaccacgagtgctccgactactgcctccgcaagatcgccgaggccaggcagcgcctcgacgacgagctccctgactcgtggaagcgcccgcccgagcagcgcaccgtccacccggactgcatcaacgcctccaacccctaccacgagtgctccgactactgcttcaagcgcatcgccgacgctaaatcccctgcctgcggtgcggggctggagcgtgaggagcgacagccaccagctgatgtgtttgccgccgccggcatgtctgatgccgtggagcagcatcggcctatagataacgattccgacgaacaggagggcgcaggtccggatgacggctacccgcagatgacggagaagcagaagaagttgttcgagctgcggcttaagatgaatgaagcacggaaagcgaaccagcaggcgatggttgccgagaagaaaaggatggagcctcgtggcgagagccgaggtgtttctaagcagaagtggttagacgacaggaagaagaagattgggaagctgctggactcgaatgggcttgatatgaaaatggcgtacatgctcgacacgcaggagactgcagaagccaagtacaagaagtgggagaaggaacctgctccatatgggtgggatgttttcaatcaaaagaccttgtatgatgcatacaagaagaggaccaagaacatagaagttgacatggagtcttacaataaagccaaagaagctgatcctgaattctaccgcgacgcctcaagtctccagtatgggaaggtgtccaatgtcccagaagaaaacatcgacaagatggtcaaggaactcagggagcgggaagagaagcggaaatcgttcagcaggaggcgcaagttcaacgaagacaaggacattgactccatcaatgaccggaacgagcacttcaacaagaaggttgagcgtgccttcggcaagtacacgctcgagatcaagaacaacctcgaaagaggtactgcgctgccggactaataaaaccttacacggcagctatcttcgaccgtttttcaagctaaccagtcgactagaggcgtgtgtccctgctgctgttttccttttcgcacggttacttgtatgcttgtaacttaacttgaggccacagttccattgtgacttgtaacaaaacctggactgggttgtgtaatgacgcgaggctgaagcaaacatttgtgtatgcatgtgagttgtcaaaagcctcaatggaaagggttttttgtcaaaaaaaaaaaaaaaaaaaaaaaaactcgagagtg

SEQ ID NO: 102480 - DNA, 361 bp, Zea mays
  Clone ID: MRT4577_2496C.1
gttccagctaatcaaaacttatataaattagagaagcaagggctaggaattgtctcatatctcaattccaggaaaaaggaacggtccctaagtgtgcttgtctttcattctctatacaccctatcttgaccacggagttctccacataagttattcgtctctcctagacatcaggccattgcataccggtgatagaaactaggaccgtcatagaaacaccctgtacctttatttgcgacctttgatgcaatctactcccaccaagtgctcaactgcagaaagccttgcctgaactgtatcatctgcgcaccaaagtgttttcaggctagaatacccccctagaggttatcgcttattttac

SEQ ID NO: 102481 - DNA, 661 bp, Zea mays
  Clone ID: MRT4577_24970C.1
aattcggcacgaggggacactacacaagcgagcgaatgacaagcctatgctaacgatcaaaatgaaaaaataacgccttactactccgacgccgacgccagactaacactaccatctccacaacggcggatgttcgcgcactggcacctatgtctgtgacaatgccgaggcccatgtaaggcatccactgagcatggacattgctgatcaggaaccgctacgagacgcaattacgctgggggggtacgttgctgctgcactagacctgccgccttttgtgacggccaccatggattgtaaggaaacgccgacgactcacgtgctcatggacgacctacacgaacagcaccaccactaggtaaaagaacaggtggaggatgagacgcagtttctaaccagcgtgcagcaacctggctcgcccgatgataagggatacctgctggcaccgtgatgagcgcaacgaccatcgcttcctgcgcaccttgcgcctgccgccgaatgtcaacacctactgtacgcaggccgtgctgaatgaatatgcgctcaccggcacagtgcactaggataaagacggctatgcctacacgttgacaatgaccatcatgagtacgccacaccctgtgggtgaacatcggtatatgcccacccagctgatattttg

SEQ ID NO: 102482 - DNA, 697 bp, Zea mays
  Clone ID: MRT4577_24971C.1
atggtttggccgatgctacccggacggggcaacattgatctcagagtgtcaaggcacatttgacgctgtccgtcagttattgaccgtgccggcaagatctaacagttccagcatcgaaagaaggcagtcaggaggcatcgaacgaaggcagtcaggagccattgaaagaaagcagtctgttgagagcactgggacagcggtcactgataacgggctctcagccgatggacctgggctagagacgaacagttctgctgcaaccaccacctcaccggtagacgacggtgggagtacccatccaccagcgagtaagtagcttggacatccgtttgaatcgtcaaagtccttcatcaaggcctggtttagtcaaccagagaaaaaaatgctgcaaagttatattaatagagaattatttatagttttgttctcagtcttacagtgtacacaagatctcactggatatctgtatctcacttttttttgactcgaacaattaaacttttagctgttcattgctatagtcgatacctagagtttctaacctgaacattcaataatctgattagtacaaaccgtgttcaccatgttgactacacttttgaagtcaaagaactgattcatgagtcatatatgtaatcgacattactggacatatatttctgtctgaatctatccggctctagattaaattgagcag

SEQ ID NO: 102483 - DNA, 544 bp, Zea mays
  Clone ID: MRT4577_24972C.1
gcttatttattatatctggtgtaccaaaatttgttccagcaaatgcggcctcgaggctaggatttcaggatcagaaagtagcactagtgaatgatttgtgccatgatgccgtgctattggttgattttatttccttaaggtgcataacaagtttgcagtgcaaccattaccggctcatgttaaactcgataaagcttaggcaatgtttggtgccactgtctacttgtcaatggtcatgttgtgaattatgatcttttaggtacttgctcacccttcatttggtgtttctttctttctttctgtctttctttcaagtcttcaggttcagcaagtcaagttacatgcttacttttgaaatctatattcgaggtttcagtctccggagaactgatacagtgacgatgcattagtgcctgctgcattatatagttttttctacatttttctacattctttcttataacgtgaactgattcatgtggatgttctgtgcagccctgaacgaagcgttaaccgccgaggtccaacgtctgaaactcgcgac

SEQ ID NO: 102484 - DNA, 112 bp, Zea mays
  Clone ID: MRT4577_24973C.1
gtcgaaattactcttattcgtcgtcccgatactagtgtcgatatctgtggtggcgtgcgacctcatttacgggcataactacatatgccacacaaacagtgtctatgactac

SEQ ID NO: 102485 - DNA, 503 bp, Zea mays
  Clone ID: MRT4577_24974C.1
gggaacaaaaaaagcttttgtttttttttttttaccaaaaatagcttcgccgtaaaacagcaaaaaaatttttcagtttcaggggacctttttagaggcccccaattttgtacattcataaagggcaaatctcccgaaaaagccccattcttgacaccggtctttgtaaaaaaatttcctgtttgattatttgccccctgttactggaacaaatgccaggggttttcgggggaaaaatgctccttgagcttttaaagccttttggggatctccaaaaaaaagggtttaaaactgatttccccaaaccaacatagttaaaccaaatccttcaactcaggggtatgatttttacggaaaaccggacaatgcccatttgccacgtatttaacaacctcataaggttcgtatttggaaaagggggaatcaccttccaccatttcatataaaatcatggcaaaagaaaaaatatcaacttttttggcatatttccggggcttgaaaac

SEQ ID NO: 102486 - DNA, 1121 bp, Zea mays
  Clone ID: MRT4577_24975C.1
cattgggtacctcgaggccggccgggacgcatatcattgaggaaaaaactcacttgttggtttttcatcacaatcattattctcatcatcatctgctagctagctagtccattgatcattagctagcagctaccaagctaagccgacgacgatgacgaccacgttagtgacggtggacataacgcgccgcacggtgctgaaacccccaccaccggcgtcctcccgcggcggcggcggcagcctgtcccggctgacgtccttcgaccgcgcctccaccgacggctacatcccgaccgtcttcgcgtggtacgcgcctgcgccggacaacgaggccatagtggatggcctcctcgctgtggtcgcgaggtacccgcacctgtcggcccgcatgggtgtcgacgaccgcggcaggaagtgcttcctcctcaacgacgccggggtgcttgtcgtggaggccaccgccgacgccgaccttgccgacgcgctggtggctcacgacgtgacggcgcacatcaacgaactgtaccccaaggctgataaggaacgtgaggacgagcctctcttccaggtccagctgacgcggtacacgtgcggcggcctggtgatcggcacggtgtgccaacacctcgtcgccgacgggcagtccatgagctccttctacgcggcctgggccacggccgtgcgcagcgcctcggcagccgatctaccgtcgcccttcaccgaccgcgcggccatcgccgtcccacgcaacccgcccgtgcccaggttcgaccaccggaacatcgagttccgcggcgagcatagcccgagccgcccctacgacgtcctccccatggacaggatcaagaacctcggcatcaacttccgggagcagttcatcgccgacctcaaggcccgcgtgggcggccggtgcaccacgttccagtgccccctggcgcacgtctggaaagaaggtcacggcggcgcgggacctggcgccggaggagttcacgcagataagggtcgccgtgaactgcaggggccgcgccgaccctccggtgcccatggagtacttcggtaacatggtgctgtgggcgttcccgcggatgcaggcccgggagctgctgtcctccagctacgcg

SEQ ID NO: 102487 - DNA, 471 bp, Zea mays
  Clone ID: MRT4577_24976C.1
cctcggggccggccgggccaggtaccaccaatcactgcaccaactctgctgaccatatgcaccaagaagagccaccactattcagccagctatgtctacgtgcctacttctcatgcaggaacaagtctcttacatttacccaatgcgccggagtgaaccccgctgataatttccagtagcaaatactaccaccaggtgcccagctagatacaacaagcctcgctttcttcttgacacaacaaactactgacagccgtcctaccagaagtttgaggttaaccccgcaaccctttcacaactgcaacagtcgctgccctttgacaactggcgctgacaaagccagcagccttctaccaacagcacatcattggcggcgccctcttttagattgcttattagtcgccaatcagatattgaagcccttccggcagatgtattggggcctcctagaaataagaggtgatagcttac

SEQ ID NO: 102488 - DNA, 359 bp, Zea mays
  Clone ID: MRT4577_24977C.1
acgaaatcttttgaggggggtcggggttaaaattttttaccaatgccatatacaaaaagttccgttaataatataaataattgtacatttgtacccataaaattatgcattccactatggataccaaaagagcacatatttttcttctttttgatctccacatgttttttcagtatcaggactgatcatatatgtatatagggttataatactaccatggaagttggtatctggatgcttgcatcaatggattagccaattatgcccacccgtccaaggacccgggggtctacccctgaatttcggacccgtacctgcaagcatacctatttttcctataaagagtcttattccaggtt

SEQ ID NO: 102489 - DNA, 385 bp, Zea mays
  Clone ID: MRT4577_24978C.1
ggcaaaaacacagacggtgctactccgtcgcaccgcgggactactaagccgtggcctgctgacctgcgctggacaagggcctgcacagttctacctcctccgaccgcattgtccgatcccggcgcgttgtcttccaaacgaactttgatgatctcgatggcggaccccttgctcatgccgtgcctaagactgtcgagcacattaagcaacatgctcgcgcttggatgctacaacacaaatcactgcctccggcttgacaacggatgaagaagcacacgctgctgatgggatgtgaggtcgcaccgcacctataagtgacgagcaataaagagatgcggacaaaaagacaggagccgaagctagtactgacaagcatgtgaaggga

SEQ ID NO: 102490 - DNA, 209 bp, Zea mays
  Clone ID: MRT4577_24979C.1
tcccgctcgactccactctcctaccaccgtcactcatcacatcacagctactcgagagagagagagagagaaagatgggtggttcttacaccacctacacttccagcactttcactctatgtacaaccctaaccagatactcaaaataactctacagtctaaccctaacaactgacatggcttacaataccaaactcttatttttcaat

SEQ ID NO: 102491 - DNA, 247 bp, Zea mays
  Clone ID: MRT4577_2497C.1
cggaagattccggggggatccacccggcgtgtgtaacgccggccttggaagaggacaatggggggttttgtacgggccactgtcttacccccacctggtgacaggacgccgcgcggtgggcggcgaacggcgtagacaggcaacttcccgggggcccaccggcttcgggcaccggcccacacctgaatgcgcgtccagagggattcaaagctttctgctgtcggagcaaccagggcagggatgaggg

SEQ ID NO: 102492 - DNA, 360 bp, Zea mays
  unsure (1)..(360): unsure at all n locations
  Clone ID: MRT4577_24980C.1
cccttctacttttcttcccaaaaaccgancaccaccgtcgcgtgatattcataaaaactaaaaaccccccccacaatgcaacaaaataatctcaacaattttgattcccccaacacaactaaacactacttccttacaacctaacaaatgtttcaaatgttctacgaaaactttccaaaacataacatcttcgacaacaaatgtaaactaccacaccgaccacccatatagtttttaaacctaaatttccctcaccaatgcctgctaaaacataacaacaaacatcttgttcccccgggaaaaataatatctctatctctctataacgcattctatcaaatcccccctctctacccagtt

SEQ ID NO: 102493 - DNA, 116 bp, Zea mays
  Clone ID: MRT4577_24981C.1
acacgcggacacgaacgtaggcacacactacatacacgacggcgggtggagcaacatcctagctatcatcacgttatgtagagtccgagtcctcatcacgttaccgttgcgttcga

SEQ ID NO: 102494 - DNA, 681 bp, Zea mays
  unsure (1)..(681): unsure at all n locations
  Clone ID: MRT4577_24982C.1
cccaccacttccagacagaccccctttcccctccctcctcggcctcctcgaccactccgacgcccacagcgcctccggcgagctccacctctccaccggcggcagcgaggggcgagggggctaatactgtaggcggaggaggagccgagccgatggggcagcagtcgctgatctacgcgntcgtggcgcggggcaccgtggtgctggccgagtacaccgagttcaccggcaacttcaccaccatcgccgcccagtgcctgcagaagctccccgccagcaacaacaagttcacctacaactgcgaacagcttgaagagggagtttggaccaaagcttaaagagcacatgcagtactgtgtggnaccaccctgaggaggttagcaagcttgccaaggtgaaggcccaagtctccgaagtcaaaggagttatgatggaaacanttgagaaggttcttgaccgtggtgagaagattgagctgctagttgacaaaactgaaaacctgcgttctcaggcacaggatttcagacagcagggcaccaacgtggcggcgaaagatgtggctccaaaacatgaagatcaagctgatcgtcctgggctcatcatcgcgctgacctcatctcattccctgtcggtgtgccacggcttcaagtgcgcagcnagntgaaggaaggggggcgtgac

SEQ ID NO: 102495 - DNA, 528 bp, Zea mays
  Clone ID: MRT4577_24983C.1
atgggcataggacggtctacggtggcggcggcacggatgggacaagggtgtttatatctaccgaaaatcgacctccatatgatcggttctaaagatcacaccgatgtctccaccaccaacatcatcaagccaaccctggaggcactcctggctgatgaccagcaacccttcgatgacctcgtgaggcgcaaggaggaagaggtgctgcaacaagccgaatggcgcaagaaggcgaaggaaaaaatacctatcacgcttcatggtggatcaccactagaagatcatccgtcaaggatagcatgcgacctgctctggtcaacagataccgcccggctacgtcgtggaacgtctggcatattttaccggaccatccgactcaacattggctcgcgcgcagaccacccaggcaaagccatatatggccgaccgtccaggtataacctcggaccattcggccaggtcacggaccatctgaccccttatgtcagaccgtctagatactcgtacatagaacaaggagctgcatag

SEQ ID NO: 102496 - DNA, 1243 bp, Zea mays
  Clone ID: MRT4577_24984C.1
cctcgaggccggccgggccggggaattccatttcttcctcccctttttcctttccacgccttcccaccactcccagaggacccagacagacccctttcccctccctcctcgaccactccgacgcccacagcgcctccggcgagctccacctctccaccggcggcagcgaggggcgaggggggctaatactgtaggcggaggaggaaccgagccgatggggcagcagtcgctgatctacgcgttcgtggcgcggggcaccgtggtgctggccgagtacaccgagttcaccggcaacttcaccaccatcgccgcccagtgcctgcagaagctccccgccagcaacaacaagttcacctacaactgcgacggccacaccttcaactacctcgtcgaggacggattcacgtactgtgtagttgctgttgaatcagtcgggcgacaaatccccatagctttcctggacagagttaaggaagacttcaccaaaaagtatggaggcgggaaagcagctactgctgcagcgaacagcttgaagagggagtttggaccaaagcttaaagagcacatgcagtactgtgtggaccaccctgaggaggttagcaagcttgctaaggtgaaggcccaagtctctgaagtcaaaggagttatgatggaaaacattgagaaggttcttgaccgtggtgagaagattgagctgctagttgacaaaactgaaaatctgcgttctcaggcacaggatttcagacagcagggcaccaacgtgcggcgaaagatgtggctccaaaacatgaagatcaagctgatcgtcctgggcatcatcatcgcgctgatcctcatcatcatcctgtcggtgtgccacggcttcaagtgcggcagcaagtgaggaggggggcgtgacttacagatggctggtgtgccctggcaccggcgaggagaaagaccatggggagttttgctctttttggtcgtcttgttgttgagtcctgcgctgattattcttggtgatcgtcagagggagttattcctgatgtcggtgttgattgctgttggttgggaagtgacggtgaaccgggggaaggggggagggggttgtgtcgtgtaattttggatgctactgttgtgcatgtatagcttgtctgctaccctgttccatgctgtttgttactccgatgccagtagatgttacgtactactacgtttgctccccagcttgctggcaactcttggataatgctcgttctcc

SEQ ID NO: 102497 - DNA, 233 bp, Zea mays
  Clone ID: MRT4577_24985C.1
gcacgagctcgtcaagcgctgccacaagccggaccgcaaggagttcaccaaggtcgccgcgcggactgcgatcggcttcgtcgtcatgggattcgtcggcttctttgtcaagctcatcttcatccctatcaacaacatcatcgtcggctccggctgattcgtaaacctcagttggcacagtggaaattttatatttgatatggtacagtgctagttttgcataatgttccctg

SEQ ID NO: 102498 - DNA, 448 bp, Zea mays
  Clone ID: MRT4577_24986C.1
ccatgggcgacgtgctgtggaacctcgagtatgcgctgcagctgcaggacgccaacccgcccgagggcggcgacagcgacggcaacagcgacggtgccacggcggagggcggcgccatcgtccccgctggcggtgccgtgcccgacgcgtccaccgccgccgccggggagctcttccagcagctcgccgacatgaaggggaggtgatcgatcgattgcactgtatgtggcatggcaatctgactggctcaactcaacagtcgtatcgtcgtagtggatcactcgtctcgtgcatgtcgtcacatcgatgcatgtattgcacgttgaaaattcgaattctagaacacaaattgaaaagagtggttggtgatcagtacgtgtataagtatatatatatgtataatgtatgtacgtgtaacaactagcactgatcgatacattctttcatc

SEQ ID NO: 102499 - DNA, 930 bp, Zea mays
  Clone ID: MRT4577_24987C.1
cgaaaacatggtttctactagttcctcttacgttctcctcatacatcatttgaaaaaaaaatcagaagatatgttttgccaaatgaattgcaaaacggttcggactcctctaaagaagtcaaagagccgaattaaaggaacatgacccgaaattgttcttcagagaagctaaagccatgccaaaggaagcctaaaacgtagtattggaaaccaaacggctattcatgccatagcgtacggacatgaagtgttttctttttcaagaacatcaattgatcggaaaacattgagaaggttcttgaccgtggtgagaagattgagctgctagttgacaaaactgaaaatctgcgttctcaggcacaggatttcagacagcagggcaccaacgtgcggcgaaagatgtggctccaaaacatgaagatcaagctgatcgtcctgggcatcatcatcgcgctgatcctcatcatcatcctgtcggtgtgccacggcttcaagtgcggcagcaagtgagggggggggggggggggggcgtgacttacagatggctggtgtgccctggcaccggcgaggagaaagaccatggggagttttgctcttttttggtcgtcgtgttgttgagtcctggcgctgattattcttggtgatcgtcagagggagttattcctgatgtcggtgttgattgctgttggttgggaagtgacggtgaaccggggggaggggggaggggttgtgtcgtgtaattttggatgctactgttgtgcatgtatagcttgtgtgctaccctgttccatgctgtttgttactcctatgccagtagatgttacgtactactacttttgatccccagcttgctggcaactcttggataatggtcgttctccacttaccgtttcagttcttcaaaaaaagggcggccgccaccgcggtgga

SEQ ID NO: 102500 - DNA, 1742 bp, Zea mays
  Clone ID: MRT4577_24988C.1
gggaccctcgaggccggccggggtacccggaattcatttcttcctccccttttttccttcccgcgccttcccaccactcccagacagaccccctttcccctccctccttcctcggcctcctcgaccactccgacgcccacagcgcctccggcgagctccacctctccaccggcggcagcgaggggcgagggggctaatactgtaggcggaggaggagccgagccttgccgagccgatggggcagcagtcgctgatctacgcgttcgtggcgcggggcaccgtggtgctggccgagtacaccgagttcaccggcaacttcaccaccatcgccgcccagtgcctgcagaagctccccgccagcaacaacaagttcacctacaactgcgacggccacaccttcaactacctcgtcgaggacggattcacgtactgtgtagttgctgttgaatcagtcgggcgacaaatccccatagctttcctggacagagttaaggaagacttcaccaaaaagtatggaggcgggaaagcagctactgctgcagcgaacagcttgaagagggagtttggaccaaagcttaaagagcacatgcagtactgtgtggaccaccctgaggaggttagcaagcttgccaaggtgaaggcccaagtctccgaagtcaaaggagttatgatggaaaacattgagaaggttcttgaccgtggtgagaagattgagctgctagttgacaaaactgaaaacctgcgttctcaggcacaggatttcagacagcagggcaccaacgtgcggcgaaagatgtggctccaaaacatgaagatcaagctgatcgtcctgggcatcatcatcgcgctgatcctcatcatcatcctgtcggtgtgccacggcttcatcaagggcggcagcaagtgaggaggggggcgtgacttacagatggctggtgtgccctggcaccggcgaggagaaagaccatggggagggagttttgctctttgtggtcgtcgtgttgttgagtcctgcgctgattattcttggtgatcgtcagagggagttattcctgatgtcggtgttgattgctgttggttgggaagtgacggtgaaccgggggaagggggaggggttgtgtcgtgtaattttggatgctactgttgtgcatgtatagcttgtctgctaccctgttccatgctgtttgttactccgatgccagtagatgttacgtactactacgtttgctcccccaatggaagcaagccaatcggcgtacacgtaacttgtgaaaatttaaaaaaaaacccggtttgcaggcacaggatttcagacagcagggcaccaacgtgcggcgaaagatgtggctccaaaacatgaagatcaagctgatcgtcctgggcatcatcatcgcgctgatcctcatcatcatcctgtcggtgtgccacggcttcaagtgcggcagcaagtgaggggggggggggggggggcgtgacttacagatggctggtgtgccctggcaccggcgaggagaaagaccatggggagttttgctcttttttggtcgtcgtgttgttgagtcctggcgctgattattcttggtgatcgtcagagggagttattcctgatgtcggtgttgattgctgttggttgggaagtgacggtgaaccggggggaggggggaggggttgtgtcgtgtaattttggatgctactgttgtgcatgtatagcttgtgtgctaccctgttccatgctgtttgtt

SEQ ID NO: 102501 - DNA, 708 bp, Zea mays
  Clone ID: MRT4577_24989C.1
cggccgggccgggtatatcgcgcgcattgcatctcgtcccgcttgtgtcgtttttgagctgattaatcccgtggtgggtgggctgtgtgacagggtacacgagcagggcgggggatgacgtcgtcggcgtccgcgccggcgtccaatggaccgcgctacgcgccgccggatccaacgctgcccaagccgtggagggggctcatcgacggcaacacggggtacctctacttctggaaccctgagaccaaggttacgcagtacgagcgccccgtcgcggccgtgcccaactccccgccgcagccgcctggctactccaggcccgaggagaggccgagaagcagcacaccttccgagcggagctcggaaaccacggtgagccgcccgcagtatgcacctctctcggataacagggcaaggaatgaccactcggaggctgccagtggaaaccaaatgtcgacagaagcatatcgtgctaagcatgagattaccatcatcggcaacgagtcacctgcaccattcatgacatttcagtccacatgcttcccatcagatattctaagggaggttctgcaagcaggattctctgcaccaactcctatccaagctcagtcatggccaattgctatgaaggggagggatatagtacctgtggcaaagacaggttcaggaaatacactgggctatctcctcccagggtttattcttctg

SEQ ID NO: 102502 - DNA, 187 bp, Zea mays
  Clone ID: MRT4577_2498C.1
caaacaaagtgcatcaaaatttaacactatcaaacaaacggtttaaattgttcttcctattcactcaaatccaattaacaatattatttggatcatctatttcctcctctcctgcgatcccgctgctcccagtttcccacttcaccctccacgcgtcctcatcaccccctccccacactcgcgtcgc

SEQ ID NO: 102503 - DNA, 496 bp, Zea mays
  Clone ID: MRT4577_24990C.1
cattgggaccctcgaggccggccgggaattctccagatgagattatctatgtatagtacctcccttgtcaacatttgaggcactcatcatgtctgaggagaagcacctccaactcctggttaacctccgaaagccactatgaggtagggtgcctcccttgatcctactatcgaaaaaaatgagatgctcatgagcacatggagaaactcgacgatctcgatgtcatcaccgacgcggcgtaagacctgcaagagaaacaccaggacaagaatgacccagacaatcaccactggcgacccggatgagtgatatgtggtgaccgtgcctagccggtctctctcgccgtgttacttaccctacgactatgagaagtctgacgtgaagaaacaagcccccacttgatcgtcacgacctgctgcttcatctgctcttccattctccgtctacgactactgagatgcgcgttcaggatcttgattatgcgatacctgatatt

SEQ ID NO: 102504 - DNA, 2911 bp, Zea mays
  Clone ID: MRT4577_24991C.1
ggtggccatcgtgcatccattgtacgtgattaaaccaagttttgtttgcagcaggctcttcaagtcaacaatccaagtcgtggttcgacctgtttgttgtcttgtacagcctcctgtggtttgaaacagctccctgttttattcattcctcagttgcatgatgtttggcttggttctgtgtaacttaaaaaatcacatcatgagaagcctttttctctttgctataactatattatgacttatccttacacagatctagtattcagataatactcatctctgaagggtatctaccttttgcatcgaagcaaacgcgtggggtccgcctcctcccctactccggccgcagccgccgacgtcgccattcgattctgccgcgccaatcgatagggttcgctcgctcccccctcagggacccaatcccgctccctcctcgcgcacccattgcatctggtcctcgtctcgtcccgctagtgtcgtttttgatctgattgatccgtggtgggtggactgcgtggcagggtccgcgagtggctgggatggcgtcgtcggcgtccgcgccagcgtctacgggcccgcgctacgcgccgccggacccgacgctgcccaagccgtggagggggctaatcgacggcaacacggggtacctctacttctggaacccggagacaaaggttacgcagtacgagcgtcccgtcgctgccgtgcccgccccccaatcgcagccgcctgtctactccaggcccgatgacgggccgagaagcagcgcacctgccgagcagcgctcggaagctgtggtgagccgcccacaatatgtgcctccctccgataacaggacaaggaatgatcactcagagtcaagctctgcatctggagtgaacctttcacaaagtgctctgtccactaatcaagtttctcaggatgccagtgggagccaaatgtcgacagaagcatatcgtgctaagcatgagattactatcatcggcaacgagtcacctgcaccattcatgacatttcagtccacatgcttcccatcagatattctaagggaggttctgcaagcaggattctctgcaccaactcctatccaagctcagtcatggccaattgctatgaagggtcgggatatagtagctgtggcaaagacaggttcaggaaaaacactgggctatcttctcccagggtttattcttctgaagcgcctgcatcataattcaagggaaggtccaacagtattagttttgtctccaaccagggaattggcgacacaaattcaagatgaagcaatcaagtttggcagatcttcaagaatatcttctacttgcttatatggaggtgctccaaaaggccctcagctaagagagttggagcgtggtgctgacattgttgtcgcaactcctgggagattaaatgacattttggaaatgaatagagtgagcctgcaccaagtatcatatcttgtccttgatgaagctgaccgtatgcttgatatgggatttgagccacaaataaggaaaattgtgaaacaaataccaccgaaacggcaaactcttatgtatactgccacatggccaagagaggttagaaaaatagcgtctgatttactggctaacccagttcaagttaacattggaaacactgatcagctggttgcaaataagtcaattactcagcatgtggaagttatcccacatatggagaaatcaagacgacttgatcagatcttgcgttcacaagatcctggatcaaaaagcataatattttgctccactaagaggatgtgtgatcagttggctagaaacctatcacggcagtatggtgcttctgctattcatggtgataaatcacaggctgagagggattctgtgttgaatgacttccgaagcggcaggtgtccagtactcgtagccactgatgtggccgctcgaggcttggacataaaggacatcaggatcgtggttaattatgatttcccaactggtgtggaggactatgtccatcgaattgggagaacaggtagggctggcgcaacaggatctgcctacacattctttggtgaccaggattcaaagtacgcttcagaacttgtgaagattttggagggtgcaaaccaatctgtgccaccacagttgaaagaaatggctcttcgtggaggatatggtggaagatcacgtcgatgggcatcttctgatgactcttatggtagtcagggatatggtgctaaaagatcaactgatagtttcaataacagcagcttcggcaaccaggccgggggtggttcaagctttcactcgagcttcaacactctagtggcaatcagttcggtgatactacaagctttcatggcagtaacatgtccgcaacaatcagacgggggacaatgcgagctttccacccagctccagcaacaatcagtctggggatggtctcagttttcatgaaaggttctatggatcacgtggaagggaccagagcagaacaagcaatgatggattccgtgccaggagcagaagtcctcctggcaagcccgtggaagtttccaactggtgattgcatccactaggtgcaatccaatttttgcgatggtgacgaaaccaagtagaagatggtaccctaacaagttatattatttccttttcttatcctgcttagatccaaggatgtgatggtctgaaccctaacggtctcctgctatcttgatttgacgtctgggagacgcttgattccgtcgcctgtgggttgtaaagcgttaaaacttgactttgctagtgtactcccaatgatataacccaatcctgggtaaacaaacgcatggggatgaattttggacgaaaccatggacaactgatgtgtgtttaatgtcatgtacaatctatgtcgaaggctgttgtaaatcccgcccgcatagttt

SEQ ID NO: 102505 - DNA, 269 bp, Zea mays
  Clone ID: MRT4577_24992C.1
ttccgaacgagggagcacaaccaccggtggtggatctctccggctccctcctccacgccgtctcggtctccctcccatggccgggtacccggctcccggctccggctacccctacgggcccggcgggggcgtacggggccccagcgccgtcctacgggtgctcgaccgagccctgcgacccgccgtacggcgagatgccagccaaggaatgtttgaactagatcttctctacgctctactattacggcggggctgcgcttatatatatg

SEQ ID NO: 102506 - DNA, 2665 bp, Zea mays
  Clone ID: MRT4577_24993C.1
cgaagtctccggccgggaaaaatttccctttttacgcctacttgacccggcagcgttcggtgacgaaaaaaaaaacccaatcgcctccgccccctcccctactccgggcgcagccgccgacgtcgccacgcgcattccgccgcgccaatcgggtacacgagcagggcgggggatgacgtcgtcggcgtccgcgccggcgtccaatggaccgcgctacgcgccgccggatccaacgctgcccaagccgtggagggggctcatcgacggcaacacggggtacctctacttctggaaccctgagaccaaggttacgcagtacgagcgccccgtcgcggccgtgcccaactccccgccgcagccgcctggctactccaggcccgaggagaggccgagaagcagcacaccttccgagcggagctcggaaaccacggtgagccgcccgcagtatgcacctctctcggataacagggcaaggaatgaccactcggagccacattatgcatctggagtgaacctttcacaaagtgctccttccactaatcaagtttctcaggctgccagtggaaaccaaatgtcgacagaagcatatcgtgctaagcatgagattaccatcatcggcaacgagtcacctgcaccattcatgacatttcagtccacatgcttcccatcagatattctaagggaggttctgcaagcaggattctctgcaccaactcctatccaagctcagtcatggccaattgctatgaagggtagggatatagtagctgtggcaaagacaggttcaggaaaaacactgggctatctcctcccagggtttattcttctgaagcgcctgcatcataattcaagggaaggtccaacagtattagttttgtccccaaccagggaattggcaacacaaattcaagatgaagcaatcaagtttggcagatcttcaagaatatcttctacttgcttatatggaggtgctccaaaaggtcctcagctaagggagttggagcgtggtgccgatgttgttgttgcaactcctgggagattgaacgacattttggaaatgaataaagtgagcctgcgccaagtatcatatcttgtccttgatgaagctgaccgtatgcttgatatgggatttgagccacaaataagaaaaattgtgaaacaaataccacctagacggcaaactcttatgtacactgccacatggccaaaagaggttagaaaaatagcgtcggatttactgaataacccagttcaagttaacattggaaacactgatcagctggttgcaaataaatcaattactcagcatgtggaagttatcccacatatggagaaatcaagacgacttgatcagatcttgcgttcacaagatcctggatcaaaaatcataatattttgctccaccaagaggatgtgtgatcagttggctagaaacctatcacggcagtatggtgcttctgctattcatggtgataaatcacaggctgagagggattctgtgttgaatcacttccgaagcggcaggtgtccagtactcgtagccactgatgtggccgctcgaggcttggacataaaggacatcaggatcgtggttaattatgatttcccaactggtgtggaggactatgtccatcgaattgggagaacaggtagggctggcgcaacaggatctgcctacacattctttggtgaccaggattcaaagtacgcttcagaacttgtgaagattttggagggtgcaaaccagtctgtgccaccacaattaaaagaaatggcccttcgtggaggatatggtggaagatcacgtcgatgggcatcttctgatgactcttatggtagtcagggatatggtgctaaaagatcaactgatagtttcaagaacagcagcttcggcaaccaggccgggggtggttcaagctttcactcgagcttccataacagctctagtggcaatcagttcggtgatactacaagctttcatgccagctatggtaacagcagccagaacaatcagacgggtgacaatccgagcttcccacccagctccagcaacaatcagtccggggatggtctcagttttcatgaaaggttctatggatcacgcggaagggacgagagcagatcaaacaatgatggattccgtgctaggagcagaagtcctggcaagcctgtggaagtttccaactggtgattgcatccactaggtgcaatccaatttttgcgatggtgacgaaaccaagtaaaagatggtacctcgacaagttatattttcctcttatcctgcttaaatctaaggatgtcctggaacatcactaacttaggatatgggtgatggtctgatcccaatggacaatggtctcctactttcttgatttgacgcctgagagacgcctgattccataccatatgcctgtggttgtagtttgtaaaatgttaaaaacttgactttgctagtatatttcctaatgctataacccaatcctgggtaaacagacgcatggggatgaattttggacggaaccatggacatttgatgtatgtgtttaatgttgtgtacaatctatgtcgaattctgttgtaagtgccgtccgcatcgttttatatctttgtgcccgttattacaggtcttaaagaatcatgctgcccgttctctctctcctcgtgc

SEQ ID NO: 102507 - DNA, 840 bp, Zea mays
  Clone ID: MRT4577_24994C.1
gtgaccttctccttagctgggatggcggcgccgctgctcttctacgacctcggcctcctcgcgtcctcatcctccggtgatggacgcgatggcaactcctcctcctcccgcctccaactcttagccgccacggcgcgcgctctcgagcttggctatgccggcgtcgctctcgaccaccaccaccgcggcctcctcgccgactcccacgtctgccgcaccgacactttcgcgcccctctcctctctcccgctcccatcctctgccgctctccatcgccgccgcctcgcctctcccgcctccgaggccttccgccagtacacccgcatcaccctctccctcgactccgctgcagccaccgcttcggcgctcgccccctccgccgcccgcctcctccgcacttacgacctcgtcgcagcccgccccctcacccaggccgcattcgatcacctctgtcagacacccctctcagcccaacaccttgatctcatctccatcgatttctcctcccacggtaagatgcccttccgcatcaagccacccatgctcaagctcgccctgcaaaaggggctgcatttcgagatcgcctactccccactcctctctacggacgtcaatgacaagaggaatctcattgctcaagtcaagctattggtggactggaccaaaggaaaaaatctcatcatctcaagcgctgctcatactgcttcccagatcagagggccctatgatgtcatcaacctatctgcttacttacttggcattcccattgaccgagcaaaagctgctatgtccacgagctgcaggtcacttgttttgaggctatgaggaagaaaactttta

SEQ ID NO: 102508 - DNA, 262 bp, Zea mays
  Clone ID: MRT4577_24995C.1
ttttcttcctccaaaccacgtgctagcctttgtggggtttaagctaaacttaattaactggccgtccgctcacaccaacacgactgcgaaaaccacgtccttgccgaccgtaattctctagatggacatgctgctgtcggccgctcccgcaataccgaacaagctcgtgcccaccgcccttcgcaacagctgctcaatctgcatacccttttacacgggccctgtactggggctttaagcgctctagtttcattggctcttt

SEQ ID NO: 102509 - DNA, 804 bp, Zea mays
  Clone ID: MRT4577_24996C.1
cattgggtacctcgaggccgggccgggaattgtgtccgcctcctcccctactccggccgcagccgccgacgtcgccattcgcattctgcggcgccaatcgataggggtcagcgagtggctgggatggcgtcgtcggcgtccgcgccagcgtccacgggcccgcgctacgccccgccggatccgacgctgcccaagccgtggagggggctaatcgacggcaacacggggtacctctacttctggaacccggagacaaaggttacgcagtacgagcgtcccgtcgctgccgtgcccgccccccaatcgcagccgcttgtctactccaggcccgatgatgtgccgagaagcagcgcacctgccgagcagcgctcggaagctgcggtgagccgcccgcaatttgtgcctccctccgataacaggacaaggattgatcactcagagtcaagctctgcatctggagtgaacctttcacaaagtgctctgtccaccaatcaagtttctcagtatgccaatgggagccaaatgtcaacagaagcatatcgtgccaagcatgagattactatcgtcggcaatgaggcacctgcaccattcatgacatttcaatccacaggcttcccatcagagattctaagggaggttctgcaagcaggattctctgcaccaactcctatccaagctcaatcatggccaattgctctaaggggtcgtgatatagtagctgtggcgaagacaggttcaggaaaacactaggctatcttctcccagggtttattcttttgaagccgctgcagcataattcaggga

SEQ ID NO: 102510 - DNA, 663 bp, Zea mays
  unsure (1)..(663): unsure at all n locations
  Clone ID: MRT4577_24997C.1
tcgacccagcgtccggtaaagcaaacgcgccccgcgcctccgccccatctcgcactctgcccggccttttgattcccgcccgtgcttgcctgcggtggtggaggaggagaatagtattatgctaagctaatgccgcggcccctttcgtcggctccagtcccggctcggcgttgctcctcccctccattccctgtcggcctcttgcgctttccggcctcggattctttgtcgtgtgcgccccctccgttgcatctcgctgcttctccttcttcttcgctttgcatctgagttgagctggagcatcgatcccgtccgcctcgtcctccccgacgcggcttcggctggactccaccgcgctctttagttcggtttccccgtcagagcttccaacctgttctactcggtttagattttggagctagagtttccaaagcaaaagctttccttttttttccctccctcccctttgcatttggcatgaggggaaacgctgcggtttcgccccttttctgagcatgctgtccttgaacaaaatgcattttctcaagctatattccagcagcaacagctccaggtaacatgctgctcgctgctgtnggtgggggggggnnggggggggggnnnnnntaaaattgcccttggctgccatttgtgatttttttt

SEQ ID NO: 102511 - DNA, 191 bp, Zea mays
  Clone ID: MRT4577_24998C.1
ctcgcagtcgcacacgaatcgtattctacgattcgaagctctctactgctcgaagccatgcctaagaattacccactcgcgaaccgccaagaccgccggggctccgaaaacgacagctgccagctccaagccctcatcgcccacaacagctgcgtgcccctcatgttacttctcgagggtcactccgcgta

SEQ ID NO: 102512 - DNA, 251 bp, Zea mays
  Clone ID: MRT4577_24999C.1
gaagttggcgtgcagctgggagatgtagactaagttggtcatgatgcagtagctactcaaatgcagtcggcttgtcctggctcttgccctcatcctggttctggaatcctcagttcaaggttatcctacgcagagagccaggtaccaatgggtgcgctgcaatccagacagtaattctgcaaactgccttgaaagaaaaggatcaatgttcgaactatttccaggtgaatccaacaagatcccccgtctga

SEQ ID NO: 102513 - DNA, 857 bp, Zea mays
  Clone ID: MRT4577_2499C.1
gaaagagagatgctaagacataaggtaccgttgactggtctgaagacaccatttcgcgatggatatgttagagatttagccgaggaagttctaaaactggccaagaatggattggaaagaagaggatacaaggaggtcggtttccttagagaggttgacgaagtggtgaggacaggagtgacacctgccgagagacttctgcatctgtacgagacgaagtggcaacgcaacgtagaccatgttttcgagcacttgctatactgatgttgtagatgtaccctagtacaaaaatctcatctttgattcattcaacgccttgagtgggagggcacaggaacacagcttttggttaagttgctgaccgggggaacagctacccggtgctgcgtgcggtgcctacaaataacttcgctcgggacggatcactactctctagggagatggaacaaatcactgtttgtaccggccctttttgtttctgttttccttcagagatggagatgccgtattgaaaataagtccatcttctgtacgatgggaactgtctgttttccccccttctttcctttcagcattgttgggatgtttgtcccgtgttaacatgcaaaatcaattacgtgtacgataaataagctgatggtttgatccggaaaaaacaaaaaacaaagtatacacgcaaacaagaaaaaaaaaaaaaaaaaaagaggatagagggataaaactgaaaaaaaaaaaaatctagctgtaataaaaaaatagatctgtcatctaggggggatccagctgtaataactgattttcagttagagccactttggatgcttaaatttttttttggtggtcccaaaattaaattt

SEQ ID NO: 102514 - DNA, 390 bp, Zea mays
  Clone ID: MRT4577_249C.1
cttcccccccccccccccccccccctctctctttttttttttgggtttttttttttttttttttttttttttttttttttttttttggccataaaacccggggaaccttcaccttcacctttataagggtaaaaaaaggggattaaaaccccggggggccggccaggggaccaccccaacccataccttttttttttcgtcacaaaaaaaaaacacccaacgggacgccattggagccaaagccacagggggggcacgggacgggtataccacgcccgccccccccaaaccaaaaaacacatacccgccggtttaaaccatttttttgggcggcccgcccgggggtaaggcacggggaaacaacgcttacaggaactggatgaggggggg

SEQ ID NO: 102515 - DNA, 169 bp, Zea mays
  Clone ID: MRT4577_24C.1
gacaggagttcgcgtaccggcggtttccgcggcacgtcacggccaagcgcatgcggctgggctagaaagttacctactcgtgccattatgcatggaggcgaagcaacgcccgcgtgctctgccgggagaggaggccttcgcctgcgacaaactgtcgcgaggaggactg

SEQ ID NO: 102516 - DNA, 197 bp, Zea mays
  Clone ID: MRT4577_25000C.1
ggccgcttttttttttttttttttagcagagccaacgacgtgggattcctccattacacactgtagtttgtacggaggagagaggttaacaaccaccacgctgaggaacacatgcgcagcgatccacgaaccatcgggtccaaaggtacttatattgatccctgtgcatcgccctccacgaaccgggggcggcaaag

SEQ ID NO: 102517 - DNA, 496 bp, Zea mays
  Clone ID: MRT4577_25001C.1
gtgatataattgcaccctaatttattgttttgtaatagctaaacagaatacaggcatgaagggatactataatatcaggggccaaaatgaacccacagctaatgatcagtaagtttggtactacaccaaaaaaccgattgcacgctatagcataaagccaattcaagcgaggggaatgaagccaccataattctttggtaatgcactgtttttacaatgtaatttaagatagagtgggagactacacagtcttcaaagccatgagagatacttggggttcacactttcttgaacaggctataatgttccttccacatcagagattggtcagtatcaacttgatgcttgcgaatataagaaaccctattttaatagaggccaaacatattgtaattatatggaagcttaaaatcattgttaacagttatatcaaagagaacaggctgacaaagtcatcttaataattataatacaactgatgctcatgcccagtaag

SEQ ID NO: 102518 - DNA, 496 bp, Zea mays
  Clone ID: MRT4577_25002C.1
attattgagatatttttttattttaaagacagccaaaagtgtgctccgatcaatcaaagagatcgatgcctcttttattgggtgcttagtacaatcaatagaaacctgttgcgcactttgatccattccatgggctactagtttaagggatagaaaccattacacatttgtgacaaatctttccacaactacccaatgatgcaccctgacaaaccattgatatttagaagctggtgaccatcagtggagagacttgttcgtgccctcttaaatttattaggggatcccttattagcttacaccctgggtggatagatagatgaacctggagaatgagtccaagtcttttaaggacttattccaaaggtttatctctagctagcaaagcttaggctgcaataagcttattactagtgcaggtatgagagataaccatgaccatccacagtcgtacactgttcgctactaggtgcctagacttagaaacatatttata

SEQ ID NO: 102519 - DNA, 606 bp, Zea mays
  unsure (1)..(606): unsure at all n locations
  Clone ID: MRT4577_25004C.1
gntatgttntaccaatgaattgtagaaaatctattagctttctaaaagtctaggatcacttgatttggacacctgagactccaattatggatttttgaagtgagtagtcgaattctgtccaaatctagacataatttatgtttacttctgtttgacctttctaaaggtcgaatcttgttgtgatggcaatacaaaagttatagaggacttcataagctttccagaaagtcctagtttatcattttaagatgaatatcttgtgagttatgattaaaagaactgactgttgtactcctgtccaaaatcagcaagtattaagttgatttctggagtcattcttgtttggctaggtaggattagttaattcttgattcttgagtgatgaagacttattacatataactgacagtgttgcaagtactaaagaaggttgttgggggccttcggtttctgaaggtcctcaaatacgtgatttaacgatgtttctggagtataatacatgagcaggtaccttcggacttgagtcaaaatcacagtgtgaagaagcacaagggaaacgaaggatggaacagagccgaagctgtgcgcaagggagcttcgacatga

SEQ ID NO: 102520 - DNA, 263 bp, Zea mays
  Clone ID: MRT4577_25005C.1
tttgcaaaatttcttctttgtttttatgtggggggaaatccgttgatctctctctacactgctacactatgcttttcttgaatttcagggactacaccaagtcagtttaccggagcatgtttagatccggccaagacataagcttagacgattgttcaaaacctgacactgttgaaactgaaacctgctccatggaaaaactggtatagctatccttgactgaaagggacactgcccataaaaaagcctgtcgtgccttgact

SEQ ID NO: 102521 - DNA, 680 bp, Zea mays
  Clone ID: MRT4577_25006C.1
ccggccggggacaactgcaatggcaaacagaactgttattgtggacaataatacatggaataacacgcacattgcaacagttgggactgcaatggcatctccagaaaaagtagcatgggagatcttcaattctttagatgtcaaatatgtgcttgttatctttggagggcttattggctacccaagtgatgatattaataagttcctctggatggttcgaatcggaggtggtgtattccctcaaataaaggaagcagattaccttaaggatggcaactaccgtgttgatgctcatagtaccccaaccatgttgaatttccctcatgtacaagcttttgctatttaccgaattcctcccaaaaattgatggggaaagggctttttttaaaaggggggaaaaaatttttaaaaaggggaaaaaaaaatttttaaaaactttcccctctttttggggaggaggttttcccaacccccccccgtggggggggggggggggttttcaaaccgggaaaccccccaaaaaaaaaaaaggctccggggggggaaccccaaattttttatcccccctttttaaaaaaaaaagtttttttttttgcaaaaaaacggggggggagaaaaaaaaaacccccccccccgaaaaaaaaaaaaaaacaaaaaagagggggggggggggggggggg

SEQ ID NO: 102522 - DNA, 556 bp, Zea mays
  Clone ID: MRT4577_25007C.1
gggtgaaacggggggaaatttttgaaacccgggccggaaaacaaacttgtaaaccgcccccccgggaggggggaaaaaaaggggggggaaaactaacatgggggacggcccgttccttcgacgaaaacctaaaactttaagttttccggggggaccccttttttttttttgttttacccccgaagcccccttttttttcctccggaaaagggcccccaagggggggggttttttttttccccaaaacaaatcaataaataggggagggggggggggaaattcccggagaaacaaaaacaatggggggttggaaaagaaccaaggggccttggggaaccggaaaggaggaggggaggggaacaggggcccaaaacctcccttttttttttttggggtccaaacccctaaccccccggtttaaaaaggggcccccccccccccctattaaaccatggaaaaaaaggccctgttcaaacccaaaatcccccccctgggggcaggggtcttccttgggggggctggggcggttttgtttggggcccccccctggttcccc

SEQ ID NO: 102523 - DNA, 829 bp, Zea mays
  unsure (1)..(829): unsure at all n locations
  Clone ID: MRT4577_25008C.1
aaatgttgctactacaactttataacctctattatgctcagaaacgacattgaaggatataaaatcaacagcaagagctgaataaactattgcccggaagcaacactaaagggtgaaaattttagctgaagagctgaacaaaactatcattgcctgtgaacaattaagcaaggatgacagatccaatagaaagagctgaaatgaactatcatcatcaccccaatctagatttacaataacatatcatagaaaaccctcagcagaatcaggcttcttgggactgttgctagagttcccgtcaatagtggacacggtgaccggaatagtgacagggcttcctgggacatgagtgtttgcaaattcacctttgggttgattatgctctcgctcactttgctctgtcattagaacgctatcatgaacattggccttggatacttcactctcgtggcagctaggattcttctcagctgtatccatgttttcttgcatgtgggctactactgctatttcaccctcgtgatttttctgctcctctatacccgttttagagttacctgctacattagtcatttgacgttcacccgcttgatgctcactctcctgacaagtcatttcaggactttcttgaacgacattctttgtagagtcatctttcatggcgcttccactcttgctcatccgcttcagagatttcaagcaaatcaacttnttcggtttcaccgctctgattggctccctcctgctcagccatcatcctttcctttatcgacttgctagcntcagttgtagtggttgcaaccttgttgtaggctcagtttacccatgc

SEQ ID NO: 102524 - DNA, 742 bp, Zea mays
  Clone ID: MRT4577_25009C.1
cggccgggattggttcctaaaaattggtttttagaactgggggattttaggaatgattgactttctctctctgtctaggttagttccgattatttcggttcggtcccacgctgccagcacacccccttcctcgccagctccaaagccgttccatcttatccattactgtagtacgttaaattaaacagccagatgttgatctgccatcatcgggcaaatcaccgaatacagatgtaaataacagaccccgtcatgtaaagattcttgattccacgatgtgtcattcgacgaccgtactattttttattcttttcaacgtaacaccagtagtgttttgatacacagatagcgtcttctctagctagtacgccgttcggagcgtaaaatatccacctcatggtgcttgctcatccatgcatgcgtatagataaatggactggggttctagtcgtgtgtgtgtatataatatcaataattgtgcacgtgatctggcccacgtcagttgcacaagctaaaagcaacgaagaccattagtcaattgcacaatctaaagcaacaaagaaagtagcggtgtatgtatatataatcatgaattggctgtaagattcccttcgcaccatcgacgtatagtactctctctctcttcctaaataaattaatttctagagtcattcttaaaccgagccttttgcagttacaacttaatttataaaaaagcatgggcgcacaatatacttattta

SEQ ID NO: 102525 - DNA, 485 bp, Zea mays
  Clone ID: MRT4577_2500C.1
gcatctgtacgagacgaagtggcaacgcaacgtcgaccatgttttcgagcacttgctaaactgatgttgtagatgtaccctagtacaaaaatctcatctttgattcattcaacgccttgagtgggagggcacaggaacacagcttttggttaagttgctgaccgggggacaactacccggtgctgcgtgccgtgcctacaaataacttcgctcgggacggatcactactgtgcttggacttcaccacctgtgtgtctctactggagatggaacaaatccctgtttgtaccggcccttttttgtttctgttttccttcaaagatggagatgccgtatggaaaataagtccatcttctgtacgatgggaactgtttgttttccccccttctttcctttcagcattgtttggatgtttgtcccgtgttaacatgcaaaatcaattacgtgttcgataaataaactgatggtttgatccggaacccgcc

SEQ ID NO: 102526 - DNA, 357 bp, Zea mays
  Clone ID: MRT4577_25010C.1
aggtctaggactcgcgggtcgacacaagcctccatgatgagtcttactattcatatcatgtccgaacggaccgacacatggatatcccgccgctgcagggcctgtccgaggtcgaacaactggagccgtagggcatagtgcgcgcgcaccacacgttcaccgggggcgagtcggggactttcaaatggattgtgacgcattccgtcgactcgccactggacgacctgtggcccaacatgctcagcttcagaattccgcaacggtataagcacttcaacttatgttgcaactttcagggcaatgaccgcggcacccttagcagcgtacgctacgtcaacgtcttcaccggcctcccgg

SEQ ID NO: 102527 - DNA, 641 bp, Zea mays
  Clone ID: MRT4577_25011C.1
ctgatgaggatgaccattgatttgttgtgtgaaggtgacaaataattgtctttgatacaaacaggtgcttcgatgcttctagacttcccaagtcactaggatgattagggtattggtacccttcacattcttgagaagcttattgcagtgataaatatatcgatatgaaaattgaatagtatttgttcttcgtcggcctggaaaggtgggagtggatggaaagccacaaggagcgtctgcatatgacatgctatgcagcaaaactgaagtggagctacatcttcagaaatgcctcatcgaggcaccaatgcacttcagagccagaagtgaaatgttgccggtggtgaacaagcaaactttgattttgatctgtgataatcagataacaattttgtatctgctttccaactgagcgagagagggggctatacttgtggacatctgctcaattttgttgtcagaagagaagtaagtctattttatgaaacttccactgtacgatgttggaatggaatatctgtacattactgtcagtcctgtgtgtcgtctaaggatccatgattgctgaataaatgcctggaaagggccacgatcactggtgaacatcacaagaaggtcctcatctgtatgctctttggatc

SEQ ID NO: 102528 - DNA, 1909 bp, Zea mays
  Clone ID: MRT4577_25012C.1
gcccccgcgtccggtgcgggcgcgccgaggtgcgggaccggcagcggcgcgcgatcacggggcggatcctggcgggcctgcgccagcacggcaactacaggctgcgggcgcgcgccgacatcaacgaggtgatcgccgcgctcgcaagggaggccggctgggttgtcctccccgacggcaccactttcccctcttcatcctccttcgccgccgtgggtgcacgggttgctctctcggtggggcggcgaacgttgaggctcacaagccgcaggagtacaactggactggctacaggcgcctcttccagatgatcagggaactcaagctcaagttgcaggtcgttatgtcatttcatgaatgtggtggcaatgttggagacgatatatccattcccctcccacattgggtaatagagattggaaggagcaatccagatatctactttactgacagggcaggaagacgtaatacagagtgcttatcatggggagttgataaagaaagggttttgcaaggcagaacagcagtggaggtatattttgatttcatgagaagcttccgagtagaattcgatgagtattttgaggatgggatcatctcagaaattgagattggactaggggcttgtggagagctgcgatatccatcttatccagcaaaacatggctggaaataccctggcattggagaatttcagtgctatgacaggtacttacagaaaagtttgagaaaggctgcagaagcacgagggcataccatatgggcaagaggacctgacaatgctggccattataattctgaaccaaatctcactggatttttttgtgatggaggagattatgatagctactatggccgttttttcctcagctggtactcccaggcattggtggatcacgcggaccgtgtactgatgttagcaaggctggcttttgagggtacaaacattgctgttaaggtctccggggtgcactggtggtataaaactgccagtcatgctgctgaattgactgccggattttacaacccgtgtaaccgtgatggctatgctccaattgctgcagtattaaagaaatacgatgctgctttgaactttacatgtgttgaattgcgcaccatggaccagcatgaggtataccctgaggcatttgcagatccagagggcctagtatggcaggtgctaaatgctgcgtgggatgctggtatacaagtggctagtgagaacgctctaccttgctatgatagggatggattcaacaagattttggagaatgccaaacctctgaatgacccagacggacggcatttgttaggtttcacctacctaaggcttggcaaagatctgtttgagagacccaacttttttgaatttgagcgcttcatcaagagaatgcatggtgaggcggttcttgatctgcaagtataagattggtagcatattgcatacacgtatacaagtgactgattggctcaggccttatggcttacatttttttcttcttttgctttgtgtttttaggcggtaatatcagctgatttttgagctgttaaatagagaactcgctgctcaatttttaactctagtcttcaagaaggaagacgagttgagttccgtataatcggtgaattcacatccttttgtcgccggcggctccacatgtgccatcatctcatggccatggcgcaatgttatgcagatgtagtgtgaaatccgaaaaacctaggcattctgctcatctccatctccatatcagcgtcaaatgctcaaattttttagttcaagtgactgctgatacgcatggaacaaaacgggaataagtgtctcgatcctactgtcttgcgtgtaatgatgttcaacaatgcagattgtgagtttggatctgttgagcacagaaaaggtgttgagcac

SEQ ID NO: 102529 - DNA, 1516 bp, Zea mays
  Clone ID: MRT4577_25013C.1
gtttgatttcatgagaagcttccgagtagaattcgatgagtattttgaggatgggatcatctcagaaattgagattggactaggggcttgtggagagctgcgatatccatcttatccagcaaaacatggctggaaataccctggcattggagaatttcagtgctatgacaggtacttacagaaaagtttgagaaaggctgcagaagcacgagggcataccatatgggcaagaggacctgacaatgctggccattataattctgaaccaaatctcactggatttttttgtgatggaggagattatgatagctactatggccgttttttcctcagctggtactcccaggcattggtggatcacgcggaccgtgtactgatgttagcaaggctggcttttgagggtacaaacattgctgttaaggtctccggggtgcactggtggtataaaactgccagtcatgctgctgaattgactgccggattttacaacccgtgtaaccgtgatggctatgctccaattgctgcagtattaaagaaatacgatgctgctttgaactttacatgtgttgaattgcgcaccatggaccagcatgaggtataccctgaggcatttgcagatccagagggcctagtatggcaggtatggatccattgttacattgcatgttttgcatttcgtagcaacagcttactagctgatgttttgtattctctagtgagcaaacacatgttactgtttggtaggttttctctgaatgagtggttgacacttagtacaacaccatatgctttttatttaaatttggaatcgatttttcaggtgctaaatgctgcgtgggatgctggtatacaagtggctagtgagaacgctctaccttgctatgatagggatggattcaacaagattttggagaatgccaaacctctgaatgacccagacggacggcatttgttaggtttcacctacctaaggcttggcaaagatctgtttgagagacccaacttttttgaatttgagcgcttcatcaagagaatgcatggtaagatgtactggcaactggagtagtctgacggctagcgcccgttaattccatgttgacctttctcgtgctacatgtttgcaggcggtaatatcagctgatttttgagctgttaaatagagaactcgctgctcaatttttaactctagtcttcaagaaggaagacgagttgagttccgtataatcggtgaattcacatccttttgtcgccggcggctccacatgtgccatcatctcatggccatggcgcaatgttatgcagatgtagtgtgaaatccgaaaaacctaggcattctgctcatctccatctccatatcagcgtcaaatgctcaaattttttagttcaagtgactgctgatacgcatggaacaaaacgggaataagtgtctcgatcctactgtcttgcgtgtaatgatgttcaacaatgcagattgtgagtttggatctgttgagcacagaaaaggtgttgagcacag

SEQ ID NO: 102530 - DNA, 443 bp, Zea mays
  Clone ID: MRT4577_25014C.1
tttttttttttttttttttttttttttttttttttttttttttttttttttttttttttgaacagaataaaagcgagcatatatatagcatgggtgaaaatatggggggaaatcagaaaggcataatgccaggggggcaccataaacaaccatacgttcctttaagggcaaggactcgatgaggcggggatgcttatataccattagcctgggggcatgagaacaaaactttcaggcccccggaataaaactttgggaaaaatcatgcaaggggttggtcgggtagctctcaaaccatgtggattgaaaaagaatggatggggttaaaacccaaacaaggcaaacttcttcattttttccaaactcatccaaaccatgggggttgggaataacccaacaaggcccaaaatgatgcaatgggaacccccatgcctgggccaagc

SEQ ID NO: 102531 - DNA, 790 bp, Zea mays
  Clone ID: MRT4577_25015C.1
ggtgcctctccccctcctctctgcctgcgcgcaccggcttccctccccctcctctctcctccctccgtccgcctccgggagaggccgagagagagggagagagagaggacgcgccggagctacccgcggcagcatcgtcccgtctcgacagctttggcactctgaactgctgatcaagatgccagcactgagaatgaagaggaagtttgatgatgacattttcgcgaatgagtttgacaccaaatccatgaaatcgatgaaaatcttgaattttcaagttgatgagttcgagcaggcatttgtgttgaactcgtcttacaaggaccgtcaggatgagcctgagtcgacaactcaactagctggccaggatattagggttacagaattttctggcttgcatgctgtacttggaggaacatccgttgctctgctgaaggatttaatatctgaaactgttgttccaccaaatttggagcctgattccttatctaataatgatgacggcaaatctcagtcaaatgtagtgaacaccggtgataaagagtttgcagatgaagatgtaaattctgcagcacaggatatctgtgctgtcaataatcatgagaaaagcctgggctcaaacctggattgcagcctgttggatatttataatcctgatgatgcttttcctttcttatttgatgttccaactggtctcctggctagttacagtacattttgtgatgaatttgtacccattgattcattgatagacatgagtggcatatgcggagtatttccacttaatgaa

SEQ ID NO: 102532 - DNA, 668 bp, Zea mays
  Clone ID: MRT4577_25016C.1
gctccttcccctcctctgtgcctgcgcgcaccggctttcctccccctcctctctcctccctccgtccgcctccgggagaggccgagagagagggagagagagaggacgcgccggagctacccgcggcagcatcgtcccgtctcgatctgcgttgtactccttgaccagctatggcttttatcaattcaaagtcagactcatttcaagccttccgtctaaaacagaacttagacagctttggcactctgaactgctgatcaagatgccagcactgagaatgaagaggaagtttgatgatgacattttcgggaatgagtttgacaccaaatccatgaaatcgatgaaaatctcgaattttcaagttgatgagttcgagcaggcatttgtgttgaactcgtcttacaaggaccctcaggatgagcctgagtcgacaactcaactagctggccaggatattagggttacagaattttctggcttgcatgctatacttggaggaacatccgttgctctgctgaaggatttaatatctgaaactgttgttccaccaaatttggagcctgattccttatctaataatgatgacggcaaatctcagtcaaatgtagagaacaccggtgataaagagtttgcagatgaagatgtaaattctgcagcacaagatatct

SEQ ID NO: 102533 - DNA, 1338 bp, Zea mays
  Clone ID: MRT4577_25017C.1
attgggcttgtcgtttatttccccttccgcaaaccaaaatgttggcggctcgccggctgtccgccgccacctctccgctcctcctccgccgcctttccgcacagacccagtccacggcatcgtcggcgcagcccccgccggaggtgaccgattcgggtccgggagtgtgggccggccgcgcggtgacgctctcgctgctgggcctgacgggcgccgtcgcagccagtgctgtcagcgacctctccgtcttcctctcatgctccagccaggcaatagagaaggccacccagaaccagcagatagtcaatgctatcggtaaaccaatcatgcggggaccctggtacagtgcttccattgctgtgaatcacgcgaagcattctgtctcctgcactttcccggtgtcaggaccccaaggaaatggtctgctcaagctcaaagctgtgcgcttgggagatgaatcttggtattcgtatgtgcagcccaccgagtgggagatactgataatggatgccatccttgatgtccatacggaagatggtaagcacacgacaatgcgggtaacaattccagacaacacacctgctccgccaccagcagactgcaccgcgtgcaagtcccatgcagcggagaagtgaatccattgacagatgttctttccacagtttcttacgaaaataatttattcacacatttctgatgcaaccggctattatcggaaaataattccaaaaaaaaaaaaaaaaaagcggccttgcaagattgttttacagttggttggatctataatatttccccccagggtgccttaggaatcggtaagagttattttctgatgctagccagaaatccctaaatcggtaagaataaagtgcttgcaacgatgttggacagttggttggatctataatatttgatccatgtggttcatgcgtcacactttgtctaagattagtcgttcgaattgaagaactaaacttagacagaaacgttagacaaagtgtgacaagttagattaggaatcaaacaggttctagtacctagatagctggggaaaaaaggcttcattgtacgcttcaggactagagtgagcatagctagctcagccatgcgtgctcccgttggcactccccggtgggctgggctccgagccaaacacgtagcgagcccactccccggcctgcgcgtccgcctgcgccatggccgcgcgcacgccttctccgtctgcccacgccgacgcgatcaccgcggcgacgatggccaccacaagcagaggcgccagcagggtgagtagctgcgccgcgtcctccaccgccattggtcgtcgcctcgtgccgaatt

SEQ ID NO: 102534 - DNA, 448 bp, Zea mays
  Clone ID: MRT4577_25018C.1
acgcagagtgtgtgttcagcaaatgagtaaaccacattgccgccgggtccacgagggagaaaggaaacacgagcatcgtttcctccgtcgtcgatagagctctgttcgtctcccctcgtagaaattgccgaccaccgccgcaccttgaagaccgccgtgctgttcgtcgtggtggcccgtctcaggcaacgacgagtacgccggtcgcggcctcaaagacctcccgccaccgctatgacttgaagccctcctccatgccaatcaagattcatggtgaacgacatccataacagagacgggtttgtcctcggaacctcaagaggagggcatgacactacgaaaatcattgattgtcttcaggaccgtgatactaaccagatttatattattgaagatacgatgtgtaacgcaaaattcctgaaacatggttttaggaagtctggtgacc

SEQ ID NO: 102535 - DNA, 1218 bp, Zea mays
  Clone ID: MRT4577_25019C.1
ctgtgcggcgctcgagccggccgggtcgggaaaaaaagcatactgctagttggttcacagagatagatctgacagtttttcatatttttttcttatttctttttttaaaagagagaggcctcgaggccggccgggccgggacggatcggcatcggctacatagaagacagcaacacaagcttagtcgtcctcgtccccccaatcttcagcccttgttcatcaacaaaccacatggccgcgctcggtcctgcttctgttacctccacgggcttggcgctgcacacccctgcgattcctcatcgtcggcgtcgccacgggaatgcagtggcctgtgcgtcgtcgtctcaacaccagcgaagccttaatggcttggcgatgagttcttcaggcacgaacaatgccttgcccatcaaaggaactaccactacacgggttcctgcagtcggtcgttcggtccctgcagcgaatccgtcgccgtcaggagggaacaacctcccggtgcccaagattcctccgtgggtcaagtgggtggctggcgccgtcatatttgcagtgcccatgtacaggaggttcagagctttagaagacaagatagagaagacggcggaggtggcgatcgaggtgatcgacaaggtggcggaggcgacggagaaggtcgccggcgaggtcgccgacgagttccccggcaacgagagcatcaaggaagcagcctccaggatcaagaaggtcatgcacgtggtcgaggaagacgccgacaaggctgaggccctgatcgagaaggtcgacgagataaagaaagatgtggattcgattgtcgatcctataatcggcaaggttgccaaggataaatcgcggagaatgaaccaaaaaggatgacagcagtcggtgaattgaaaggagcgcaaacattgctcggacggaaagggaagcaacaggacgcgtctcgtttcgtctcatgtttatctcgtgccatggcttcctacgtacaaacaggagatgaggcataagactgttcatataatcgtgcaaaacactattttacactgtagattgtgttgtttaacgagagaatttcgaaataagagatgagatgctatgaataagctgttggaggcatcctaaaaacttgtatggtaatcaaaggaagaaattctcctcctaatgatatgagtaaaacatatggctgaatgcaaaaaaaaaaaaaaaaaaggggcggcc

SEQ ID NO: 102536 - DNA, 289 bp, Zea mays
  unsure (1)..(289): unsure at all n locations
  Clone ID: MRT4577_2501C.1
ggaacnnaccggccgacccaacccacccattaatgaaaacggcttcaaaactatttaccctttataccttcaaatcacaagcggcgggtttcccctttttttttttcggtaaaataaccacaccacctaccccaacaacaacatacacagacactacaccttctccctccaccacctgcaaatttctaatccttccttccacacacactcccctacatacttccatacacttcacctcccccccctcgccacaatctacgccactaacgctgactttccactgaaaaac

SEQ ID NO: 102537 - DNA, 557 bp, Zea mays
  unsure (1)..(557): unsure at all n locations
  Clone ID: MRT4577_25020C.1
ttgggttcctcgaggccggccaggaatcttgtgtcatcggcgcttcactggggaactgctacggagaatgatcgctggaggagagcttatggcgagtggggaggcaagcgagtcctctactctgagaaattccacacatatgtgtctggagtgcagtgagaagtatctctttacctggcttgatggtcgtcttcgacaagttgaattctttgactttaccaagaacaagaacctctggacctactgnggaattgcgccgtccgaataatggatcatgcactattgacttttcctggatcaggctctttcttttttttctggctctctgtggaggaatgctaactacatacagaatgtgatcgatataatttcttgagaaagaaaaaacagaaaaaaccgcggacctcgagttccatgttttgatccctatcacgatgctaaactgttggcttggcgaatccatgtgcatgccctgctgctgtgcggaattggaacccgctctgaatgccacacatgtacgatgcggaaggataaagtgataagccggggctgccata

SEQ ID NO: 102538 - DNA, 174 bp, Zea mays
  Clone ID: MRT4577_25021C.1
atttgatctgtaccgcgctgtgcagccatggagagaagcgtcgccaacatcctgctggtgctttcgctcgtggcggccctcgcggtcgccggccgccccgccggtacctccggcgaggtgggagccattcgcctcccgagcgacggcaaaggtcttggtggtgatgcaacagca

SEQ ID NO: 102539 - DNA, 270 bp, Zea mays
  Clone ID: MRT4577_25023C.1
gacattcaaagggaactggattatatagggcgattatattcatgataaccacacataaaaagattataaaaaacaaaattctgacttgagtttaatggattgagttaaaaattggtgcagatacatgagcaaatatatgacatttattctaaaacttattctctaagcgaacaaactcatcctactaattccttgcacctcactggatcagcctactttaggggaccaaacgattcctcggcatcctctttttttattatctggcccgcc

SEQ ID NO: 102540 - DNA, 855 bp, Zea mays
  unsure (1)..(855): unsure at all n locations
  Clone ID: MRT4577_25024C.1
tgggtacctcgaggccggccgggaaaaaaataaaaaaaaaaaacccacgaggcgctgcggcacggaaccagcgccattagaggccacaagcccgcaccacgcctccctcgttctcgcgcgcgcgcacgcatgcacgaggagctgctgcagagaagaggaggcctgtcgatttgattgaactttccaagtaggattccgttggatcatattgtaccacctcgggccagagcgaaccaacggtctgtactattcagattcagaagctggccaagatgactgccggtttccagctcggcgtgatcgggtctctcacgctctccgtcgcgtcgtcggttgccattgtcatctgcaacaaagccctcatcagcaccctaggctttccattcgctacgactctgacaagctggcacctgatggtgaccttctgcaccctccacgtggcgcagcgcctgcgctttttcgagcccaaggcgatcgacgggcagacggtagttctgtttggcttgctcaacgggacctcgattggccttctgaaccttagtttagggttcaactccatcggattctaccagatgacgaagttggccataatacccttcacggtgctgttggagactatattcctgaagaaaagattcagtgagacgatcaagttttctctgctggtcttgctgctcggagttggcatcgcctcagttaccgacctcaagctaaactggcctcgngtccgttctttccggcctcgccatcgncaccacttgtgtcggncaaattctcacgaatacgatacagaggaaagctgaaggtctcgtcaacgcagctcctgtaccagtcagcgccttaccaagcagccat

SEQ ID NO: 102541 - DNA, 654 bp, Zea mays
  unsure (1)..(654): unsure at all n locations
  Clone ID: MRT4577_25026C.1
aagcagtggtaacaacgcagagtactttntttttttttttttttttttttttttttatttttttttttttttttttttttttttttttttttttttttttttttttttttnnaaaaaaatttatttaaaccagtttggaatacccaaaaaaatttttttaaaccaaaagggttttttttttttacaaataataattttccagggtgggccccaatttgttttttttttttttgggacacacttatagtttttccatgctttttggaagttttttttttttggccacggacaagtaaaccccagtggggacaaaccttaggggttcttggtttttttaagcttaaagtattccttaagttgggtttttttgaaggggggttggaaacaacctgaaaaaacctaccttttttggagtatttttttttgttggggaaccagtttgggactttgaactggggggggttggcaatcaaccaaccttggtcttttttaaagaggggtttaagttctttaggggatagtttatcagcccttttttgggctttgggctaatcctcctgaaactggggacaaaagggaaaaaacgtttttttttttaagttgggccttcaataattggaagtttcacgaataattctattggggcttaaaaat

SEQ ID NO: 102542 - DNA, 425 bp, Zea mays
  Clone ID: MRT4577_25027C.1
aaacagaaacaccggggcatccatgagataacacaggggaacagtggcctagcgaatacaaggaacatcttgaactgaacgcccaagttaatcaacagataatccattccccgatgcactaagcccaccaagggggcgacatctcctagcgaatgcacagcaggatgggggtcctacaaggactttttgtcgagaaagggaaccatgcatcgcatgagtcctaacaactattgcttgccagatgagggcacaaaagttattgagctccccctgagaacctgcctggacatggatggacctaatcttgaccatggagccggtgaagacccggaataacaccaccaagatgatcgtcgattacgctgaggatgtgtgtcaagaacgctgattcaaggataagcacggtggcagactgggacaggtcc

SEQ ID NO: 102543 - DNA, 420 bp, Zea mays
  Clone ID: MRT4577_25028C.1
cgaagcttggggaggcgagcactccactccggcatggagtctccaaatacgtgggaggacttacgtggggatattctcaacatccattcaaggaaaatgaacttgatgcgtggattccatctgaaaaagatcgcataaaatatgaatggggccttatgagctgagctcaatgccttatttacagacgctggaatggttgctttccttctgtgaaggaagcactttacccattaggtcttctaaattgctgtgggcatggtgatgaagatcatctctttgatgaacaattgcttgcgcaagctctggaacttgatgcttatgccttgatgtacccaccaccaaccttttattgtctttatattaacagttggacggttttctctcagaccttttgctacctgccttgcatgtcttctttta

SEQ ID NO: 102544 - DNA, 435 bp, Zea mays
  Clone ID: MRT4577_25029C.1
ctgatccttaagcggccgcctttttttttttattcagatgataaacaatggggaggttaaacaaaggcagcatatcaaggtaatccctttcagggaagaacatacggcatcataatcgtaattaagaaagaggacaaaaaaaagacaagggtgcaataaaaacatcccccatgaatgcccaccatgtactctttcccttgctttctcgctcggcgaccgccgcgcgctactgaatgataggcgaaaagagcgacgcggcccaggcgcccgacgcgcgcgacgcgagaccgtgtggggcccggaccgacctcgggcagcccacgggcgcaggcggcacagacgccagccacttttattcatcctaatgcgggcgcgcgcggacgaacgaacaacgagcgagaaagacgcgcgcagcactgctgtgctgctgctact

SEQ ID NO: 102545 - DNA, 508 bp, Zea mays
  Clone ID: MRT4577_2502C.1
attcggctcgagattgtaaagtagaagggtaatctgtaggttaggaaagttttgtgaaatcacctgagtccgtttcttgtaaatcaatgcgtaataaatataatgtatcctgtcttgtcgaccattttacctttactactgggagacagagacagctctattttgaagagcgtcctgaatctgacctaaccccaccagtaaggtcaagagctgactcaaaactttaggatcctcatttgtttatgagacatattcctgtacatagttgttatggaggttcttacactttagcagctggtctttatctgtatcataattcatgagcaacatcggttttatgatgatgagaaccaaaggtgtgatacagctataaatgtatatgtatttccgcaacatttatggatgaaacctgccatcttttcgatacaaattataatctatgctcaaagatttagaaaaaaatgatgagggggattgggttgaaattttatttaagttgaatttcaaa

SEQ ID NO: 102546 - DNA, 337 bp, Zea mays
  unsure (1)..(337): unsure at all n locations
  Clone ID: MRT4577_25030C.1
cgatactnnngacgagagtgccattgtgtaccganncaaggtagagatatcttatgttcacgtgtcgatgaagctccgccgcctcagnngaatcccatagccaatcataatgtctcttaaggaaacgttgcatgccagaaattacgcatgatgcgcatcgatcacaagctggttgactaagttgaagaattattccggtggttgtcgggnncnagttgtgcatgtcaacattttcaagtgattaccgcatgtccacaaaatttttgactggaagtactccatgttaacgcaggggtttgtggagntgtgaaagcatggatgtttaccaaaatattta

SEQ ID NO: 102547 - DNA, 571 bp, Zea mays
  unsure (1)..(571): unsure at all n locations
  Clone ID: MRT4577_25031C.1
cacaagaccgagaagccgccagaggctggcgacgacggaacgcacggcaacggcaacggcaaccacaacgcggagacgatgcgccatccactcatcaccccaccaccaccagcagcaacagcagcagcaggtcgccgcaaggacgacgacggcgacgaagagaaccccaggccgcgcccccaagcggccgcgaaggctcccgtttccgtctcagcgacttctcccgccgacctcgaacagatcggcatcaagctgacgcccagctggacggcgtcgttctcggacatgggcctggagaaagggcggctcttcgtgagccgcctcacgcttgcgccgctgtcgctgagcgacgcgcgggcggcctgcctcgtgaacatggcggcgctggaggtctgctgcgcgtccaggttcggggaccgggccggcgcggccgccgtctgctcctacctcgcgctgttcgcgttcctcatggccgggccggaagacgtgcgcaggctgcgggccctgggactccttcacgggccccgcggcgacggcgacacgctcgcctttttagcgccgncgncgagca

SEQ ID NO: 102548 - DNA, 290 bp, Zea mays
  Clone ID: MRT4577_25032C.1
ctatctcgttaatcacaccaagcgaagcttccttatttacgactttaccaccgtggctaccaagatattagccctccttgcgctttttgccctttttgtgagcgcaacaaatgccttcattattccacaatgctcacttgccacaaagggcattataccacaggggtgcgccagaacatcaatgggctttgaacaccaacctgtgcaagcctacaggctacaacaagcgcttggggggagcgtcttacaaggaccggttcaccaaattggacaacaatccttggcacatt

SEQ ID NO: 102549 - DNA, 1502 bp, Zea mays
  Clone ID: MRT4577_25033C.1
gtctggtgctgccttctccttcaccgacgacgtggatccctccaccgagccgagctttgaccccgtggtggtccgcgtaaagtccgatgttgttgagcagcagatccgctccgcccgggacatgccccgcgagagcgacctcctcttctccgacaccaccaagcagatcaaccccctctatgctgctgtggaccatagcaccaatggtggctccgatctgaccctgagccaggtggcatgccgggcgatcatcctcgacggcacgtccatgccgccgcaggcgtacgagagcatcatcaccgtgttcatcatcgatagttgtggcgtgcgcgggatcattcccggcaccatcctcggcttcctcgtggagaagctacaggagttcgccgccaaggacatcaacgacttcttcctcgagcacaatcctaggatccttccgcctagcagcggcggcgatcttttgggtctgttctcgacgctgttggggcccaagcacgacgaccagtacctccacgccctcgtgcgggagctcctcgacgagacgaggttcatccaggcgctgcacaacagtatcaatcccaatctggtagctatggtgacaattgtaagcacaccttcttccaccttgattgatgctcaagtggtgttcgatgaaatgcagccaaggatgaacgtgaacacaggtgttgctcgtttgaatcctcaaggctcgtttcaatatggatctatcaatctgagccaggtttacaagctggggaatgaaccacatgttatcatcaatgggaagaaacggactacactgtatttccgaccagctactcctcgtagtttgggagctctgtacaacaagaagaatgtcttcacactcgacttccctacaatgccaattgatgggccagtgatcagaacatctgtcattaactccacatacaagaactttttggaaattgtatttcagaacaatgacacatctgtccagacctaccatgtagatggatatgcattctgggttgtaggaatggactatggtgagtggactgagaatagccatggtacttacaacaagtgggatgttgtttctcgttgcacgactcgggcgtttccgggagcatggactgctgtgacgctgtcgcttgacagcccagggttttggaatgtacggacagaagatctggacacatggtatatcaccaaacttacttctgcatcttacatgggtgttgttctattgggtagtagcgccattaaatttctctgcatcatgcgtgggacacaaggtgtcttgattgtggcttcagctttacagattatagttaccttcagtggcctttggcgtaatgttgccaggtatccaagttcactttcagctgctcctttggtggcactagttgtgtttggactgtatgagctagaaattccctcggttaccaaatgtgttgagattggtctacctggcctcatccttcttctgatctttgcaatgtacctgccacatactgttc

SEQ ID NO: 102550 - DNA, 172 bp, Zea mays
  Clone ID: MRT4577_25034C.1
tatgggaaaactcccacacacacgtttgtacaaggtggacgatagggtccgatcaaccaggtcacaaggtggtcctcatccactgcatcatttctatgcacgactatatattgcactaatgctgcctccaattacggtgcttaggtagatcggccactcttcactatgatca

SEQ ID NO: 102551 - DNA, 262 bp, Zea mays
  unsure (1)..(262): unsure at all n locations
  Clone ID: MRT4577_25035C.1
ggacccagcgaccgcatactttgaaagaacataccgacgagggggaagctggaactgngcatgcgactcaaaagtactttgtgaccggggccaaggataatacttggtgctgctatgatattaaaactgggacttgcctttcacagggtgggtaggcttcaggacaagagggatatacatacggcgccagagcacccaggtggggggatccttggaacaggaactactgaagctggtggcaaaatgtgggacgggaaaactt

SEQ ID NO: 102552 - DNA, 344 bp, Zea mays
  Clone ID: MRT4577_25036C.1
attcggctcgagcacaaatctggttgagcaccattttgttgatagcatgcaggacttacccttcaggggggatcttgatgcacggccttgggggactccacctagcagcggtgatttactttaagaaccatttgatgaaagtctaacaggtgcacgctattgggacaaaatgtgcaaccacagatctaatgagaatgacggtttgagtctgcaagacccagagagaatgtctgttgagcctcgagttgcttatcttttcacacatggatgaccgtctcttctcaggcacagtgaatgaaacgtcgctccctctgatagttgcaccatctggggagacgaaaact

SEQ ID NO: 102553 - DNA, 534 bp, Zea mays
  Clone ID: MRT4577_25037C.1
aaaaaaataaattttttttttttttttttttttttttttttttttttttttttttttttttttaacacaaaaccaaaaaatataaataaaaatcaaatccttttttttacaaacacaaacacaaaactctaaaaaggggggagggggaacccctaaaaaaaaaaaccaaaaaccccccccccctttttctttaaaaaaaaaatagcaaacccttaaaaaaaaattttcaaatccaaaataaaacaaaaaaattgaaattcaacaaaaaacaatccattttaacccacaaaaaattccccgaaaaattgttctaaaaccttaaaacccaagggccccaaataaaacaagaaaaaacaacagccccacaaaaaaattttcccaaacaaggccattcttaaatacccacccaaacagttacaaacctttaacccccccaaacttacccacacaattaaccctttgccacccacctcccacaaaaattaaccaaggcattaaactttataggaacatcaaaaaaacccccaaaacctt

SEQ ID NO: 102554 - DNA, 146 bp, Zea mays
  Clone ID: MRT4577_25038C.1
gcacgacgatgtagagctatccgctcttgggatggcccttgcaaccgttgtgaccgtggcggaaattcttcagaaccatggatttttcgttgtaaagaaaatttggaccttttctgttgtaattaatgactaatttagagggcgtt

SEQ ID NO: 102555 - DNA, 195 bp, Zea mays
  unsure (1)..(195): unsure at all n locations
  Clone ID: MRT4577_25039C.1
cccggtgccacccccgtggttggnacggcaagcagtactaccagcatcagcggggctggcgcaggnacggcgngnacggcgaccgagggcgggcgaaggcacctagctcatcaaccgcccacctgtctccgnaccggcaagnnctctacatctnnngcaaggcgctagnngcctggcgaccaaggcgnngtggtt

SEQ ID NO: 102556 - DNA, 687 bp, Zea mays
  Clone ID: MRT4577_2503C.1
ctgtgcggcgctcaggcggcttgggtgcctcgccgactctcggcaaccgctctccacccgcaccagccgagatacctcagtcgccttccgccgccaccgagaatctccacacgccgccaaaatggtcaagacctccgtccttaacgatgcgctcaacgccatcaacaacgccgagaaggctggcaagcgccaggtcctgatccgtccttcctccaaggtcattgtcaagttcctccgcgtcatgcagaagcacggctacattggcgagtttgaggaggtcgacgaccaccgcaacggcaagatcgtcatccagctcatcggccgtatcaacaagaccggtgtcatctccccccgctacaacgtccagctccgcgacatggagaagtgggtcgtcaagctactcccctctcgtcaattcggtttcattgtcctgaccacctccgccggtatcatggaccacgaggaggcccgcaggaagcacgttgccggcaagattctgggtttcttctactaggatgttcgagtatgtggtggagtgggatgcaatatacccgggcttagacaagcaaaataacctgtatttggctaagtggtccatcatgggagcgttcaacgaagaaatgacaaaaaagttgatgaattcgaaaaaaaaaaaagcagaccaaactaagaaaaaaaaaagcgggc

SEQ ID NO: 102557 - DNA, 404 bp, Zea mays
  Clone ID: MRT4577_25040C.1
ccccacaaaaagcgggggggtaaccattattctaaaaaaaccgtttaaaagggaaaccgttacagggacaaacccttgcatcgaaccaacccggggaccggggggtttaaaaagcccaatctccgggggggttaaaaaaccccccccctttggtttagccataaaaaagaaaaaccccaaaggctttttttttttttacccccttttgggggggttaaaaaaaaaacccccccctggggccgggtttttttaaaatgtcgggcaacccgacggtttaagggcaaacccccttggtttggggttcaaatttgcaggcgccccattttttgggaaaaacaacctccctatccttgagggggccttctgcattttttttggtggcccccttaaacaaccgaacccgg

SEQ ID NO: 102558 - DNA, 335 bp, Zea mays
  unsure (1)..(335): unsure at all n locations
  Clone ID: MRT4577_25041C.1
cccacgtttttcgcatttttggacgcgancccctcctgcacccaagggggtctcgtgctccaaatcctggatggccatcctccttaataccttgcctcgcgagtgctctcggagagctacttcgtattgatttatcaggaaatccagctgcttcatgataagcaggctcaaatctgattgctggatacagcatattacgggcttgaaaagagccaggacagggagaaaacaacaaacccgcgttggatcctgtatcgatctggagaaatttctaagtcagcgacatagccgtcaaatggatcggagcggatctgacgcgaccatggctgaaggcc

SEQ ID NO: 102559 - DNA, 392 bp, Zea mays
  Clone ID: MRT4577_25042C.1
taattcggcacgagggcctgaccggaccccgatcccgtcgtggtcccgcgataatcgcggcggacatagcctatgcgccaccccacctgacgtcgtgccgagtcgccctggtttactcgtgctactgctctcgggagctcggatcacatgggctgtctaaggttcgacaatcgccggcgggggtgctgacctcagacgcccgcggttgagtagtacgaggagagatggacgcgttcctgcacaggctctagcggctggacacgtacccagaggtgaacgaaaatctctacgagggcgcgctctgcaaaggcataggagcgctcgaggacagcgaaaatgtgctagagctctaggtgtggggggccgcggggtgtggggtggcgggggggggg

SEQ ID NO: 102560 - DNA, 306 bp, Zea mays
  Clone ID: MRT4577_25043C.1
accaggcgtcaccgcgtatgtataacttttcggccgcttctgtcaagctcttaatggcggtgatctagcacctgccagtggaccgagacccgttcagatcttgcctcaccggctcgctctagctatactgacccttgctaatatcaggttctggaagtggcattaaatcaccattgaaaatggcctaaacagacgattcagcactgcatggactgactctatacttatgcatcttcaactagcatacgtcttactaaaattctctcttgtgaccaacactcactaatactgaatcactcttcttca

SEQ ID NO: 102561 - DNA, 254 bp, Zea mays
  Clone ID: MRT4577_25044C.1
acacaatatttactttttttttttggttcaatacatttttatatatattactttttattttaaaaattttatttacaatcatatagtttgctttcactgattaaagaaaaccaacattgcatggataggacatacgggtcaaaaggagaactaataaaaatacacataccggaaactcccgaaaaaaaaaagggcttgagcataaaacacggaacgatcccaggttccgaaaaaaaaataaactcacaaaatgt

SEQ ID NO: 102562 - DNA, 482 bp, Zea mays
  unsure (1)..(482): unsure at all n locations
  Clone ID: MRT4577_25045C.1
cgtaagncttggncanncctctataagcggcccgcccttttttttattttttttttattttttttttttttttttttttttttttttttttttttttttttttttttttttttttttttttttttttttttttttttttttttttttttttttggaaaaggcccgggcgggggatgtttaaccccatccaggcattaaaacaccccatatggggggggattcctttacacgggggaagggaggggggcaaaaccagatcaaagttttgggtacaggaaccgctccaggggggccaaaggaacaggggggggaaaaaggattttgttcctggaccttggtttttcaaaccgggtccaatttttggggaggcaaaaaaaccttccctttggccccctgaaaaagggcaggccccttttaattcggggttcccttggcgcctttttccaattttttaaagggcccaaagaaggttttttttttgg

SEQ ID NO: 102563 - DNA, 606 bp, Zea mays
  Clone ID: MRT4577_25046C.1
aagaagcgagcgaggggcagaatcaccaatggcggacggtgggctgtccggcggcgcggccgcgttctgggcgacaagagcgctggaggtggtgaagcggaacgactccccggggctgttgtggaagcggatcaagctcaccaccacccgcaagaacaacgccaagaaacgcctaaagcgcctctggcagcctaaggatttcttagacagagttgacgtttcttctctttgaacttgcaaacttcattgctcatatgtgtagaggggtgaaaggttaagaacgaagcagttataagggcttctgctcaagcagaatcatcgtcaacttctaacacggctgccgcatctgagaaacagcagtagcttcatggtttgtggtggagaaactgatatgcagttaaaagatgggcgttgaacttgcataacatgctgaagcctaaaacacatccttccgtatatttttaagagtgtcttgtcagaagtttgaacaagtgcatgcatgtacacatcgactttcttcatcaagaggatattccttgccgccatgggcgtctctgcccctcctgcttacataagcttgtagcatctcttcccatttcatgaaag

SEQ ID NO: 102564 - DNA, 360 bp, Zea mays
  Clone ID: MRT4577_25047C.1
caaggagacggagccgtagtccaactatggctactccaagtgccgctaccagctataccgcgtcctagggggctaggagaaagagcaacttccaccccgtagagcctcgagatgtcttctgcgtgagaaggagaaatcgccgtccgatctccagctgccgaagtcgtcagggtcatccagccaagacacgtgtcgcctcctccgtggtcgtaggcaccgcgaccgacgaccgaggactgtgctccgaccggcactgaaagtctgcgcggtcaggctcactgggacagcgaggagccgtatcatcaatggtggaggaaagtgccctcaccttcgacaagatcacgctccgggccccgcctt

SEQ ID NO: 102565 - DNA, 323 bp, Zea mays
  Clone ID: MRT4577_25048C.1
aaaaaaaaaaaaactttaattttttttttttatattacaacagggccgagcccatttcccaggcctctttattgcagaaccacagcacaaggcaggaagacataagaacaggctcgggcagaaaacgctgggcaagctccaaccacaattacgacgccggggagggcggctgaaaacaccgatactggacggggggcggctcgttccccctccaggtgaagaatccgccggcgaagagggtgacagaggaaaagccagcgagacaaaactcggtcgccggcataaaaaaacaaatgccgtttgggcagccctaaaaagaggaa

SEQ ID NO: 102566 - DNA, 422 bp, Zea mays
  Clone ID: MRT4577_25049C.1
aggaccatattttttccttagattacagaagcaccatatcacatttccaaaagtaaaagcaccgcacccaaaaaaacaaaaaatattccggcgacaaacaaaaaagtggtgaaaacccccaaaacaggccatagacgggaaaaaaaaacaaggcgcaaacaaaaaaaaaaagagaatgccggaaaaaaaaaaaaaaggggggggcacgcacaaaaaacagaagggggggtccgaacaaacaaaaaatattgggggggacgggaacaagcaacaaaaaccgggaaaccggcaagaaagaaaaaaaacccgggggaccaaaaaaaataagttatcccttcaagaaaaaaaaaggtatgcatagggcacaagaggaaggccttgatgtaaacaacaaactctgggggctctggacccaaacaaaa

SEQ ID NO: 102567 - DNA, 587 bp, Zea mays
  unsure (1)..(587): unsure at all n locations
  Clone ID: MRT4577_2504C.1
ggctcttgcctgctccctagtcttcgattttggttctccttgctctaccgacatgacctcgcggataccgagcacggtcctcccacttatgagaggcacgcagaggagtatgtaatctggatagaagatgctgttggtggtagccggcgctgagacggccctcttcttcggtgttgtcggcgccgccgacggcctcgtctgtctgcatgcatgggcgcaatgcgcggaacacggaagagcagcgagctgattggctgctttgggcgtgatgtgttcttgcctgggccgaagcctattgtgctcgccggcatgtttggctggttctgcgtctacttgnttcactgatggaccgcacagtgacttagtagctgggtgtcaatccgcgaagagccaggtccctgagtagccttgacctatggctgctgtctacatttctcctcgcttgcctgatcaccagctgtggtggcagaccgaagggctatgggagactccgcggcatatagattctggtacagtgcacacttttccgagcggtatgtgggcatgatgctaacagtcatggtcgcagaccaccgtcgtgatggcgg

SEQ ID NO: 102568 - DNA, 530 bp, Zea mays
  unsure (1)..(530): unsure at all n locations
  Clone ID: MRT4577_25050C.1
attaggaattccaaanaaactataaaggaagtagagaattcctaatgaagcatcttcttatcagccatccccgcccaactccgacgacgaattaggagtgccccgaggatccttccttcgcttcgacacccttggtatcttccccgatccacaatgaatcccctctgactacccaccgaggtcggggaacggctcgaatgaaaccccgacgcggcagctctcctttctcggcgtcactcacaactaacgacgactggactcactcgatcgctttcggtcaggagcatggaggcgcggggcaggggatatttatacaaaatactactactctcactatcccgaatgcaattctagcacaatatcatggtgtagtatcttatgtttgacaaaatatagataaaaaatcgaatcgctatgtcaccacaattgtattactgtcctgtaccaacatccgtgacaaaaaatagttttatgaggttgtacatgttggaaaattaatatggtctaacaataatttaataatgtagtat

SEQ ID NO: 102569 - DNA, 919 bp, Zea mays
  Clone ID: MRT4577_25051C.1
tttttttttttttttttatatgcggaccacgcagctttatatagacttcataattgtttccaacaacaacataaacatgcatattttaacaacatctttcatatggcacaccaagcatgaacacaaaaacatgccaaattcagactacttgagatatgtcctggagattcgtggtctacccctatcacacgggccgtttgaatccgttcattttaaaggaatttaagtctacttaaagtagttggctatttgtcttagaatttgacatttcaccatttttcaaagcttaaagataagcttctctcaaatttataaggtggctaacactagtacacaaatatattccccataaaactatattatattagtttaatcaatctctgtctaaattacgattattaaattaaaattaaattcaaaggattcaaacggagcctaacggtaattctttcctccgtccgtttcgtggctagaatgcacaacgatattgactctgtagtagtggcagagctaattccagtgtcgtatttgaatgtggtagccatcagggaattctagccccggatttcggactaccttgccacccccaagacttctccacctgtatctagtgacaaggaaatggaggaaaatagacatttgcaacttgctgaagtctgctccaacacaggatcggaggcctcctccgaatgccatgaagtgtcttgacccacggtttatctccggtttatccttgaaccttgtagggttaaagataagaggatctgggtaaatgactgggttcaagtgcactgctggaggacagaccatcactccccatccagctgggaactcgatgtctttcagttccttgtcgttcatgccaggcgcaatattggctaatcggacagtctcgttgtgacctggatgtgatgtcata

SEQ ID NO: 102570 - DNA, 326 bp, Zea mays
  Clone ID: MRT4577_25052C.1
ccgacgcgtgggcagacgcgcgggcggacgcgtgggcggacgcgtgctccgacgcgggggagcgaggcgcgagaaccgagtagccaccggctgatcaccgtctatcagtatccctcggggcgcgcgcgcgctcgagacatgccaaccgatcgccaggccggcagccatggccaagcacggaaagcgcagccacgacgcgcaggcgacgctaccactccaggacaacgagcggcggcaagtacccggccatgacggataacccgcagctgctgagggccctcattcccaaggagtacgtgaccgcagtgcctgcagctgctgctgac

SEQ ID NO: 102571 - DNA, 388 bp, Zea mays
  Clone ID: MRT4577_25053C.1
gaaagaaaattactagggggggtttttttttttttcggtgggggtttttttttttttttaaaaaaaaaaaaggggcctcccctttttttttttaaggcctgggctttttatctcggctttagcaatcccataaattttcagggggtgaaaccaaattttgggggtcactggccgggcccaacaacataaaaaaaccccccctcctttttccgggccttttgaacagctcgggtttcaaaccctaacccaaaaggggtgaaccttcaacccccggttgggggtcatgggctttttattgtttcggggggggcttttttctacaggggcccaaaactttttaagggccggggcccacaagttcaggggccccttcctgttttggggcgcc

SEQ ID NO: 102572 - DNA, 667 bp, Zea mays
  unsure (1)..(667): unsure at all n locations
  Clone ID: MRT4577_25054C.1
ccggtccggacccccggggaagaaggagcagnaggaggaccgagcaggcctaggccctagggtagtcccgtccggtcccctgcggtgcaagtccggccggcgggcgggctgactgcctggcgtcggtagggggcgacggcgatctatatctgtcgatgggctactggtgggaccgcgtcgtgctgccggtgcggcgggcctggctcggcgtcgcgtcccgcttcggggttcgccagaccgggctgtggaggctgcggcaggaggtgagcacgtgcgagtacgaggacgtgcacgtgatgtgggagatgctgagccgtggggcagcaggttccgtctctgccgaggcttctagtgctgttgctgcggtgcggggtactagtgattccgcttcattttggcttctctctctctctcttgttctttggttttcgctgcttgtatgtaccgtcgtcgtccatccctcctggctctgagatgtacttccattcctcctcgtgtatccgtctccgcccgcctgcagatgatataccggggcatgtgaatgaacagagctgatttcggtcgggtaataatcctgtccttgttgctaccataccacctacctacttctcttttgacccttgacgacgaattcatctgtaaacagaggggtagagagtattagtgt

SEQ ID NO: 102573 - DNA, 567 bp, Zea mays
  Clone ID: MRT4577_25055C.1
aaggaaacccccttttttttaatggaaaacaaaaaatttttttttactaggaataaaaaaaaaaacctaatttttttttctttgccggattagggggtaacccaacacttttacagggctccaaacaattggggcaaaaaaaaaatactgggacaaacaaggcccgggggggacctgaaaagttaccttaaacctacccgggcaaaattaaacggttgggggaaaacaaaccccaaaatccctgaaacaaaccctgccgggagcagttttttttttggtggccaaaaaccccccaaaattatccccaggggaaaaaaaaaaaacccggccccaacttttatttggggagcaaaacccctttcatatcccccttcccccttttttttggaaacctgaccccaaggccttttcagtttggggggcaaaaagctcataattttaaggtgtacctttttgggaaccaggccccccttgttccttgttggctgggccatcccctggatcccccggaggacctgcaacaggctccaaaagctgaaattccaactctgccccctccagttttta

SEQ ID NO: 102574 - DNA, 867 bp, Zea mays
  Clone ID: MRT4577_25056C.1
ggaggggaccgaccagagtaccggacacgcagcgagggggaggaagaaggaagcaagagggaggaccgagcaggcctaggccctagggtagtcccgtccggtcccctgcggtgcaagtccggccggcgggcgggctgactgcctggcgtcggtagggggcgacggcgatctatatctgtcgatgggctactggtgggaccgcgtcgtgctgccggtgcggcgggcctggctcggcgtcgcgtcccgcttcggggttcgccagaccgggctgtggaggctgcggcaggaggtgagcacgtgcgagtacgaggacgtgcacgtgatgtgggagatgctgagccgcaccacggcgccggcgcctaggcggcccagccggttcgggccgcagccgcggccgtggggcagcaggttccgtctctgccgaggcttctagtgctgttgctgcggtgcggggtactagtgattccgcttcattttggcttctctctctctctcttgttctttggttttcgctgcttgtatgtaccgtcgtcgtccatccctcctggctctgagatgtacttccattcctcctcgtgtgtatccgtctccacccgcctgctgcagatgatataccggggcatgtgaatgaacagagctgatttcggtcgggtaataatcctgtcctctgtttcgaccataccacctacctacttctcttttgaaccttgacgacgaattcatctgtaaacaaaggggtagagagtattagtgtacgatttcaagattcaaaaaaaaaaagggaggccgcccgccaaaaagaaagctggtccagcaagtaattaagtccgggcaggtgccggcgggcgagccatctatacaatagta

SEQ ID NO: 102575 - DNA, 202 bp, Zea mays
  unsure (1)..(202): unsure at all n locations
  Clone ID: MRT4577_25057C.1
gtactattgagggggatggcggagggcattgcgctgcggggttacatcgccgtcaccttcgacatgcgcgacataggtgggtccacagggcgggtgtcgctcacgtgctccatcaagaacatcgagtgaggtggtgtgctgctgctctaaagaagggaggagaggaagtagcgacaatgtcgccaagaccacctggggngat

SEQ ID NO: 102576 - DNA, 304 bp, Zea mays
  Clone ID: MRT4577_25058C.1
ctgcttttttgtttctactatacaccgggggggggtccaatgtaatataactcctcgcaagtacaacaaaaagaaaataggcagaaaaaggcaagagtaaagtagaagcaaaaatcataatgcatcgcaatatactcaaagagcaagctaaaaaaatatagttgcatttattgaaccttaaaaaattaaggggctttgctcgattatgaaaacatttcaacagaaattatatttatgaacttgacactattgctgcccgtatattgttcaagggtatttactgaaatctttgatttacttgaaa

SEQ ID NO: 102577 - DNA, 617 bp, Zea mays
  Clone ID: MRT4577_25059C.1
gaccgaccagagtaccggacacacagcgaggggggaggaagaaggaagcaagagggaggaccgagcaggcctaggccctagggtagtcccgtccggcgggcgggctgactgcctggcgtcggtagggggcgatatctatatctgtcgatgggctactggtgggaccgcgtcgtgctgccggtgcggcgggcctggctcggcgtcgcgtcccgcttcggggttcgccagaccgggctgtggaggctgcggcaggaggtgagcacgtgcgagtacgaggacgtgcacgtgatgtgggagatgctgagccgcaccacggcgccggcgcctaggcggcccagccggttcgggccgcagccgcggccgtggggcagcaggttccgtctctgccgaggcttctagtgctgttgctgcggtgcggggtactagtgattccgcttcattttggcttctctctctctctcttgttctttggttttcgctgcttgtatgtaccgtcgtcgtccatccctcctggctctgagatgtacttccattcctcctcgtgtatccgtctccgcccgcctgctgcagatgatataccggggcatgtgaatgaacagagctgatttcggtcgggt

SEQ ID NO: 102578 - DNA, 877 bp, Zea mays
  Clone ID: MRT4577_25060C.1
tagaaagtcacagaagaaaaaagtcggcacgggagagaggaccgaccagagtaccggacacacagcgagggggaggaagaaggaagcaagaaggaggaccgagcaggcctaggccctagggtagtcccgtccggtcccctgcggcgcaagtccggccggcgggcgggctgactgcctggcgtcggtagggggcgacggcgatctatatctgtcgatgggctactggtgggaccgcgtcgtgctgccggtgcggcgggcctggctcggcgtcgcgtcccgcttcggggttcgccagaccgggctgtggaggctgcggcaggaggtgagcacgtgcgagtacgaggacgtgcacgtgatgtgggagatgctgagccgcaccacggcgccggcgccggcgccagcgcccaggcggcacagccggttccggccgcagccgcggccgtggggcggcaggttccgtctctgccgaggcttctagtggtagatcaaggccgccgcgcgcgtcagctccgatgatgttgctgcggtgcggggtactagtgattccgcttcattttggcttcttttttctgtctctctctctcttgttctttggttttcgctgcttgtatgtaccgtcggcgtccatccctcctggctctgagatgtacgtacttccattcctcctcgtatatccgtctccatccgcctgcagatgatataccggggcacgtgaatgaacagagctgatttcggtcgggtaattgtggataaaaagaattggttccgatcagtcgcgggctctgagatgtacctccattcctcctcgtgtacccgtctcgaaaaaaaaaaaaaaaaagcggccaaaacaatcaaaaaaggggaaaaaaaaaaaaaa

SEQ ID NO: 102579 - DNA, 389 bp, Zea mays
  Clone ID: MRT4577_25061C.1
attcggctcgagctgaatggcacgtggtctagatgccgaacgagcgggagatcagggataacacaagcctcttgaccgcacaccataacttcttcccaggcgagctgtgactctaaaggctacgtcgcatcccgtctgcctgtccctcacatatcacgccgggtcatagcacatcctatcatcacaggctcatacctaacacctacacatgccagccgtgacattccagttcgcagttgaagccttggactagtctgcaatccactatcgctgtagtggctggctccaactctccaatggaccgattgcagttcacagaagcagtctactcacactttagatcctgccccttctatcggaagccagacgagcggttataggagcacaag

SEQ ID NO: 102580 - DNA, 1405 bp, Zea mays
  Clone ID: MRT4577_25062C.1
gcagaaaggagggagcgctgcaatttatgcttcattgaattggagaatgccaaaaataagcttgcatctcttacaagaagaaaaggggcagttgcaaatgctgcacaagagcttgcgctcgtcttccaggaaatcatgagctgactgacgacatactagacacacagaattagatgggacgttcttccctctgctggcaccgagattggatatcagctgcccatggagcgctaagagctactcagtcttagcgccgtcatcaagctccaaggccacagcagcggtgaagggcattttgctgctgctattcccgcagtctgtacacatgctaacacataatccgtgtcatttgtgaagagaagctgctgccatggacaatggacttcagccacaatattatgtggatgtcgtttcatgggctgccggcgatgctacaggtcccgatcgaatgatgatcagcagatgggaactcgtagttccttgctgtctgcagcacctttctcatgtaccgttagcatgtgcgtgtttgtggttgggttgggttgtttggccgatttactgatcattggcgaatgaagtgagccatgtacatcattttgaagaattaatatcttttcttcttctgagtacctccctttgtcatgcactgcattgagtgaaaatgatatcatgtggtgttgccttgaaccggtttcggtgagtttccattttccctgagtggcaaatatcttcgtgtttgtactgttgttaggcaggcagctggtagtgtggcatgttaaacaacagtaccttacacaaaccattatgcagacaaaaacaaatggcaccctagaccagaggcatgcatgcatgcaagaagtacccgtccttattccaatcatctaggcaattgcatcacagaaactagcttcctcgtcctcgtcggcgggtcctagcaggtagggacacaggacttggtgcacttggcggcgcacttgctgtgcgccgagagcgtgcaggccttgccgcagagcaccttcttcttgtggcactcctccttggtgaggcagctcctgccctgcttctcgccctccttgctgctcccctcctccttggcgtgctcgccgccgcccgacgagctctggtcgtcgccctgcgtggccacgccgccgctcggccacgcctccatcggctgcgcccgcgagaccttgttgcccgcccaggtggacgccaccctcgcgccctccgcgaccagcagtccctcctcctcgaggcgcccctcgtgcagcaacgccggcgcgatggcgccgctggctgtcgcggcgaccgcgagaaggaccgacacggcgaggcagcaggagcgagacatcatggctgcagctagctagcgttttggctcccgtgacgcgtgggcggacgcgtggga

SEQ ID NO: 102581 - DNA, 1577 bp, Zea mays
  unsure (1)..(1577): unsure at all n locations
  Clone ID: MRT4577_25063C.1
ngaaaaatttcaccccccaacgcgccgcgggttgaaactaaaacccccctccctccccctcgtcctcctcacaaatcccaccccaaaaaaaaacgcctcccggttgctcgcctctatccgcattgaaaatctttgaaagaggtttcgatcccgaaaccgccaagggcccgccccgcaagtgcatggcagtgaacttcctggccaatgagttgtcggacctgtgcatcggcaagccggccgtgaggtcgctcccgctctccgccgccaccggcgaccttgccgccgccctccggagggtgtcccgctctggcgccgcagcctgcgtcgcggtgaccggaccagcgcgcgccgtcgtcggccgggtcggcctcgcggacgtgctctgcttcctctgcaccgaccccgaggcgctcgcgcgccccgccgcggtgttctccaagccggtctccgcgctcctgcctaaggacggcgccggagaggtccgccgcgtcgatccccgctccagtatcttggaggcccttgatgcggttctgagcggggcgcaggtgctggccgtcccactccgcgctggcgggcgcaagaagcagctcgttggcgccgccgacgacggcgacttctgctggctcacgcaggaggacctcgtgcgctacttcctcaactacatctgcctcgtctacaatgtggccgcgcgctccgtgtcctccctcgggctcgtgcgcgccgacttcctctcggtgcgccccggcgaggcggccctgtcggccgtgcccctcatccgccgcgccgtcgccacggagacggcggtcgccgtggtcaccgaagacggccacctgctcggcgagatctcccccgccctcctcgcggcctgcgacgagacggcggcggcagccatcgccacgctctcggccgccgacctcatggcctacgtcgaccacttcgggtcgccgccggagcacatcctgcgcgccgtcaaggccgggctgaaggacaagggcctggacgccttgcttgcgctggttgaggacgagacgctgtcgtcgttctcgtccctctcctgcgtcctcctcgtccgacgaggaggcaggccgggcgcagctgaggcgcccgtcgtcggggagctacgggcggcgggcggctgacgagccggtggtgtgcagccccgcgagctcactggtggccgtcttggtgcaggccctcgcgcacagggtgagctacgtctgggtcctcgacgaggacaacgactgccgcctcgccggcatcgtcacgttcgcggacgtgctgagggtgttccgggagcagctgctgtgaggtctgacgagtgcttactgtttcctggctcccatcttgtggtgtcatggaattgagaagaatatgagctcttgtttctgaaacatttttatttgaagagtatgtgtttgcttgcttggtagccagttcagaattcagatgaacagctttgacattggtgcgttttcattaaatttcttcctattaataaggcagcactgtggcttgatgcggtaggttgtttgtgcttaaaactgtatcttgataaccgaaaaaattaatcattcttg

SEQ ID NO: 102582 - DNA, 687 bp, Zea mays
  Clone ID: MRT4577_25064C.1
actgttgtggtggccggctcggttgtgggatgtatttttggttgaagcaaaaatcccctctcccccttctcgtcctcctcccgactcccacccaaaaaaaaaaaaaaaaacttcgaaggaggtttcgatcgcgaaaccgcccagggcccgccccgcaagtgcatggcagtgagcttcctggccaatgaggtgtcggacctgtgcatcggcaagccggccgtgaggtcgctcccgctctccgccgccgccggcgaccttgccgccgcgctccggagggtggcccgctctggcgcaccatcctgcgtcgcggtgactggaccagcgcgcgccgtcgtcggccgggtcggcctcgcggacgtgctctgcttcctgtgcaccgaccccgaagcgctcgcgcgccccgccgtcgtgttctccaagccggtctccgcgctcctgccgaaggacggcgctggagaggtccgccgcgtcgatccccgctcgagtatcttggaggcgcttgatgcggttctgagcggggcgcaggtgctcgccgtcccgctacgcgctggctggcgcaagaagcaactcggcggcggcggaggctccgctgccgccggcgacttctgctggctcacgcaggaggacctcgtgcgctacttcctcaactccatcggcctcttctaccatgtggccgcgcgctcgtgt

SEQ ID NO: 102583 - DNA, 458 bp, Zea mays
  Clone ID: MRT4577_25065C.1
attcagggtggtccagataaacttattcgaacacactgggtgtttgggccacacacacactcacacagtttgctcattttgttctgaacgaaatgccgggggggggcacagcagccggccgagggggagagaaacaggccctcctgccttccttgttttttggggggaaaaaaaacaggctccgccttgtttcccccgacaacaagactaaaaacccaagctgaaaacggttagctatggggtttgtttgggtccttttccaagaggggactaactgaccacaggcagggtttgggtttggggtccagttctacatacagctcccttggtgtcaagcgggtgcgcgctgttcctgaacacctgcgtcacttgggtggccccagtccggcctgatcgcctggacccttacgtccctgtttgcccccgtgcggggggcccggcccggttttagtgttttt

SEQ ID NO: 102584 - DNA, 562 bp, Zea mays
  Clone ID: MRT4577_25066C.1
ggccgcttttttttttttttttttgctttttttttttctttttttttttttttttttttttttttttttttttttttttttttttttttatcttccttttttatttttatccttttttccatatccaaattttccatgttttaaatattctttttaattacaccaccaaaaccactaataaatttgggggaagacctccccccaaaagaaagacaaaaccgccaataaaaaggaaagcggccacccaaagcgaaaacatcccagggggtgaaagaaggaaagaagagacaacaacgcaaattttcaaaagaaccataaaaaagggggttatcacagaaaccacaacaagagaaaaaaaggcgaaacccccccaacgggggaaacaaatttccaccgggcgccaaacggggggcaaaaaaccctgttcggggcccccccaaagaagagcttatcccaaggagaacccgaagcccaaacacctttatttctttcttcgaaaccaaaaaggggaggaccaaaaaaacccttcgcaccgccacacacaggagggcggccccccaac

SEQ ID NO: 102585 - DNA, 258 bp, Zea mays
  Clone ID: MRT4577_25067C.1
tgaaattttgtatccttattgccatggttgaacctgtataaagtagagcaatctgagtgaaacaacaaatccaagcacaccactacaacgaaaaagacaagaacagagacgaaaaactaccgacttcaaaaaagaaccgagcgacgatgcacaagacggctttgaaccccaaaccagcgcagatgcccgggagtccgtgaaacggtccccgaccgcgtgctgtagctgagcccactgtccggcaagccaccgagctac

SEQ ID NO: 102586 - DNA, 395 bp, Zea mays
  Clone ID: MRT4577_25068C.1
ggccgcttttttttttttttttttaaggggagggagtggacactgcatccctacattaaattgaagggcaaattcggaaaagacaaaatctccggctgtcacgcgggagtaccacaacacaccctatgaccacgtgcagcagacccatgccaccccctaaaacggcagcaccgaaagttaacggaggagggggggcggccaaaacaacagttgacaaaacaccgctacgtgacagcagaatttgttcgccctaaacttcccaccatggctcagaaccggatgttcatctccagtgagcgaaccactcatcatccggcaccattactgtatcatctaagcaccgccggctccaaaaccaccatgagccccacaggccctgccacggccacggcccc

SEQ ID NO: 102587 - DNA, 1867 bp, Zea mays
  Clone ID: MRT4577_25069C.1
accctcgggctcggccggtatattatatgcttgccagtcatggctttggagctctttggtacattctttccatccagcgagaagacacctgttggagacaagcatgtatcaatcagactggctgtgatcctacatctttgtactgcgggtatcattcacttgcaaataattctttcttacaaaatgcgtgcccaacaaatagcactgccaatccagaccctatatttggaatctttctaccagctctccaaaatgtttcacaatcgacgagtttctttgaaaaactattctattgcttttggtgggggctacaaaatctaagttcccttggccagaacatgaaaacaagcactaatacattggagaatctgtttgctgtttttgtctcgacatcgggtttggttctatttgcactacttattggtaatgtgcagacctatttacagtcagcttctgtgcgtatcgaagaaatgagagtgaaaaggcgtgatacagagcagtggatggcacataggctactccctgagaatctaaaggatcggattatgcgccacgaacaatataggtggcaagaaacaagaggggttgacgaagagggccttcttaaaaatcttccaaaggatcttagaagagagataaagagacatctttgtttgtcacttctcatgaaggttccaatgtttgaaaacatggatgaacagctgttggatgccatgtgtgatcgtctaaagcctatgctctacacagaaggaagctgcatcattcgcgaaggtgatccagtgaatgaaatgctcttcatcatgagaggaacactagagagtaccacaacaaatggtgggcaaactggtttcttcaactctaatgttctaaaaggtggagacttctgtggtgaagagctcctcacgtgggcccttgaccccacttcagcttcaaatcttcctggctcaactaggacagtgaagacgttgtctgaagtcgaagcttttgctctgagggctgacgacttgaagtttgttgccacacaatttaggaggctccacagcaaacaacttcagcataccttccggttttactcacagcaatggaggacctgggctgcttgcttcatacaggcagcttggcacagatactgtaggaagaagctggaagaggctttatatgagaaggagaagaggttacaagcagcaattgtaagtgatggcactacttcgctcagtctcggtgcagcgctctatgcttcacgttttgctggcaacatgatgcggatcttacggagaaatgccaccagaaaggcccgtttgcaggaaagagtacctgcaagactgttgcaaaagccagcagaacccaacttcttcgctgaagatagctgaacttgtaccctgtagcaagcagggattcatggtccaaccggtgaagtttgtgcagaagttaagattggatgctgtagatagacagatcaggtgctctaaagccgtctggtttaaatcacctaattcgcgaaaaggcctggtccgagttagattctccgttgaaataaatttgaagctgacgttaaaaaaaaatccgcttttgctccacgttaaattctggcttccatagtggtcggactagggtgctgagataagggtattgagattttttagatctgtgtgaaaagattttctgtaacgtaatatctgaaggctgtcttatcctctgtaggttattttaaaaaaaacacgtatatttcgattgtatacaggtttcatgtattataaacactctaatttaccttgtgcatttgaaaaaagagagaagatgctgtgaatataatcgattaattgtttaccgcggaagagacacaaagaaagaaatattcccgcccccc

SEQ ID NO: 102588 - DNA, 436 bp, Zea mays
  Clone ID: MRT4577_2506C.1
ccccttttaataatgcccacagaggaggctaggcagtctataagaaccggaacatgggtacaggagccggcctcaagcacagtgcacggattatgtgtcccaggtagaggctacaccagaccaactggactatagacccagtcgcgcccatacacacgagggttgatgcgaacaacactatcagtgcgtacttcaggcacatttgcctgctgaagatgggccaacatatcggagtccttgacattcgctctataaggaagacctgctgggcctcatgcaggagcaatgggaaaacatagatgaagagcttctcgatcttcccatgaagccaatttaggttgacgcactgaccatgacaccagaacctgtggcacgagccgattggccttggagatgcctcaggactgaataatctgcaatggaacgctgatctgtg

SEQ ID NO: 102589 - DNA, 517 bp, Zea mays
  Clone ID: MRT4577_25070C.1
gggtaccggcgccctctctcgagtttttttttttttttttttttgttttttctttattttttttttttttcttatgattaattttatttcatttttctttttggagtaacagcatccatcgatccacagaacatgcatggttgatgcatgggactgctggagccgaggatgaacacagcactaacaactgtttcttagcgaccttgcagtgaaaaacacacatggccaacatcaaacgagacgaacgaagataaaccctctggactagggtaaacattacggcagcgaacaggataacttgttcgggcggtccccaacggtcagttgctacagttaccgtcggatttgccgaagccgccgacacggatgccaccggcgtatccctatcaccaccaccggggccaccgcctccaccgtagtcgacgccgcctcctccgcagtcgccgggggcatcaccccacccgtcaccggggtattcgaaatttgcactgtcccctgtggagccgcccccggcgcc

SEQ ID NO: 102590 - DNA, 583 bp, Zea mays
  Clone ID: MRT4577_25071C.1
agaccctgctaggtcaccttggtagtgattaatggggaggctagaaccccgggtagaacgggaatcacgacttgtgggtaaagtgtgcgacctctgcagagtgttagaaactgatatatcagccgtgctcacggttaagagtggccttgggatcctctttgattagaagaactttggttacttttatgatgattaatgatgattcatctgacaaatactaatgtagtgtttattccaggttatagttttgtgctgatgacgatggtgttaagtgccggtgggctcggccttcttataagaacaacgagcagtctgaggttcccgagtgtgttgctggagaccttcctgagcaacatccaggtgaaggcaagtgtcctctgacctattatgtcctacatactttatgattcactgtcccgcattacattacttaacctaaggattgactagtctatatttaccttatccttgtttaccttttaggttatcatggttagcattttgctattgccttaacttaatcaatgaacatgatgtgattatttatgatacgattatgttatcctaatgatgatattgtgat

SEQ ID NO: 102591 - DNA, 511 bp, Zea mays
  Clone ID: MRT4577_25072C.1
gagtttttttttttttttttttcaaaaaggtatcggtcaaatatttgcatctgaaattgtcagatgaaagcaaaaggagagtggctgcggttgcagcaacagagtccttgttcaaagcaacaataaaaaaaattaggttttagagcagagccttcagaatgctgttgttcagtttcagatgaatcttcacaaatctctgggaaccgtcaccgttaggcggtatcacccataactatatacatcagttttcttttcggaaggaccaagcacattcagctaactacacatcaccattggagcaagtattatgtacagttccatttcttggttctgtttgcaaattggtgtaaggtgaacaaaaaacaaacaagagatctggtacaacaaactgtgcagctgcgcgtgcagaattgttttgtcgaaagcctttgtcttcttaagaagttgcggttgatttctcgggtagccgacagtataaagaaacctggcttattacaggacgtcagtgctg

SEQ ID NO: 102592 - DNA, 1727 bp, Zea mays
  Clone ID: MRT4577_25073C.1
aatccattgtcactcgattgttaaaagctccagcaaatgttggcacccgaagcgtgggagcaactgatgcagccacagcttccgatgagaggataactgtactggtcattggtggcggaggcagggagcatgctctttgttatgccttgaaccattccccatcatgtgctgcagttctatgtgcccctggcaatgctggtattgctcagtcccgggatgcaacatgtatcccagatttggacatctcgagtagtgatgatgttatctcattctgccgcaagaggggagtgggaatggttgtagtgggtcctgaagcccctcttgtcgcgggtcttgtgaatgaccttgtcaaagttgggataccaacctttggcccttcatcagaggctgcagcattagaaggatcaaaggacttcatgaagaagttgtgtgataagtacaacatccctacagccaagtatcgcacattcacggacgctgtggaagctaaaaaatatgttaaaaatgaaggagcccctatcgttgttaaagctgatggactggctgctggaaagggtgtggttgtcgcaatgactttggatgaggcgttcgaagccatagattctatgttggttgaaggctcattcggttctgctggttcactggttatcatcgaagaatttctagagggtgaagaagcctctttctttgcattggtagatggcacaaatgctttacctcttgaatcagcacaggatcacaaaagagttggtgatggtgatgttggcccaaataccggtggtatgggtgcatactcccctgctccaatagtgacagatgagctcaaacgcactgtaatggaaagtataattatccctactgttaaaggaatgtcaaccgaaggttgcaagtttgttggtgtattatatgctgggcttatgatcgagaagaagtctgggctgcctaagcttattgagtacaatgtaagatttggtgacccagaatgccaggttctgatgatgcgattagaatctgatttggcacaagttctgttatctgcttgccagggagagttaggcaatgtttcactaacctggtcacccgaaatggcaatggtggttgtgatggcaagccagggatacccgggcccttataaaaaggggaccgtgataaaaaacgtggacaaggctgagcaggtgtctccggctgtcaagatattccatgctgggacagcactagatggagacggcaaccttgttgccgttggagggcgagttcttggtgtcactgccaagggcaaggacattgaagaagcaagggcaagagcatatggtgcggtagacgctgtcgagtggccagaagggttcttcaggcacgacattggttggagagcactgaggcagaagcaagcggcaaaataggtagcagctacccatgaccacgagattttcctagactaccacaactacggtgagcttgtagtgtttgcaagtaataaaaagggaaacggtgtaacgttcactgatttttttttggttgtggaacagcaggttgttcaaattttaacacctgcggatttcagcatgatttggtagatgtttgaaccgagattattatgttcagagtctagacaagcgctagcgtgaaaacagcgccatctgaattctgaccatttgtctttcagttctcggatgagtggacctcctatatgactgtgatatcataaaaaaaaaaaaaaaaaagcggcc

SEQ ID NO: 102593 - DNA, 450 bp, Zea mays
  Clone ID: MRT4577_25074C.1
ggcatcatatcatatatatattatccatgatagggtttgaggcaaaccccacgggttgcttattcaccaaggtgaaaaataaaatccacttatcccagtatcgtgcatccaatattaacccgaatccttccaaccttaacgcaaaaaataaccggaggttaaaacccactaaaccaaccggggtggaaagggtaacttgcttcaagtgcaaaaggtttcattaatccctggttacacaaataaattagacacgggcttatggttacaattgtcttagaagctcgtactaaacacacctgcaatactagaactgcggtgaccttaatgactccggctttgatcacctccgggagtaaggataattccattgatcggaccgctcagagtactaccttatggaaaaatgatgatgatgatgctgccctcaaaaagtttggggttgtgggcatt

SEQ ID NO: 102594 - DNA, 250 bp, Zea mays
  Clone ID: MRT4577_25075C.1
attcggctcgaggtcaccagcttggcattgacaaggctgctccaaagaaaatattggatcttatgaatgttgagaacatcacaagggagaacgttgcaagtcatctgcagaagtatcggctgtatctgaaaagactcagcgcagatccaagccaagcgacgagttcgataatatgaacatctcaatatatcgaaccatggaagagcatgtgactatacgccttcaagcagtacaatgcatatgggagata

SEQ ID NO: 102595 - DNA, 345 bp, Zea mays
  Clone ID: MRT4577_25076C.1
ctccaagtgatctccttccaccttggccgatcgcccgttgccaccggccgggcgatcctcgtacttccacttccaccatggcctcctcctcctcttcctcctcctcctacatggcctacagcgactcgtgcaggctcaagctccaggtgctcatgtcgtagcgaaacttcccgttcatcacgcacaagatcaacgggcatactcagcaagtgcctacggacagactggggcaccccggcgacacccacgacgatttaaccggctccatgccccatagacagcgccgctacgctgtcttttattgagatttcaacaccgacgttaactggcagaaaagtaagatct

SEQ ID NO: 102596 - DNA, 263 bp, Zea mays
  Clone ID: MRT4577_25077C.1
ggggttggttttttttttttttttttttttttttttttttttttgggggcccaaacaccaggttttgggcattcaaaattacagcccccaagggggacaaaacaaaatttaaaaccacacggggcactggactggaaacccaatctggtgcattattttacaacccagggtcgaatacacggggacccgtccaggttccaatccaggtccagggccaggaacacaacgcaacaaggggaattccgggggacccccaaagggcc

SEQ ID NO: 102597 - DNA, 291 bp, Zea mays
  Clone ID: MRT4577_25078C.1
cagcattatacacaacaacctcaggattatatggtttctcttcatgatcagcttcttgacactggcatacacatgatctgcagatctgatcactgtgttgttgacagatacttatcagtgaaggaaatgtatggatgtattctattaactgaatcagcatcaagcaaagcagggatagcactgccaagagatgtggctctcttttctgaccaggttgcaacagacacgacagatgttttaaaaaggtttctaaggaactgtgatggaacaaattcggaagctatcccacgg

SEQ ID NO: 102598 - DNA, 722 bp, Zea mays
  Clone ID: MRT4577_25079C.1
ggctcgactgctcagctctagcctccactccaagcaccggagtccgagagcccgcctgcagtgatggcggccaagcacctcaacctcttcgccgcggcgctgctcctcctcctcctcccctccggctccagcgccaccgccgtcgagtactgcaaaaaggggtgggactacccagtgaaggtgagcagcgtggaggtcgtccccgatcccgtcgtcaggggacagccggccaccttcaagatttccgcctccacaggcattggatgttggagaggaaactagcagatgcagatgtatctgaagaagagcaaaacaatatactgaaagatttagaaaaaaaggaggcggaatacatgcgcctacgaaggcataaaatgggcgttgatgactttgaattgctcaccattattgggagaggtgcatttggggaggtgagactttgtagagaaaaaactacatccaatgtgtatgcaatgaaaaagcttaagaagtctaaaatgttacgaacagggcaggtattccatgatgtttactcctgccaggagactatgtatccctccaaaaaaaaaagttgtcactgttttattgttttgcttccatgtactatttagcttccagagatgcatgtatatatatatctcaagaactgctactagagcactaaaatgttgaaaacaattattatggtggtggacataatacatctaaagacatgttcatcc

SEQ ID NO: 102599 - DNA, 576 bp, Zea mays
  Clone ID: MRT4577_2507C.1
ttttatcttttttttttcaaccaaaacagagcagcagtggcttatcttattgaacagtttttttctctctctctctctgcggcggcttttcttataagaaaaaaaatatttggtaaaactgtgtgtttagaagaagaaaaaaatgatatcttcagaatcagaaccagacaacgcctcaaggactgactaaacccttggcaatctccaccaggagaacgatctccatccagcatccaacgcggtgctttgaagagaaggcagtggacactggtgagtttgtgacttgttgttggtgcacgtgaagagaactttttttttcacccttcgttggacatcgtccccgatccacttctgcggccatatctccggttattattaacagaatggccatcgcacgatttgccaggacgttctgtgctgtgccacattgcgttcgcgcatgaaccgcgcatcaaccgtaaccggcgcatcgcgtccgcaggaagcctcgtctcctgccatggcctcgtgtgacgtagcgtaaccagccggcgacgaacatgttcagtccatcaggagacgaggacgtggagcgag

SEQ ID NO: 102600 - DNA, 444 bp, Zea mays
  Clone ID: MRT4577_25080C.1
ggaagaaaaattgtgtacggtttaatacgtattagatgcagaggtctaaatttaaaactcaaagcttgcatcctctattcattttcggaacacaacacgccctgagccgccgctgtcttgctgcccgctatgcaaacttcttctacacaaactgtgcaccatagatgccatattttaagtctgatgcttttcctttactgggaggggattttgaaatatttctattgggggcactttggggcgcattccaatcttatagccatagctggatttttcatcttttactcggcttccagcgacagcattccaatcttcttccagcgagaatgcagctacgaaccaatcgctcttatgacttgtatgctcttcaattaacaacacaagttccagatatttcggtcgctatgaccacttcttgcttgcttgacagatgctgcaaaatca

SEQ ID NO: 102601 - DNA, 479 bp, Zea mays
  Clone ID: MRT4577_25081C.1
cggacgcgtgggtcactctctcactccactgcctccggaacaccctagcaatggagcccaactccagcatccctcccccggtgatgggcgcggcggtggcgtaccctccggcggccggcgccgcgtactccgccgggccgtacgcgcacgcgcacgcggcgttgggcgcgctgtacccgcctcccccggcgccgggtcccccctcctcgcaccagggcggcgcggcggcggcgcagctgcagctgttctgggcggagcagtaccgcgagatcgaggcgacgacggacttcaagaaccacaacctgccgctggcccgcatcaagaagatcatgaaggcggacgaggacgtgcgcatgatcgccgccgaggcgccggtggtgttcgcccgcgcctgcgagatgttcatcctggagctgacccaccgcggctgggcgcacgcggaggagaacaagcggcgcacgctgcagaagtcggacatc

SEQ ID NO: 102602 - DNA, 306 bp, Zea mays
  unsure (1)..(306): unsure at all n locations
  Clone ID: MRT4577_25082C.1
gtggtggacgcgctccttgccgagggccttttgaagcgcctcctctgcctgcagcgctgcgagctctgcggctcgctcgcggacacggacgaggagggctgcccaaaggcgaaacccgaggacgccaaagccggtggctttctcctcgtgccctgccttcctctggtgtatctgtggtggcgtcgccagggcgacggcgccgcggacgcggacacggaagagcggccgttcgtgagcgctgtggcgcggttcgcggtgcangtggaggtgggcgtggggttgagcccgcgggagaagcgtgaggcg

SEQ ID NO: 102603 - DNA, 173 bp, Zea mays
  unsure (1)..(173): unsure at all n locations
  Clone ID: MRT4577_25083C.1
caaactcagctatagctatttgtgagggaaggacaccagcgcatggtcacgtcaacttctaccgcaactatnntaaaacnttcaataaaccaatgctttcttattataaatatcctctttatgcttaacttaagctttttggtgaatattttcttatgttcaatccttaactt

SEQ ID NO: 102604 - DNA, 269 bp, Zea mays
  Clone ID: MRT4577_25084C.1
ggagcttatgttgctgtcaagcaagagatgatgcaacctactgccagcatcaaggacagaccagcatatgcaatgatcacagatgctgaggaaaagaatctgataactcctggaaagacaactctgattgagcccacgtcaggcaatatgggtatcagcatggcatttatggccgccatgaagggatacaagatggttttgaccatgccctcttacacaagcttggaaagaagggtgaccattaaagtgtttggagctgcatgaatcct

SEQ ID NO: 102605 - DNA, 444 bp, Zea mays
  Clone ID: MRT4577_25085C.1
actagttctagatcgcgagcggccgatttgattctacacaacgttctacacattgctaggggggaattattattttattagggctactatatttaatttaatcgtccttcttttaccaactttataactggaaaacccttgcgataaccatattaatcctcttggaaatcattcttctttctacaagttgactaactaccaaaaaggccccaactaaccttctttacaaccatttccccatcttaattgccaattggacccctccttctacccattatttaacgccgcagttgttgttactaccatcatgattaccagtataattagcaatctacttaccaccgctttatttggttttcttcccttcttttttacttacttcgtctgtttttccccataaattattaatcgggtgcttcctttaatgctaccaattaatttttt

SEQ ID NO: 102606 - DNA, 308 bp, Zea mays
  Clone ID: MRT4577_25086C.1
aactggagtacccaaatgagagctaacagaggctcagtcagcctactacttacactgatacgaggctatcatgagcctgctcatgagccagttcatggagagacctgctcgactccaacctattggatcacctccagtttataatccgcgcacgcaggtaaggctgctaactgctgcaatacacaccacaccatacacatgctccatgctggataacatggagaagacccataccgatcattccagcactacgctgaatactttagaataaggccgatgaactgatagcatggggctcacaagagact

SEQ ID NO: 102607 - DNA, 344 bp, Zea mays
  Clone ID: MRT4577_25087C.1
caacacaaaaacacttttggcggggtttttttaaatttcgaggggtgggcaaccaaacaacataacatgccccctcacaatttactaacccacgtattaggtaccactagtccaaatctcccgatatcaagaagcagcaaataaactactcggatctataacaccccatccagccaaatcaccctcaacaggcctttcaagcttcacaccaacgtcctctttgtagacgccctcaaacctacatcaacttcccgagatcaaacttgggggccttgagtatctttaccttgccacagaatactcttttgaactgcgaagatgacagaggaagacttctcaatctc

SEQ ID NO: 102608 - DNA, 224 bp, Zea mays
  Clone ID: MRT4577_25088C.1
tcgaggactcctaatgctccagcttaacacgctttttcataacgaaggggttcacaacggaccgggcataccatagggactacgcgcacgtttgcttaatttgcggtcagacgcatctactgggccaaatcgtgcgcctgacaatcaacagcaagctcatggactaacgcaacagtggactgagccgacctgcgccgacatactaggaccacggttggtcatga

SEQ ID NO: 102609 - DNA, 264 bp, Zea mays
  Clone ID: MRT4577_25089C.1
gcggcctgctatttggattgtcctgtacacataggagtcctatgtggatacaccttaaagcttcatttggtaaacaactcttgacaagggatgagtccactaaattcattgcctttccttcattccataagctccatgcctgaaccaatggaatcaatttcatagaacattaataagtacctttttgctgcattgcaaaaaaaaaaaaatgccaccattcttacataagctaatagatttgggaaatccgtgatgtggtttaat

SEQ ID NO: 102610 - DNA, 237 bp, Zea mays
  Clone ID: MRT4577_2508C.1
catctcctcaccctcgttcaccacacagtccgccacccctttagtagcttgtgatttgtacctcgacgagatcactggtcgggtggcggacgacgacacatcgtggacggtagtgtcggtgcatcatggtgggcgttcctcctgctcgccggcgtgctgcacctcgtagcagccacggccggtcgcgaggaccgagttgtcgaactggaccgcaaggaggacctgcggtggtgcaag

SEQ ID NO: 102611 - DNA, 386 bp, Zea mays
  Clone ID: MRT4577_25090C.1
aggaaagatccttaaccaaaattcggttcacctgtcatgggggtggcgaagagaatgtatttgccagctcgagagtcatctagtgagttgttctgctatacaggtcttgtagcgagcacatctccgtggggactgcttggattctgcagtgcctgctagcgttatcctgcaaagaagacttgctaccggaatattgcctgtttactgctctgtcaggctattagaatggtcaccggttcaaggattgtcgctagtagctttgatgttggctataaccgttcggaaagcgtgactgcatgggcttatattggcactaacctatctttgtcaccatggatagacgctagcaatcttacctgtcagcagccactggttacaggattagc

SEQ ID NO: 102612 - DNA, 379 bp, Zea mays
  Clone ID: MRT4577_25091C.1
aacaatctatcggacagaaggtcttttagggttttacaggggaaacggagctagaggggctcgaattgtcccgaatgcagctttgcattatatggcctatgaagaataccgccggtggatcattctcggctttcctaatgttgaacaagggcctgtcttgatctcgcggctggctctatagctggagggacagcatgatatatgcacataccctatcgatctagtacgcacacagttggcttatcatgtgaaatgtgcagtcagagtacattataaagaatctaagccctctgaacaggtagacaacagaatcattgatcgtgtgaaaacattatacagaccaaaagcattgtaatgcatataccgatgcacggctcct

SEQ ID NO: 102613 - DNA, 366 bp, Zea mays
  Clone ID: MRT4577_25092C.1
attcggctcgagggtagatatcattaataagatttctgttgacaagaccattactgaatacaggagcaggggtttagctaacctatgcagggggccacacatgacaactactttgtttgttaaagctttctactgtaggtaggcctaataatgatatgggcaaggaaaagttaacctcttaagcctgcagagagagtatgggatcaatgttcctgactctggaccaatgagggcctataaacatttttttgaggaggctaagaaacgggaccacacgaaattaagggaaggacatgtactcttttttttccctgtctgaagcctggcagctagtggttcctttcacatagggccatggtatattac

SEQ ID NO: 102614 - DNA, 491 bp, Zea mays
  unsure (1)..(491): unsure at all n locations
  Clone ID: MRT4577_25093C.1
cccacgaggctgcccacgcgaccgcccacgcgcccgcccacgcggccgcggacgcgggggcgcgcacacacacaaacacacacacacacacacacacgacgggggacgcggcagctagcagagcacgcacgatcgccgcagcggacgccctcccacagaggaggacgaccgacgccaaggcggcctacnacgagcgcggccccgcggcggcggcggcggcgccgccgaaggaggcggccgagcnggcggcgacgagggccggcgaggcccgcgcggacnncgcccaggaccgcgccaggcgcgcggaccggcgganggggcnggcgacgggccagacgancgggcaggacaaggcgacggcgcgcgcgccgacgcccgacggcggcgcggggcggaagcaggcgggggccgccagcaagcngagcaagggcgngcnggncaaggaccgagacgagccggcgcgggggnacaagaacaacgncacccgcgcc

SEQ ID NO: 102615 - DNA, 524 bp, Zea mays
  unsure (1)..(524): unsure at all n locations
  Clone ID: MRT4577_25094C.1
tnntttttttnnncttttttttnntttttttnntttttttttnttttttataacacaagggggggaaaaaccaggaaagttcatttgccagaacgggtcattcccccctattctttatttattacacgtaacacaatatttttatgctttcgggtttcaagcggttgcttatttgtgtttaggcactcaatcactttggcaggttgtggtattgttgacattagaacagaacaaagctgtgacttttacccggggtgtgacaatagcacaatcccatacgtgcgtagcctctttctgcgttgcacctcattctttgcaatggtgctatgtcctgctgtggaccacgacaggagcagagatatcatttttaccttaacaggggtccaagcaaagcgaaactgtgaagggattatgcctcgcaatctgtggacgaaaatttgatgcaagcaccacgtgtaagaaagcatgcagcaagatcgtcttgctttgtggctgccatctttagatcagctcccacgcgtccg

SEQ ID NO: 102616 - DNA, 132 bp, Zea mays
  Clone ID: MRT4577_25095C.1
aactacttctactacaacttttacaacatatctttcaccaccaactactactaatacggccgttgcaccttctttttttacggcagcaaaccctctttcgaccactcgtactcctgcggcggcggtggcggg

SEQ ID NO: 102617 - DNA, 1409 bp, Zea mays
  Clone ID: MRT4577_25096C.1
ataccgaatccaattccattcaatccctccgtcgctcgctccaatcatccccaccgcttcaccgcccgcgccacccaatgtcaggcgacggcgacgcgcgccgtggcgctcgaagccgacgtccgccgcctccaggcctcgctccacgccctcgatccctccacgctcgacaaggtcgaggaggaattggagcgtgccagggtggcaatcacggatagtgatgtggcttcgtttcttcccagcaagcggaatggcaagtttcttaagacatttctaggccctgtgaatgtgcgggtggcgaggaaggaagataaactcaaaatcaaggatgagtacaacaattatagggataggacagcctataagtttctgttatttccatctatcctcctcctactgagatggtggatatgggatggatgccttccagcattggctgttcaaatttaccaggcttggttactatacctgtacacaagctttgctttgcgtgagaatgtattaattgcgaatggaagtgacattcgtccatggtggatatatcatcactatctagcaatgctgatggctcttattagccttacatgggagataaagggacagcctgattgttctagcaagcagaggggggtgcaacttttcttgcgctgggcaatcatgcaaggcattgcaatgcatctacagaatagataccagcggcaaagattgcgtactcgaatagctctaggaaaggctaaaagaatggatgtcgttgctggcgaaacagctggtgtggaggggcagctcttgctgctatatcctgtccttttcatattacagggtttcgaagcatatgttggagttttgcttcttcagacggctttgcatgggcttgcttccgaatggcaggtcttagtctgcgggatcttgctggtggttatggcagtcggcaactttgtccacactatggagacactggtactgaaactgaggtttaaagcaaagatgaagaaagcgaagagcagacaggatcgcccgcatcaaaattgacaggcatcatcgtccttggaaaacaaggatgctgacaccgcctcttttgtaaatcctttgacccacattaacattttttgcctgcttgtcattctctctctctttttttttggtaattggccctgtaacattgaagttgatattccacacaacacggtggatgaaaccatatttgttcgctcttggatgagaactgagtttggcatgtactatatatttttctgtatgaaacctctgggttctgaaataagatgatgtgtatctgaagctgtgaattgacagaggggctctatacaaataatggagcagaggcttttgtaaggtcagatgttgtcatgtagtgtacttgttatacagagatcggtatgaatggttagcag

SEQ ID NO: 102618 - DNA, 468 bp, Zea mays
  Clone ID: MRT4577_25097C.1
tcaccggccaacctcggcagccaccaggaaggtgtctccctctcggcagctcccatggccaccatcaggcctagctgcgcttgccctggttccagcagctcgacgccagcccctcttaatcttccatcgctgccgctcagcttgtcccagatatattgatgttgacaattggaaatccatgtagcaaataaatgattttggaactagggacaggtcagagtctagagcatgttcattccacgtatgttggctttgcgacttggtttcggcgatttcagatctgaatggctgacattctgtctccatcgatatttaatagtaaagcaagggatgtgcagtggtggtctcttaaaagaattttgtgttccagcgtagctatttccactgcaaactatcaaatcattacaaactggcattccatggcttccactagttgagtccccatgataaccaatccttggtatcata

SEQ ID NO: 102619 - DNA, 387 bp, Zea mays
  Clone ID: MRT4577_25098C.1
gaaccacccgtgcggccaaccgtacctcaacgcgctcggagacaaagagtttcaacttcttggaaccggacgaaagaattgggtgcggggtctcttgcctaaaaacatagagggcacaccctacaagggctatattaagacatgcccgtcatataaatagcaaaactaactgctggtttgccaaagaaaaaaagaatagagaatactagcctatcgaccactttgacctagaaaactcacgaacatgctgtgcctgtaccaccttcaggcatccacttgaaagtcataaatggcttctgaccaccatgaaacattgtctgctaaagagaatgccgctttcttcaaactaggatgccaggttggaaaaaaacttccacaatatatata

SEQ ID NO: 102620 - DNA, 2611 bp, Zea mays
  Clone ID: MRT4577_25099C.1
cttatcctatctccatcgccccatttcctatcctcccagccgatcccctctccctcacggcgccctctcccatggccgtcggccctccccgccatggacgtcgctcttccttcctacaccgccatggcagtgcctccctgcagcagtccggtgaccgggccctccccttcccacgtcatgctggtgccatgtcttctccctcaccggccaacctcgccagccaccaggaaggtgtctccctctcggcagctcccatggccaccatcagccctagctgcgcttgccctggttccagcagctcgacgccagcccctctcaatcttccatcgctgccgctcagcttgtcccagatatattgtatgttcctctattttattgtggtaattgtgcttacattaggtggtgttgaagcgatgcaaatggtagttagtgttttaagaaattaaccagttagttttgtcgatgtgctcggatgaatatatgtgtgtgcataatgtgtttaaattgattctttgtttgcataatgtcaaagtaggttcaaaatactagattatgtgaagtaaatggattcatggctataaaatagcagaaatctatatatgcgattagaaagtgtcaaacacatgataagtgtagaaagtatatatgagtaaattgaatgttggctgtttggacttgctatttggactgtgtctagttttagtatccaggtagttgagtgaagtaaacattgttttctgtagaaatgttatatataaaagttgtagctcacttctttatcttggttgtgtaaaaattgcatgaccataggtttagtagtttaggagttatgatttttcaaagtccagtctcagaatctgcccagattctgtactgatttcgaaaataaccttgtttgcccaagttaaacttagaatcagctcttagtaattataggagaattgtagtacttttcttaagctttgcaacaaattttggagcaccaattttggtggtctataagtcaggttatggctgtttgaaatgtgatgtttgaagctgtcaaaatctggacaacaatgcttgtttgtattaactgacttcgatacacattgaatcaccttgagatgattataaatgaactgtagacaattctattagctttctaaaaagtctaggatcacctgatttggacttctaaaactccagttatgaattaatgaagtaagtagtcgaattctgtccaaatctggacagaaattgcgtttagtactgtttgacatttctaaatgtcgaatctcatggtgatgataataccaaaattttagaggactttataagcttttcaaaaagtcttagtttactatttttggatgaatattgtgtaagttatgaataaaacaactagctctacaactttcatttaatcaagcgtgtttctgctttatcttgctatgctctgaccgaagctttagtttttgtgcgactggtatttctgtgttctgcagatcatttagctcaagtaattggtagttcaaatgtcataatgtttggtttgagatttctatccgtggatggttcgtctggcttatctatgcttttaggtgcttcatctggcttatctatgtttttgcgctctcgcttttgcatgtgttgcaggatgttgacaattggaaatccatgtagcaaataaatgattttggaactagggacaggtcagagtctagagcatgttcattccacgtatgttggttttgtgacttgttttcggtgatttcagatctgaatggctgacattctgtctccatcgatatttaatagtaaagcaaggtttgtgacctggatttattgggtgctgtagacattggaggtggattttcctcaattggagatattgacaaattggaaaaaatgtgacttgacctgtgctgcaacaaccttaaactaggaggggcttctaattcttcatctctaccaacagtcctctcctgttactttttaaaccaataactttttcaagtttgtgcagatgcacacatccttgagccaaaatagaaaaaaaatcatagaagagttctttggtaaatataaattgtgcactcataattttgcaagtgcatctatggataccttcacttattcctaacggatgtctttcaggctgtcacgtgattcaagagtattaatgatatacaaaagtttgctttatggcaagtcaagtaaccaccaattttgggcaatgacagggatgtgcagtggtggtctcttaaaagaattttgtgttccagcgtagctatttccactgcaaactatcaaatcattacaaactggcattccatggcttccactagttgagtccccatgataaccaatccttgttatcatatacttcttcaagtttgacgtcagcaacgtggtcatggtgaccggcgggaggaacaccgggcgtgtaggagtgatcaagaactgggagaagcacaagggcagcttcgaggtcatcgacgtgctgcttggaggcttttgcatgctatttctagttttctcttatttgttgtacaagaaaacatagaatggaattcaaatttggtggtcgcaaaagtgtggagacttgaattcatataaagttaggctt

SEQ ID NO: 102621 - DNA, 437 bp, Zea mays
  Clone ID: MRT4577_2509C.1
tcaaggttagggagccgttctccatcatgtcacttttgaagagccccatggggttaatggttggttttatggtcttaatggtctttgtgatgcccaagatgatggagaacataggtatatttcacctcttttacatcgaatggatacaagctttcagttattatgtttcactaaagcttgcaactagcaaacagcagcttctacgagcagtgttgcatgatacaatggtagagtttagttctatttactgagctctgtgcaacagctgactttcaaatttctagagcaagcaaggcatcaagtcaattagtttgaactggtgcacttctggatttcttgggtataatgtgtcctttctgtatttataatgagatgggctttaaataatggtttagtgatgatttcttaactaaaaattcttatgttggactattata

SEQ ID NO: 102622 - DNA, 696 bp, Zea mays
  Clone ID: MRT4577_250C.1
gccggccgggttcctatattgtgatgtaatgcagaaattgttcccctgtatcagtacacccttttaatctatatattgtggagtactgattgctgactaaaaaaaaaaaaaaaaaaaaaaaaaaaaaaaaaaaaaaaaaaaaaaacactggaaaaccgacaaaaacaggcgtctttcgaactcgacctatctccgcgacccaaagcgttcccccttctcccattcttctctcatttctcaccaccgccgccgctaccccctttcaacaacaccatgaggaagtgcatctcgatccacatcggccaggccggaatccaggtcgaaaacgcgtgctggaagctgtactgcctcaagcatggcattcaggctgatggtcaaatgcccggtgacaaaaccattgagggaggtgatgatgctttcaacaccttcttcagtgaaactggcgctggaaagcacgtcccccgtgctgtttttgttgaccttgagcccactgtcatcgatgaggtgaggactggaaccaatcgccagctcttccatcctgagcagctcatcagtggcaaggaggatgcagccaacaacttcgctcgtggtcactacaccattggcaaggaaattgttgacctgtgccttgaccgcatcaggaaccttgcagataattgcactggtctccagggcttcctcgtcttcaacgctgtt

SEQ ID NO: 102623 - DNA, 597 bp, Zea mays
  unsure (1)..(597): unsure at all n locations
  Clone ID: MRT4577_25100C.1
ccggccgggagccgatcccctctccctcacggcgccctctcccatgcccgtcggccctccccgccatggacgccgctcttccttcctacagatgttgacaattggaaatccatgtagcaaataaatgattttggaactgggggcaggtcagagtctagagcatgttcattccacacattggaggtggatttccctcaattggagatattgacaaattggaaaaaaaatgtgacttgacctgtgctgcaacaaccttaaactaggaggggattctaattcttcatctctaccaacaatcctctcctgttactttttaaaccaataactttttcatgtttttgtgcagatgcacacatccttgagccaaaatagaaaaaatcatagaagagttctttggctgtcacgtgattcaagagtattaatgatatacaaaagtttgctttatggcaagttaggtaaccacaaattttgggcaatgacagggatgtgcagtggtggtctcttaaaagaattttgtgttccagtgtagctatttccactgcanactatcaaatcattacaaactggtgggaacatgctccatcttatcgaagcatg

SEQ ID NO: 102624 - DNA, 859 bp, Zea mays
  unsure (1)..(859): unsure at all n locations
  Clone ID: MRT4577_25101C.1
ttttcctatcctcccagccgatcccctctccctcacggcgccctctcccatggccgtcggccctccccgccatggacgccgctcttccttcctacagtacgtcagcgacctcgtctccctcccttcccgtggacgcctgctgcaggagttgttcctcccctgcgctcgcctaagatggccggactcgcccatgatggctttcccctgtcgatgctgttctttagccgccatggcagtgcctccctgcagcagtccggtgaccgggccctccccttcccacgtcatgctggtgccatgtcttctccctcaccggccaacctcgccagccaccaggaaggtgcctccctctcggcagctcccatggccaccatcagccctagctgcgcttgccctggttccagcagctcgacgccagcccctctcaatcttccatcgctgccgctcagcttgtcccagatatattgatgttgacaattggaaatccatgtagcaaataaatgattttggaactgggggcaggtcagagtctagagcatgttcattccacacattgngaggtggattttcctcaattggagatattgacaaattgggaaaaatgtgacttgacctgtgctgcaacaaccttaaactaggaggggcttctaattcttcatctctaccaacagtcctctcctgttactttttaaaccaataacttttttcaagtttgtgcagatgcacacatccttgagccaaaatagaaaaatcatagaagagttctttgggatggtgcagtggtggtctcttaaaagaaatttgtgttccagcgtagctatttccactgcaaactatcanatcattacaaactggcattcca

SEQ ID NO: 102625 - DNA, 338 bp, Zea mays
  Clone ID: MRT4577_25102C.1
caccgctattcatatgggagcatggtagcgaacacagtgtgtactcgtctgtcgctaaatctgctggggggacaagattggcactcggttttacatgcaaaccctaaaacaagcactcaggcctgatcatccattaccggctcagatactgtattagagatggaattctgggcaaaatcagactagctgttctttcttcttctaaatataagaccactgattcatcaggccactgagctcgagtaacttctacgtatttgcggggaaagcctgccctgttttatctgcttgatcagaccccactcgtatgggacccttgcatgttgtctctgttatat

SEQ ID NO: 102626 - DNA, 794 bp, Zea mays
  Clone ID: MRT4577_25103C.1
ctcgaggccggccgggaacttatctcccttatcctatctccatcgccccattttctatcctcccagccgatcccctctccctcacggcgccctctcccatggccgtcggccctccccgccatggacgtcgctcttccttcctacagtacgtcagcgacctcgtctccctcccttcccgtggacgcctgctgcaggagttgttcctcccctgcgctcgcctaagatggccggactcgcccatgatggctttcccctgtcgatgctgttctttagccgccatggcagtgcctccctgcagcagtccggtgaccgggccctccccttcccacgtcatgctggtgccatgtcttctccctcaccggccaacctcgccagccaccaggaaggtgtctccctctcggcagctcccatggccaccatcagccctagctgcgcttgccctggttccagcagctcgacgccagcccctctcaatcttccatcgctgccgctcagcttgtcccagatatattggatgtgcagtggtggtctcttaaaagaattttgtgttccagcgtagctatttccactgcaaactatcaaatcattacaaactggcattccatggcttccactagttgagtccccatgataaccaatccttgttatcatatacttcttcaaagttgacgtcagcaacgtggtcatggtgaccggcgggaggaacaccgggcgtgtaggagtgatcaagaactgggagaaagcacagggcagcttcgaggtcatcgacgtgctgcttggaggcttttgcatgc

SEQ ID NO: 102627 - DNA, 320 bp, Zea mays
  Clone ID: MRT4577_25104C.1
tgtctgtgcctccgttggcgtggtggcggcgacctgggtgtgctccgctcgatgtcatcaagaccaggatccaggtacacggatggtccaagcttaccacaggcgcaattgaaggcagtgtaattattgggagtatacagagagtagctaacagcggaagcaataacatgttatgatcaaaacaactctctatatcgtgtttggtaaatggtgaaacatgaaacaggctagtttctgtacgctctgctttataaaatcttcatttttttagctgtgctacattttaggtttattttttttagggttcggtttttttcatt

SEQ ID NO: 102628 - DNA, 297 bp, Zea mays
  unsure (1)..(297): unsure at all n locations
  Clone ID: MRT4577_25105C.1
ctaggccanngcgcccagnngtcccctcttggttcgtcgcgccttttcgcccagcgnnacgaggcnncccaataggctctcgaaggggatgagaannaggggctcgcatccatcagatgcagatgggatctcatactagtgacgcagatgtggtaggcatgatcaataccagtgatgaccaacggtgaaccatacctggcaaagtgtaccacatcgagggccaagcgacaaatggtttaaagcctgggccagatcgcaaagctcaaacgtcgatactagcaggaagtaccggatagc

SEQ ID NO: 102629 - DNA, 742 bp, Zea mays
  unsure (1)..(742): unsure at all n locations
  Clone ID: MRT4577_25106C.1
gccggccgggttccgccagccgatcccctctccctcacggtgccctctcccatggccgtcggccctccccgccatggacgccgctcttccttcctacagtacgtcagcgacctcgtctccctcccttcccgtggacgcctgctgcaggagttgttcctcccctgcgctcgcctaagatggccggactcgcccatgatggctttcccctgtcgatgctgttctttagccgccatggcagtgcctccctgcagcagtccggtgaccgggccctccccttcccacgtcatgctggtgccatgtcttctccctcaccggccaacctcgccagccaccaggaaggtgcctccctctcggcagctcccatggccaccatcagccctagctgcgcttgccctggttccagcagctcgacgccagcccctctcaatcttccatcgctgccgctcagcttgtcccagatatattgatgttgacaattggaaatccatgtagcaaataaatgattttggaactgggggcagggatgtgcagtggtggtctcttaaaagaattttgtgttccagcgtagctatttccactgcaaactatcaaatcattacaaactggcattccatggcttccactagttgagtccccatgataaccaatccttgttatcatatacttcttcaagtttgacgtcagcaacgtggtcatggtgaccggcgngaggaacaccggggcgtgtaggagtgatcaagaa

SEQ ID NO: 102630 - DNA, 607 bp, Zea mays
  Clone ID: MRT4577_25107C.1
ctcaaggatgtgtgcatctgcacaaacttgaaaaagttattggtttaaaaagtaacaggagaggactgttggtagagatgaagaattagaagcccctcctagtttaaggttgttgcagcacaggtcaagtcacattttttccaatttgtcaatatctccaattgaggaaaatccacctccaatgtctacagcacccaataaatccaggtcacaaaccttgctttactattaaatatcgatggagacagaatgtcagccattcagatctgaaatcaccgaaaacaagtcacaaaaccaacatacgtggaatgaacatgctctagactctgacctgtccctagttccaaaatcatttatttgctacatggatttccaattgtcaacatcctgcaacacatgcaaaagcgagagcgcaaaaacatagataagccagatgaagcacctaaaagcatagataagccagacgaaccatccacggatagaaatctcaaaccaaacattatgacatttgaactaccaattacttgagctaaatgatctgcagaacacagaaataccagtcgcacaaaaactaaagcttcggtcagagcatagcaagataaagcag

SEQ ID NO: 102631 - DNA, 143 bp, Zea mays
  unsure (1)..(143): unsure at all n locations
  Clone ID: MRT4577_25108C.1
gccggccgggccgggacgctcgattcggccgttttccgcatccacggnnagccaggcgacnncgccgccgcttccctactcacccttggcccggcgacgacgagcgccaccacgggcaggatgaacgacgctgaggaaacctc

SEQ ID NO: 102632 - DNA, 285 bp, Zea mays
  Clone ID: MRT4577_25109C.1
gggacgcgtgggtgcatggtacctacaacagatacgactaataacatctactcctctgtttgtgatcaatggacatacatacctgcaacaacggatgatgaaactgagcgtacacagatctgactgagctatctgtatcaaagactgatgcatacttgcaacagatgctggcatacaaccaagatgactcgtgaccaaactaggctgctttccttcaacagacactacaggatctgaatacactacggtggtctaacaaaatggacgctgcttgactacagtata

SEQ ID NO: 102633 - DNA, 473 bp, Zea mays
  Clone ID: MRT4577_2510C.1
tcaggcggcgggcgggatccaaatatcagatctttgctgctttctgcactgcgttggtactcatcacacaacgcaatactaacactgcatacccactatgcctctcagattgagctcttccttgccctcagcctcatcattatgtagacgcctcgcatggttgcaagccctactgtcccaggcgaaacatgccaacgccatcggacctgacatcatacagccactgatgctggacgattgacgcaataaaggtctacgtgtgcgtaaacgtgattccgacactgctatggtcggtctgccacaacatgaacaatgatgcacgttgctgcaggggctgctgcacctccacgacggactgtgcctcatgaccggcatgcaaggctaaggtaactcggaatccagctcaaggtgacgatctacactaaatgtcatgctcaattattgcaggaagatttgcccacaggactttactt

SEQ ID NO: 102634 - DNA, 590 bp, Zea mays
  Clone ID: MRT4577_25110C.1
tttttttttttttttttcgttacggatatgattctctggattattctgatcgtcgtttgccaactggccaagtacagagtatatatccggtctcttaacaggccattacagactccaaataaacccataacaccagattaggacactaaacccggcccacggcccaaccctagagagtacttactgctcagacatgacatgatggtggccatgggagctaccgagagggagacaccttcctggtggctggcgaggttggccggtgagggagaagacatggcaccagcatgacgtgggaaggggagggcccagtcaccggactgctgcactgcagggaggcactgccatggcggctagagaacagcatcgacaggggaaagccatcatgggcgagtccggccatcttaggcgagcgcaggggaggaacagcctcctgcagcaggcgtccacgggaagagagggagacgaggtcgctgacgtactgtaggaaggaagagcggcgtccatggcggggagggccgacgggcatgggagagggcgccgtgagggagaggggatcggctgggaagataggaaatggggcgatgcac

SEQ ID NO: 102635 - DNA, 1888 bp, Zea mays
  Clone ID: MRT4577_25111C.1
ggtaccggcgcccccttctcgagttttttttttttttttttttttttttttttttttttttttacaatagggaccattcaatatatcataaataagtattgtcaaacaaggtatacataagtgtactctaaatctaaactaaaatacaactttttacactaatgttaagcctaactttatatgaattcaagtctccacacttttgcgaccaccaaatttgaattccattctatgttttcttgtacaacaaataggagaaaactagacatagcatgcaaaaagctccaagcagcacgtcaatgacctcgaagctgcccttgtgcttctcccagttcttgatcactcctacacgcccggtgttcctcccgtcggtcaccatgaccacgttgctgacgtcaaacttgaagaagtccatgatcttgttggtctctagatcgatcttgatggtgtcgttggccttgagcgggtcggggtagcggatggtgcggccgtcgtaggtgttcaggtaggggatgcctttctggccaaactgaacagacctcaccttgcagagcttgaacttgaagcaggagatgcgaccagagcatcaataaggggtcctgaaagtcgagaccctttcataaagtttaaccaaggggattcttggggcaaagctgtatcttttaaagtcccagatggtacaacataaccaggccataaataagcagatgtatcgatcaactttctcgagatacaggcttcgataataagatggagcatgttcccagcagtttgtaatgatttgatagtttgcagtggaaatagctacgctggaacacaaaattcttttaagagaccaccactgcacatccctgtcattgcccaaaatttgtggttacctgacttgccataaagcaaacttttgtatatcattaatactcttgaatcacgtgacagccaaagaactcttctatgattttttttctattttggctcaaggatgtgtgcatctgcacaaacttgaaaaagttattggtttaaaaagtaacaggagagaactgttggtagagatgaagaattagaagcccctcctagtttaaggttgttgcagcacaggtcaagtcacatttttttccaatttttcaatatctccaattaaggaaaatccacctccaatgtctacagcacccaataaatccaggtcacaaaccttgctttactattaaatatcgatggagacagaatgccaaccattcagatctgaaatcaccgaaaacaagtcacgaaaccaacatacgtggaatgaacatgctccagactctgacctgcccccagttccaaaatcatttatttgctacatggatttccaattgtcaacatcaatatatctgggacaagctgagcggcagcgatggaagattgagaggggctggcgtcgagctgctggaaccagggcaagcgcagctagggctgatggtggccatgggagctgccgagagggagacaccttcctggtggctggcgaggttggccggtgagggagaagacatggcaccagcatgacgtgggaaggggagggcccggtcaccggactgctgcagggaggcactgccatggcggctagagaacaacatcgacaggggaaagccatcatgggcgagtccggccatcttaggcgagcgcaggggaggaacaacttcctgcagcaggcgtccacgggaagggaagggagacgaggtcgctgacgtactgtaggaaggaagagcggcgtccatggcggggagggccgacggccatgggagagggcgccgtgagggagaggggatcggctgggaggataggaaatggggcgatggagataggataaggaagataagttacataaggaaagtggacatttcccggccgg

SEQ ID NO: 102636 - DNA, 209 bp, Zea mays
  Clone ID: MRT4577_25112C.1
ccgggtcgacccacgcgtacggacacaaaatgaacgtagaataagggctgggctttgctagagaaccaagcataaggccgggaagagtacaaaacattgattcatataaatgaaaaacggacgccttattaaaggatccgtgcttacgatcggctacttgcgacttaaaaccttttatatcgagtctcataaactgcaattacttgcat

SEQ ID NO: 102637 - DNA, 506 bp, Zea mays
  Clone ID: MRT4577_25113C.1
aagtgtgactgaacccaatagaattaactggtctctatgaccaggagtcggaatagtctgatcctgcgggaaacatctgtgcctgctatgcctttttgtgcttacagactttaataccttctgtgtgaaatcgatcaaactagttgccactttcgaactagattcttgcagagatcgagtatgcattatctggggcactactcggaacattctgtgaaagagctgctttagtccttatagggaatcaggaattaccgactgactatcaatcggctgaaggcacctgtcgagtacagctattatatggaagcgacctagaccctctgtatgaagaacatagggaaagttttacttactgttggcaggctctctaattattcacgccaaacgaaaaaaaagtaggtgcattgacattgcattaggctaagggcccattcgtttcctcatttcgaagactttgaatctaacttatggagtccgctatgttataaaatgtgacattccat

SEQ ID NO: 102638 - DNA, 152 bp, Zea mays
  Clone ID: MRT4577_25114C.1
gcaagttcaattgataacactgctgatgcctttttcctgatagcagaccactcttaatttgcgggcattcttaagggtagcagctgcatacctgtaaagttaaaggccaaatgtgggtttctgccttcttcagattttttttaagaagataa

SEQ ID NO: 102639 - DNA, 312 bp, Zea mays
  unsure (1)..(312): unsure at all n locations
  Clone ID: MRT4577_25115C.1
gagcggcgatgaccggcacggtgtcntagctggcggcgccccgtccggcggcaccgccgctccggccggcgtccctccgcaccgacggcctcgccttcgccccctccgcgcgccgggtccgcgtgtccgacgacggtctacgcaccagcccccgccgtgcgatcatttgtgctatgggcagtgcagcttctgcgacacagaggactgcgtgacggccccgggtgaaacctttgtcaccgtcgtgacaggtcgctcgcggatctcccccagacaaccgttcccgggcctgagttgactgccggactcccaccc

SEQ ID NO: 102640 - DNA, 165 bp, Zea mays
  Clone ID: MRT4577_25116C.1
gacccccggccgcaggaaacggcacaagcagggggagccagccatctgccttacctacaccaccaacacaagaaccgctagagcattgacgggaccagctgagcctactattagccgccttcagccaggaaaaggagggcgcacacacctgctgattggagacca

SEQ ID NO: 102641 - DNA, 745 bp, Zea mays
  unsure (1)..(745): unsure at all n locations
  Clone ID: MRT4577_25117C.1
attcctgatcccgccccttctcgtctcgacctctccccaccggctaaccctagcagcggcacgcgggcgacggcgaccagtagagggctagtcgcgccaccggcgaagggattcagcggtctacccgtcctccgacacaggcgcggcggcgtcctgcagattattattggtttgttgcaaaatgtctacggaagtgactttgaacaattctggtggttctgaatctgcattgctgttactggaacagcttgctgaagtttttggaaagttgaaaactcacaccgaaacatttctgcaattgcaaaatggcataaaatgggaagatattgaagggcatttcctcagccttgatgagtcgtacagaagcaagtttgatgaactggtagagaaggagaaggcattagaagaaaagaaagctgaagcttgtagattgattgcagagaaagaggctaaagtttctacaaaagagcatgcctcactgaatcagcttcaggagctaagggatgctgctgtctcttctctagcagaggttcgacaaaaatataaggtggagcttgctgagatacttgaagcaagtggaagcaaagacaaaaaggtatcattgaggagttggttaagcggcacaggcaaattgatgcagttcatttcatacaagcttttgggctttcggagacatcccccctgcacctctgctngagacatatgttgaggaacaaaaggatacaattgaaaataatggcgatgc

SEQ ID NO: 102642 - DNA, 623 bp, Zea mays
  Clone ID: MRT4577_25118C.1
aactcaaataaaaaaaagctccatatcccatccatcacagctagctagctgtacagacgaataatctcttcttcacctcactagctaacaccagctagcagctcgatcgctctgtcctgcaataatgggcgatcgctcctcctcccagtagctggtcgcggcggcggtcctggtagcggcgctgctgctgctgccggcgtccgccgtgacggcgtcgacggcggtgagctgcggcgaggcgacaccatcgggggcgccgagactcggatacactatgggcagcgcgcggacgccctctgcgacgggatgcacaggggtgcgctcgctcaacagcccagcgtcgtcagcgccgcaccgacaggccacctgcaactgcctcaagtagcatgacgaaccgactcgcagggggggcaagcatggccaacgccgccaacatccccggcaagagcggcgtctccgtcggcgtgcccatcactcccaccgccaactgcaccaagatcgactgatcgatggaacacatagtggaggtagctcggtcactgtatggcaacggacgtgaccatcatcaacatgcagtcgtctgcgtagcagagatgtcctaactacgtgtgtgtgatgcatca

SEQ ID NO: 102643 - DNA, 292 bp, Zea mays
  Clone ID: MRT4577_25119C.1
cacggaggcaaagcaactggctggggctgacaaagtaagacactcgaaacaaaccttcatcgaaaccgagcaagcaattttagtcagcaagggatggtcctaaagcctgtcgccagctagagcagatgaggccactgattttagaagtcaggaagtcattggtgagagcagtttcagtaaatggtgaaggcagaagccaagtttttagccacttcagaatcagtacacgtctatagacagaagtcagaaagctgggggagtgagcagaaaagtttggaaaagcagcaagagg

SEQ ID NO: 102644 - DNA, 825 bp, Zea mays
  unsure (1)..(825): unsure at all n locations
  Clone ID: MRT4577_2511C.1
accctcgngggccggccgggaaaccggacaaacgtgtggtgtcggcagccgggcaggtaggaaaaggtatcagcgtcgccatctcatggagctcacaggcgccgcgctccggcgatacgcgctgccgtcggcgtccccggtggccgcgagggtggtcttccaatcatagttcctcaaattccagcacctttggcaccacagccgtctcaatctcaaccttcagagccagcaaccgcagtgcaagccaccagagtcagcagcgttgcagtaactgagacatccacaaccagcagaattgaggtctgcatggggggcaaatgcaagaagtcaggcgcgcttgctctcctgcaggagttcgagaaggctgtgggcaccggtggcgcggtcgtcggctgcaagtgcctggggaagtgcggcctaggtcccaacgtgaggctgaggagcggtgcctctgcggaaggttctgcaaaggggaacccactctgcatcggtgtaggctttgaagatgttgacaccatcgtggctggtctctttggaggcgctgatctgggcatgacacccacctagacctggtggtactacctcgacctagtcgtacttcaagaaatcaagagcacaacttgtaatcacagatgttgcattgaacaaatgtatagtgcagctacggccttgctagtgctaagtttatgtactctatgtctatatagaacacgtatggtaatcttgtttctggtatgtgatccatattggtctgtgattgttttcatggtaaaaaaaaaaatttcagatttgagcatctgtggcaatgtagggatggttaatgct

SEQ ID NO: 102645 - DNA, 1425 bp, Zea mays
  Clone ID: MRT4577_25120C.1
tttcatttgatttgcaattcttttttttctattgtttgttattttataactttacaagtttgtctcatgactcgatgaatccaattttcaggatgaccccaaatctagggagctaattgctttgagggctgtgattaagtgtatcgaagagcataagcttcagaaggagtgttcacggggggctctccagaagcgtgtttctgagctgaagcccaagggtgagaaaaggtcatcaagtgatgctgggcgtacttatgcaaagaagcctcgaggccctggcatttcatttcctaggagacctggcggttctgttggttcagctgctcgcaggcctccatttccgggctatagctggcagcgtgctcctgcgccaatgccttcccatggccctgcaccaatgccctcccgtgcccctcttcctgatggatatggagctgctgaccggtaccattacacgccaccagccctagcatatgatgcaggcgcattttcttcttacggtgagccgttcagcaccccaaaaccattccagtacgccccagggtcagtggcagcatcgtacaactcgagcccctataaagtcacgtatggtggcccgggagcaccagctgcaagcgcatatgcaggttattccggcgggtccggtccggcagcttctagcagctatgcaaactatctgggatccgtctatcgccctccccagcaaccatagattcgcgtcatctctcagaaatgttgtgctggttataaggtgtgttgtgctggtgataaggtgtaactttactctcttctttttgactcatccatagcactgggttttgggttttggaggtgtaactgatgtagtccagtttctttggaagctgtgtgaggcgccggtcaaattatgagtgttctcatgtgctgctacttgtaccttgcactcgtatttacctttagctgtgcttattccttaggatgtttatatcttctgtcaacaagtctgtcttatgtaggaaagtctgtcccatgtactccaggaacatgtaacttttttacttgctaatgttgtgattgatgctggaaagctaaaaaaaaaaaaaaaaaagcggccgtatatcgccctcccacgcaaccatagatttggctcctccctcaaaaaatgttgtgctggtgatgcaagacatggaaaccagtccctcccatctaactcccatggcggagatgtaaacttgagctattttcttgtttcatcgtccacaacagtgggttttggaggtgtatactgatgctctcatgtccagctacatctacatgtaccttgcactcttgtttgcttttagatgtgcttattcctgagtcgttgaatgttttatattttctttccacaagtctgtctcatgtagggaactgtctcatctaggaatataactcctttacttgctg

SEQ ID NO: 102646 - DNA, 2464 bp, Zea mays
  Clone ID: MRT4577_25121C.1
ggtaccctcattgcggcgcgggaggcgccgagcaagccattcctgatcccgccccttctcgtctcgacctctccccaccggctaaccctagcagcggcacgcgggcgacggcgaccagtagagggctagtcgcgccaccggcgaagggattcagcggtctacccgtcctccgacacaggcgcggcggcgtcctgcagattattattggtttgttgcaaaatgtctacggaagtgactttgaacaattctggtggttctgaatctgcattgctgttactggaacagcttgctgaagtttttggaaagttgaaaactcacaccgaaacatttctgcaattgcaaaatggcataaaatgggaagatattgaagggcatttcctcagccttgatgagtcgtacagaagcaagtttgatgaactggtagagaaggagaaggcattagaagaaaagaaagctgaagcttgtagattgattgcagagaaagaggctaaagtttctacaaaagagcatgcctcactgaatcagcttcaggagctaagggatgctgctgtctcttctctagcagaggttcgacaaaaatataaggtggagcttgctgagatacttgaagcaagtggaagcaaagacaaaaaggtaagtacctcaatcaatgacaacaatgcatctcgtgcttcagaggagaatacccctgctagtgggtcgggcgaggcatctgaagctttacctgttgagactaagccgcgccctgtattgaagcaactatgtgaacagatggacaccaaaggccttctgaaatttctttcagaaaactgtagaaaacttgctagctttcgtgatgaactttctggtgcactaaaatgtgcaactgatcctgcacgcttcgtacttaattccctggagggtttcttcccaccagaccaaactaattcacctgggagtaaacataatgcccttgaggtccagcgcaagagctgcattcttttaatggaagctatagcacctgcactagggatgaaggagcctggtggcgacgacccttggagctctgaaattaaggagcaagccaaggaaattgccgaagagtggaagagtaagttagctgagattgacctggatgcttctaatggctattcattggaggcacaggctttcctgcagcttcttacaacttttaatgttgattcggtgcttgacgaagatgaactatgcaagatcgtagttgctgtctctcgtcgcaagcagactgctgtatcctgtcgctctcttggtcttaatgagaaagtaccaggtatcattgaggagttggttaagcggcacaggcaaattgatgcagttcatttcatacaagcttttgggctttcggagacattcccccctgcacctctgctgaagacatatgttgaggaacaaaaggatacaattgaaaataatggcgatgcaactgcgatctcattaacggatgaccccaaatctagggagctaattgctttgagggctgtgattaagtgtatcgaagagcataagcttcagaaggagtgttcacttggacctctccagaagcgtgtttctgagctgaagcccaagggtgagaaaaggccatcaagtgatgctgggcgtacttatgcaaagaagcctcgaggccctggcatttcatttcctaggagacctgccggttctgttggttcagctgctcgcaggcctccatttccgggctatacctggcagcgtgctcctgcgccgatgccctcccgtggtcctgctccagtgccctcccgtgcccctcttcctgcccctcttcctgatagatatggagctgctgaccggtaccattacacaccaccagccccagcatacgactctggtgcattttcgtcttacagtgaacctttcagcgccccaaaaccattccagtacactccagggtcagtggcagcatcatacaattcaagcccctataaagtcgcttatggtggcccaggagcaccagtcagaagcacctatccaggttatgccggcgcatctgggccggctgcttccagcagctatgcaaattatatgggatccgtatatcgccctccccagcaaccatagattcgactcctccctcaaaaaatgttgtgctggtgatgcaagacatggaaaccagtccctcccatccaactcccatggcggagatgtaaacttgagctattttcttgtttcatcgtccacaacagtggggtttggaggtgtatactgatgctctcatgtccagctacatctacaatgtaccttgcactcttgtttgcttttagctgtgcttattcctgagtcgttgaatgttttatattttctttccacaagtctgtctcatgtagggaactgtctcatctaggaatataactcctttacttgctaccgttgccattgagttggaaacgtagggccccattgaatttggaaaccccaaacctgggcttgggtt

SEQ ID NO: 102647 - DNA, 338 bp, Zea mays
  Clone ID: MRT4577_25122C.1
ttcggcttgagctttttttttttttttacaaaaagataatggtcggccagggagggcacattttgcctaattggcctaaaacataacgggttattattctttcacctttgggggggggcgggactctcttgtttttgaaaccagccttacccaatggcccccactttaagggttaggatgcaaaaggatttgccaagggacccgaaacccacttcacaactttgaatgggggctccacaatttttaacacttgacccaaacacattccccacaatttgcattcacactttcttatttgccccccttggggtacaaacaatcgcttcttctaagtttaa

SEQ ID NO: 102648 - DNA, 195 bp, Zea mays
  Clone ID: MRT4577_25123C.1
atggcagagcatctcatctctacggctgaccacgacaggctgccggacagctacgtccggccggagacgcagcggccgcgcctgcgcgaggtcgtccccgacgcggagatccccgtggtggacctcgccgaccccgaccgcgaagccgtcgtcgccagggtcgccgaggcgtgccgcacccacggcttcttccag

SEQ ID NO: 102649 - DNA, 368 bp, Zea mays
  Clone ID: MRT4577_25124C.1
tggcttgagccaggaactgaggttgacgagacgggaaggaagtggaccaagagagcgagcctctcctctttctttccctgctacaccatcgactgtgccacggaaatttttgtcggtagaagcgtggactctctcaaggatcgactggaagaagttcgcagagaaagcagcatgcaaccgggccaaatcaaggaggtggatactgtcccgaaaaaagactttgcctgggccttcaaccgctccttacaggtcgcgaacgtgcggctacgtcttaggagcctgtcatccttctatggacgcaaagaattaaaggaatgtaaacgtgttctgtacaagtttataaacgactgcatttatgcggcaaatct

SEQ ID NO: 102650 - DNA, 496 bp, Zea mays
  unsure (1)..(496): unsure at all n locations
  Clone ID: MRT4577_25125C.1
ggccgggnagcctactccagcctccagcgcctgctacgccgtcgcccacctccctcctctcctccagcgtcgcccgctcccgatcgtccaccgccacgcacctccctcctctgtcctctcctccaccccctcctccatctctagggcccgcctccctcttccagcgcccgagcaccccctcccctctcccacgtccagagtcggtctgacgttggcccatcgcccgataggtcctctagcagccaacgttgcctgcagctgcattccagagttccagagtttcagctacaaccacgaagttccaacgtctcctgcagctgctctatttgatcctgggcgtgcctgccaatgagcaagaagaggaagcatctggatccagcgaactcggtgaaagacagcgaacaagtagtcgcctcagatttcataagaggagacgatcttgatgacctattatcgaagcttatcaggagctgtggagattgccaaggcttgaagg

SEQ ID NO: 102651 - DNA, 171 bp, Zea mays
  Clone ID: MRT4577_25126C.1
acgcccaaaaactgctagcgggtcacaaagtatctgctgaagaggtacctcttctataaacatcagtctaactacggcactcactaaaactccactggcataccatatccccaaaagtcctatcggatggacctgcaccggtccttgaacaagcagccttgggcttgggct

SEQ ID NO: 102652 - DNA, 570 bp, Zea mays
  Clone ID: MRT4577_25127C.1
ccggccgggccgggattttacctggacggggtcgacgagggatcaagaagcctcgtggcctaggccagtggcccgcattgcacatggtgggtgcgctggcttaccatctccccaagtgggagagtggacgtcataatttgtggtagagggggtacgcgttcgcgcggcccctgccaaatcttataaattttatttaagtcccctttagagaagggcttgaaatgtaatctttgttattagtcccgttcagtgaaaggcttgaaatggtaactttgtttcgcccgattttataaattataatttaatttacatgtcttctaaaaaaggattgcggaagtactcctggactgcttgaaagtatatctttgtgaggaagatgatgaagatgatttgttccaaagtagtcctcgcttacgtaacaattattattgtaattacaatgctgattattcaaaaaaaatgttgcagtatcaaatattgtgtaagtttataacttggataaaaaaatcacagaacagaaaaaaaaaaaaaaaaaaagcaaaaaaaaaaaaaaaaaaggcccctagggcc

SEQ ID NO: 102653 - DNA, 421 bp, Zea mays
  Clone ID: MRT4577_25128C.1
aaagtgggcccaattttaaatggggggaaaattttgttaaaaaaaaaactttttttcctaaactggcaacaacaacagaaaaacttttttgccccaaaaaaggggggggaaacactttttttccaaaactgggaaaaaaaaaaattttgggggttaaaaaatttttgttattaaaaaatttaaagatttcaccccaccgggtttgggaaaaatggaatttaaaacttgcccaaaagggcagggggggatcccaacacaaaatatccaatcaaatccggaaggcctgccatttaatacttggagctcctcaaaagggacccccgggggggcattgaaaacataatttatagtcccggggccaaaaagggggtgtcgatgaccccaacccaaattatcccattggatccggtttttttgacaa

SEQ ID NO: 102654 - DNA, 265 bp, Zea mays
  Clone ID: MRT4577_25129C.1
cgggagcagcgacctgccgtttggacagggagacggttacggcaacggcgtcggagtcggagtcggcgttggagctggcggcgtggcgcaacccgaggcaccgcttgctgcgcctttgccgcagcccgagtcgttgccactggcgccgctgcctcaggaagccgatcagttcggtggcgccgcggggcaggagaaaaccgtgcaggatgtggggcagacgttcggattcggcaaccagccgctggtggacaacagcccgtacgac

SEQ ID NO: 102655 - DNA, 3372 bp, Zea mays
  Clone ID: MRT4577_2512C.1
atggcaaaaggagacaaggtacatttatttaatgatgactttattaatgatgatgaagaacaacttgctatgaaaaataagatgattaaagaatttggtttaaatggatacaatgtaattactaaactaatggagaagctagataaaataaaagcaactcttgacgctcaagaagacttgctcatccttgaaaaggagagaaacctagagcttcaagaattgctatccaataaagatgagatgcttgaagttttgactaaggaaatatctttagtcaaaataactatagaggataaagagaaagaaatgactaatgtaaaaacctctatatttagtcttgcaaaggaaaaggatgcacttgagtcaagcttgtcatgcttaacagttgaaaatcaagaacttcaagtgcaacttgaaaactgcaagaacttcaacacttcatctttagtggaagagtctaaagctagcttctcaaataataatgtttgtaaacattgtacaaaataccatgcttcttgttgtttgactaatcatgcaaggaagaaaagcccacaggtctactcctctggtgggtcaagctgggtgcatgacagtggatgtacaaatcacatgaccggggagaaagacatgtttcactccttgcaactaactcaagaagcacaagaaattgtgtttggagatagtggcaagagtaaagtgattggtattggtaaaattcttatctctgaccaacaatcactttcaaatgttttgctagtagattctctaagctacaatttgacgtctgtttcacaactttgtggaatgggatataactgtctattttctgttgtggatgtgaagatccttagaagggaggattcctcagttgcttttacgggtcgcttgaagggcaaactttatcttgttgatttgacaacaaggaagaaacatggcgttccacatcaatcaaagaatgtggtcacaaccaagaggcctttggagcttcttcacatggacctcttcggacttgtggcctacattagtattggtggaagtaagtatggtttagttattgttgatgatttttctcgcttcacctgggttttctttttgagtgacaaaggtgaaacccaagagactttgaagaaattcatgagaagagctcaaaatgagtttgagcttaaaatcaagaaagctgaggcggtcaacaccgcctgtcatgcaatcaaccggctatatctttataaggtctataagaagactgcttatgagcttctcactggaaatgaagaaccaccttgtgaggccataaagaagcttgcaataggtgaagtgagaccacaagaaaaggatgatgaagaaggaaccttgtggatgacaaatgaggtctttgatgtgggcgcaaaggtggtgggtgataaatcctccactcaagcaaacccatcaacctcaagtcatccaattcttgaagaagttcatcaaccccaaaagatgccaaccatggtggaagatgaacctgaagttgttgttgatgaagtgcctcttgatcaaccacttaaggttgaagaagcgctgggtgatccggattggataatcgcaatgcaagaggagttaaacaacttcactcggaatgaagtctggtccttagttcaaagacccaagcaaaatgtgattggaacaaaatgggtctttaggaacaaacaagatgaacgtggcgttgttacaagaaacaaagcacggttggtttcccaaggcttcactcaagtggagggacttgactttggtgaaacatatgcgccgttagcaaggttagaatctataagaatattaattgcctatgctactaaccatgatttcaagttgtaccaaatggatgtcaagagcgcatttctaaatggaccactacaagagcgggtcaatgtggagcaaccgccgggatttgaagatccaagaaagccaaaccatgtttatctactccacaaagcgctctacgggcttaaacaagcccctagagcttgtactaatgagaaattttgtgaagaatttagtaaggtgatgacgaacaggttcgatatgtctatgatgggtgagctcaaatacttcctgggatttcaagtaaaacaactcaaggaaggtacctttctgtgccaaaccaagtatacacaagacatgctcaagaaatttggcatggaaaaggcaaagcacgccaagacaccaatgtcatcaaatcgacatctcgaccttaatgaggaaggatggtgcgtcgtagaaatccatcggttgttgagtccgattcaagtgacgaagccccagaaattcgtgaagacactcctcctcggtccagatccaagcgcgggcgcggatctggcaatgtcatgccaggtggggttagtgcttcacgaagcgcaggcccgtcattccgccaacgaacatgtcattgatttcactaccaacggagggtctgcccttcttcaagatatgcgcttccaaaatcctacattctgtgttcgtgatgtcaggattgatgttatgcttccaaagaagcaccagtctatcctccatcagcgttttattaactgggatggatgcgaagctattggagatcctgagatgacacaggcattgaaggcctgtgagcaaaaaaggatgaagaccatcatgacattccaatatgattggaatgctgaaatcattgctcagttttattctactctatggattaaacatgctgatgaggaaagatttactgatgaggatatctctggagacaaaatcaagatccatgactttcgccctcccaccagggctgaagccaaggatctccacatctctgagtcagatgaatattggaaatctacaaatctgcacaagtactacaggtacatcaactctctctgcaggatgactctcatcccgaaagggggaaatcagatgaatatcctgggagaaagtaaagtcctgctttccttcatgaaaccaaacagtattgaaagcttaaatgtttttgacatgatttggcaagagatcatccatgcatccggctttcccctcaagggatgtctacatgcccccttcatcatgaagatgattgaagtggtgacacaatttcgatatgaaaaaggcacaagacatctctcatatacccccttctggattgacccaaataatccagtagggcggttgaggaaagcccctgctagctcccatgagcaagctgctgctggtccctctcgtccctctcctagtcgcggatctcccacaccacgtggtcatggtcgtggtcgaggtcgtggtcgcgggatgggagcacaattggctcatggcatcgcaactttcttttcaatgtgcatgaatatctcttctgatgttcatgagctggctcggcgatag

SEQ ID NO: 102656 - DNA, 365 bp, Zea mays
  Clone ID: MRT4577_25130C.1
accgccgaacgaggcagcacgatacccgtctatctcagcccagaaggacaacctgggtcgcgcgcaccagacaccagtagtgtgagcccgccgcggagcacggagccactaagctcatgaacctcactccggcggaggtccgccgaacactaccttggcctccatagggccggcgcgctctcctaacagaactactggagtcggcgcacgaggcgcccgagctccccacacgaggtatgcccgacgatttcgactggagggaccacggcgccgtcggccccgtcaagaaccagggttcgtgcgggaggagctggtcgttcagcgcgtacggagcgctggagggtgcgcactacctcgcaactggc

SEQ ID NO: 102657 - DNA, 547 bp, Zea mays
  Clone ID: MRT4577_25131C.1
aaattaagcccatcagacgttgacagaaagcccaaaacgccggccgtgattcaggcattgcagcaaccgaggtggaacacaacaggagctctgaaaccaaggggcgcgaaacagtgccttgaagagctgcacatgctgcgagagtatgatgataccaaaccccaaatgcaaaggtcacaacaagcagtgccaaggggtcacgagggggaaaaaggacactctcgattgactgaaataacacacgactctcgatctccctggagcctctgatggtcagggagagaatgtaaacgaacgggccctaattgggaggatgtgacaactaaccctaatgaaagaaaacagagccgcaattaagaagtcattcctagggctcactggtgagtgtgctcccacagatcttgtttggaacacaaaacataccttggatctgcatcactcaccgctggagaatcattcccgtttgaagtcacccagggagctatgtctaactggttcgtggagaacgacgaggaagcaaacgcatgggtcatgtcggacagtctgc

SEQ ID NO: 102658 - DNA, 545 bp, Zea mays
  Clone ID: MRT4577_25132C.1
ggggtgggggggtttttttaatttttttttttttttttttttttttttttttttttttttttttttttttttttttttttttttttttttttttttttttttaaaaaactttttcccatttcccctatccatttcatggaaaacatactgggggggggggtttataaaagtcccctaccttttttttataacataattgaaataaaaatttttcccccaccaaactaagggggtttttttttttaaaacccaaaccaaattaaaggaccaattttaaacctaccccgttacctaaaccctaaaatggtcaaccccccccccatcaaatcctatggttttaaactttccaaaaaaattttggcccctaaccctcctttacaaagggggctttcttgggtcttaaatggggcccaacaaccttttgaacctcctaacatcccttttaaaaaaagaccccccggaaaaccctccccctttcccttttttttttggcccccaccccgtgctccaccctcctaaacacctcatttttcacaaacttcaaa

SEQ ID NO: 102659 - DNA, 166 bp, Zea mays
  unsure (1)..(166): unsure at all n locations
  Clone ID: MRT4577_25133C.1
gcgtccgcggnnacgcgtgggtggnnatcaagnagcagnaaagtaggtgaaccgcagnncccatccttgnagcttcatcgtcggggctccagcacaacttcgtccgttgattaagggtgtcgtcangagttgcgacccgcgggacccctgtccgggcgcagggtat

SEQ ID NO: 102660 - DNA, 312 bp, Zea mays
  Clone ID: MRT4577_25134C.1
aacgcagaaagaatcaattttgtgggcataacgagagacacaacatgagtctgcacacagggactgtagctcatgcgactgacaaagatttacatgcatcacaatcaaaaatcgcgcgggctaattattgaagcaatgatacagccatgtgcctgtatatggtgccattcagcactaggtacactctaacaagagacaaaatcgtgaatgatggcaggtatcatcgtacgtttccacatgcataagctaaagtgtcgatctataaagcaggtctgacatcacttgtagatgaactagaccttatagacggat

SEQ ID NO: 102661 - DNA, 234 bp, Zea mays
  Clone ID: MRT4577_25135C.1
ttattcttcaatcatcgtcccagcagaagcaggggattcatatgacgctggtcggggcattccacctcatctccaacaacatctacttgcacacggagcgcttcttttacatgcacctcacttatgttctctacattattttccttggtaagacctctgacatgctctagttggccttcagtgccattgttgccattgagaatccccttgacattatcgtgcattctgttatgc

SEQ ID NO: 102662 - DNA, 269 bp, Zea mays
  Clone ID: MRT4577_25136C.1
aagcaaaagtaggcagttgactcttgtgaactgtgccaaacacagttatgcaatctatcaaaataaaaatattacccacagtttctcattaactttcgtatgcatttggacaaaaaacaagtaaaaagattcattaactttgtcactaaaaaaggtttttgatacttgtagtgcaatattaccttacaagggtgggcacaggttatgagtaatgcatattaaagggcatacagggtaacagggtttgcttaaagaatttggtcttcctg

SEQ ID NO: 102663 - DNA, 237 bp, Zea mays
  unsure (1)..(237): unsure at all n locations
  Clone ID: MRT4577_25137C.1
ggaggntatgagggagggaggaggaaaggaggagcggggaaaggatggcggaggggagggttncnaaataagaacaaaacaacttatctgggaaaatttcgaggaatgtccagtttgcgtcatgataaaccggaagtaccatggtaaaaattaagctcgggaaaccaaaaattttaaccggggnnnttaatacgaatctatacaaggtgtctcacaagctatacaagtctgaaacgg

SEQ ID NO: 102664 - DNA, 1118 bp, Zea mays
  Clone ID: MRT4577_25138C.1
cccggggtgccgtgtccgtgtgcgcgactagctagctagtgctgtgcacagtgtactcatctcatctctatctatccgcgcacgcaggaggagagcaggcggcccacgacgtgcagggcgcggcggccagagagtaccactactcggtggagctatccggcgaccacgggttcggggtctggcggttccccggcgtgcggcaccactcgtggggcacatgggtccatgctcaatgtttttatttcataacacgttcgtggcctccctaagaagacatataagattgatgattttcgtcaggatgcatgcatccgtgcaagatccaatagaaggttgcaatattttgtttcttccccgaggacgcgcgcctcaccacggcgccatccgctgcggtcgctccggcggcggcgggatccacgacgacgatggccgtggcggcctcggcgggcgggtcgtaccagcaggaggccagcgccgccgtcgtctctgcagactacctgcagtaccagatgatgcttctgcagggggccaccagcggccaaggcagcagcagtcatggcgggtatcctctgtactacgactatggcggccacggcggggctggcgctggcgctggtggtggtgccatgagcagctcctactctttccccgcctccacggttaccgtggcttctgtgccgtcgtcctctgcctcctccgctcccagctatggcgaggcggcgcagtgggcaggcagctggccggagagtagtgcgtggagctatccggcgaccacggcttcttggtctggatcaagccagtatgagtatccaccgtcaactcgtccacctcaatagtccatgctccatgtttcatttcatataagacgtatacacggccttcctttttttcccccatctactccacaaagaacaaagcttttgtggttcagaagacacagatagatagatgattttgttcaagatgcatgcatccgtgcaagatccaagagaagaggttgcgagattgtgtttcttctttgcttgtggtggtgttgaatcctgtatcgatcatgtgataatgattctggttgcaactaaatcgaagacgcacgtgataataaataatatctcattaag

SEQ ID NO: 102665 - DNA, 466 bp, Zea mays
  Clone ID: MRT4577_25139C.1
attcggctcgaggaccacactcctagagagaattaaaaatatccacagaccctaaatcccgaactctatgggaaaccatgacgtctaattagacatgacctctgacggcgcccagcaaggccgaatcgtgatggaactaaaccccaacgaggtgcccaagaccgcagataacttccacgcgctgtgcacgggcaaaaaggacatactcaagtgccggaagccgatgaactacaacgactacaccttacaccgagtcatacgacagttcatgtaccaaggcggctacttcaccagggacagcagcaccggacacgagtccatctacgacgagaagttccccgacgagacattcgagcacaagcacaccggccgcggcgtgctacccatgaccaacgccgaacccaacaccaacggctgccagtactgcatctgcaccgacgagacccctgggctcgacagcaagcac

SEQ ID NO: 102666 - DNA, 493 bp, Zea mays
  Clone ID: MRT4577_2513C.1
cggacggtgggcagctgtcctcgcgatggagtgtgataaggctgcagtgaaggccatgaagaaaatggagatggaacaaatgaaggccatgaagaagatggagaaggaacagaatgctgctatgaaagcactgaagaagcaggagaggcgcaccaagaagactgccatcatgatgatgaagtgtgaagaaaatggagaaggaacaaatgaaggccatgaagaagatggagaaggaacagaagaaggctgcgaagaaggccatgaagatggagaaggaagcaaagaagatggcaatggctacactgaatggctgcagggatgaagacgattcctcatgctcatcagagtcgagtgaaagtgaatgcgagggccaagttatgaggatgagccgctgcgctacaatcaccgcaccggaaatgccacctccaagcacgggtcttccaatcatagttcctcaaattccagcacctttggcaccacagccgtctcaatc

SEQ ID NO: 102667 - DNA, 1139 bp, Zea mays
  Clone ID: MRT4577_25140C.1
gcggacgccgacgcatggcgggtcaaacgcacgacgccgccgacgcactatatatccgtcgcactgcttaccctacgctacgtcgtgtccgtgtgtgccgtgtccgtgtgcgcgacttgctagctagtgctgtgcacagtgtactcatctcatctctatctatccgcgcacgcaggaggagagcaggcggcccacgacgtgcagggcgcggcggccatggagggccactactcgcccacggcctccgccgccgaggcggccggagagcggcggttccgcggggtgcggcagcggccgtggggcaagtgggccgccgagatccgggacccgcacaaggcggcccgcgtctggctcggcacgttcgacaccgcggaggccgcggcgcgcgcctacgacgaggccgcgctccgcttccgcggcagccgcgccaagctcaacttccccgaggacgcgcgcctcaccacggcgccatccactgcgggcgcgggcggcggcgggatccacgacgacgatggccgtggcggcctcggcgggcggacgtcgacccagcaggaggccagcgccgccgtcgtctctgctgactacctgcagtaccagatgatgcttctgcagggggccgccaccagcggccaaggcagcagcagcagtcatggcggatatcctctgtactacgactatggcggccacggcggggctggcgctggcgctggcggtggtgccatgagcagtttttcgggctcctactcttttccggcctccacggttaccgtggcttttgtgccctcctctgctccgagatacgacgaggcggcgcagtggacaagctggccggagagtagtgctagtgcgtggagctatccggcgagcacgggttcttggtctgcttcaagccagtatccaccgtcaactcgtccacctcagtagtccatgctcaatgttttatttcataacacgttcgtggcctccctaagaagacatatagattgatgattttgttcaagatgcatgcttccgtgcaagatccaatagaaggttgcaatattgtgtttcttcttcgcttggtggtgttgaatcctgtatttgatcatgggataatgattttggttgcaacttccaaaaaaaaaaaaaaaaaggaaggt

SEQ ID NO: 102668 - DNA, 463 bp, Zea mays
  Clone ID: MRT4577_25141C.1
gaaaaaatcgctttaaaattttttttattcaaacaactgggaaaaatttgaatgcagtcaaaaattttggtttattaaaattccgcaatccgtttttttaaaaaattttttgagctaaaacttaaaaaaaaaccttttcataataaacttttgaattaaaaaatgaaaaaacttttccaaaaaattaaaaaaaaaaaacccgtgtggcaccaaaattactggtcctaactttgtcaatcgacaccatggaaaaaggggggatttttattccttccacaaaacggttccaaacgatttaaaaaatatattgatcggtggaccattaggtttttattttttttgtttttttttcataaaaaatggtttcttattatcttttaaggaaattttttttcctctccttttttcaatgtttttccctttttcgattttttatattttttttacaattcctttttttttt

SEQ ID NO: 102669 - DNA, 254 bp, Zea mays
  Clone ID: MRT4577_25142C.1
tagctaactttgttagcgtgtttttatatcgtttgtcacataagcagtgggggggggtcggccggcgacaatgagcggccgtgtgttcgtcctggccgctgccttcggcgtgctgctcgccagcagccgccgcgtactggagctccgacctgactcagatgggaactagccggcctgctgccggagatcagacggggtactcatacgcgggggggggggccgatatttattatttcgtgccgagcagcaaagag

SEQ ID NO: 102670 - DNA, 657 bp, Zea mays
  Clone ID: MRT4577_25143C.1
atcccccttctcttcgactcactttctggataaagtattctgactccctctttgctgtccgtcgagagaccacgacgctttctcgactacagatcacatgaatgagcgacgagatgaataccattgacgatctctaaagattccggagacacaggaatgcaagaggattcaaggggtgcaaaggaaaaccccaactacccgtcttcttctagatcatctcgtagagacgacggcggcgttcctcttacaaacgtcactaccagatatctctctacaagtgcttctgagaaatgcaagcattctctacatgacaagcacaaacaatatcaccgtgtctcaagttgtgatcgaagacatcgacactccctaagatcgaaggacaacagacatcgcatagagacatctcgatctcctgatggcatcacgtcgctcaagtagatcgacgcacaaacattccacgctcatgatagcaatgccaactacttggcacactcaagattctaagacatccagagctgaccaacagtatattgagtgtacccggtacaaaccccatagacattccaggagatctccggagaaacgaatctactctgactctagcatctctgattactccgactctgatcccacaaaacacctcgccaccatcatatg

SEQ ID NO: 102671 - DNA, 604 bp, Zea mays
  unsure (1)..(604): unsure at all n locations
  Clone ID: MRT4577_25144C.1
ttgcggcgcacgggnacagcggacagcaccctccctcacatgcgccgcccacacgcggacagcaccgcacgcgcagcgcaggtgccggctcgctcatgtgtcatgtgttgcgatggacttgtgccattattggcgccacgcacgcaaatcaccagccagcccatccgtagcagcggattattatttgcccaactgcgcgagccgaatctggagccccaatagatagaatggccgcggacaaaccgcgcactcgcgcgacagggcctattctattctgttgcaatggacgccacgcaactgctgccggtgacgccgacctgccattttaaaccggcgccgcgacgagagctttacagggcgcaacgagctcggagcggtcagaatcggaattccttagctgagacctgctcgccttttagtactttgtttgcattggggtcagtgggccgggtagacgcctagacggcaccaatttgtttgttgctttcagcttcagcgcatacacaaccaatctaaaaaaaagacgtatcagaatcaccagacgatcctgctaaaaaccgctgcttttttatttattttttcccgtactctattctgtactagt

SEQ ID NO: 102672 - DNA, 831 bp, Zea mays
  unsure (1)..(831): unsure at all n locations
  Clone ID: MRT4577_25145C.1
cggtccccaaaaccctagcaagagaggctgattattttgggggcggaaaaagagaggagggagttgaagatggtgaagggagtgacgccgcgggcactggagcagcgcggcacggccccggaactcgtcgccgtgcaggaggcaccacgtgatgatgttttaatgaaggatgctgcattgaaacgcaaaatcatggaagtgccaggtggcgccgcggagaatagcaatgatcagattcgtgattccatgctagagattcggaaaatacgggattctattcttcgtaaggaattcatacttcaagacggaagtactgttgtcaataatggagaaatataaacaacctagctcaaatataatgaaagttgccaatctagctttctctggtgatgatggcataaccaagagcactaggaggatggaattgaacttgaaggaggcactcgcccaacgcaataaatgcatggtgcttgatgagatctgttatgattgcgattggatggcccctagatacacagtagtaccttcactagcagatggaatgcacgtcagtgaagtacgtgtgaaatgccctgattttgcgatgagcatcactggtgatccttgtccgaccccacatgatgcgaggtgctctgcagctgccaatatgatactggagcttggcaagaaggcagaggaaaaagaacagcatgataactaatgcaaagttgctagctgngaactagcaggccctgaggccaatattgcccaagagtnngaataagcaacttagctatttattgntctgatgtatgaacagacttaatggattatgttgtacaagtttgtatt

SEQ ID NO: 102673 - DNA, 698 bp, Zea mays
  unsure (1)..(698): unsure at all n locations
  Clone ID: MRT4577_25146C.1
ccccgcgtccgcccacgccgtccggtggctaccctagnatttggataagnaaaaacgaaacaatgtattgtttaatatgataataatatagattagataaaaataaatatcaataccttcactttctacaatcagttttctatttttctttttatatggctggaaagcaactgaagatttttcaatttatattccacagtatcatttactgaacgtcatgctgacgtgttcgttatttccagaacaaggccatctcagataaaagtagatgtagctttcataggacttaattccagcaaagcaaaggttggcagtgcaccaaacaatagcgtttatacttcattcttatggattggagaagcctatgcaacatgtcaagccagatgacatgcagatgagaaggttctgcatcaatagaaaccagagaaaaatctgtatgtgtctgtatgacatctcagataaagcctgatgatcagcatgatgaaaggtggggagttctatagctggtttaagctggagctagcttctgaagtccggtcaggtgtctgtatgtgttgcccctttttatttcatttcatgagaaaagattgttatttgttccttgaactgtacttggtcgtacttgtgaataaatattttagcatggttgttcgacaacttctaaaaaaaaaaaaaaaaaaaaaaaaaactcgaggggg

SEQ ID NO: 102674 - DNA, 861 bp, Zea mays
  Clone ID: MRT4577_25147C.1
tcgcaggcagttcaacaccattcttgggttgatggagtgaacaagcaagcctgactatgcaacctatgtgaagatttgcactgatgcttcttccatcaaggagatgattccttggggtgctctggtcatgctgactccctcattgatggaacctctttggcatcgagactctctctggcgtttttgctggtgccctggtttttggagtgcaggtgcgcactttgccttctactctctctgtgcacttcaatgtgtttgcttgttctagggtttatggagatttctgctttggacaaattgccatctctacttccaacactgtgctgcataggataacgcaagaagtatattaagaacaaggccatctcagataaaagtagatgtagctttcataggacttaattccagcaaagcaaaggttggcagtgcaccaaacaatagcgtttatacttcattcttatggattggagaagcctatgcaacatgtcaagccagatgacatgcagatgagaaggttctgcatcaatagaaaccagagaaaaatctgtgattctagtaatacttgtctagttgtttacagttcaaatgtgtctgtatgacatctcagttaaagcctgatgatcagcatgatgaaaggtgggaagttccattgctggtttaagctggagctagcttctgaagtccggtcaggtgtctgtatgtgttgcccttttttatttcatttcattagaaaggattgaaatttgttccttgaactgtacttggtcgtaattgtgaataaatgttttagcatggttgttcaacgtcttataatgtttgttagacatcagttcatgatatttgagtaatcgtatttataat

SEQ ID NO: 102675 - DNA, 1728 bp, Zea mays
  Clone ID: MRT4577_25148C.1
gcattttgtcaccaagcttgccttaattagttcatgtttttcctcacaaagtaatgcaccattttctatggaatggatcagtgctacctagatttggataagaaaaacgaaacaatgtattggttaatatgataataatatatattagataaaaataaatatcaataccttcactttctacaatcagttttctacttttctttttgtatgtgtggaacactgttttcaagtcgtccgactaatcgcgattagtcgcgattaatcgtccaagtcggtttggaccaatcgcgattaatcgcccaagtcgtccgactaatcgtgattaatcgcgattaatcgccctagtcggtcagccagaacgactagcaaatcgtccgacttgaaaacattggtgtggaaagcaactgaagatttttcaatttctattcctcagtatcagttactgaacttcaagctgacgtgcatgttcgttatttcctcgagggccgggccgcgcccccacgcccgcgtatctcgcccaacgcacactgtgcccctgccccacgctcgagcaggtagccgcagctcccgccggatccttccccacgcccaagcaggcaaccacggatctcgaccactcctgagcagtcatcgcggatctcgcccctgctgtgcccccgatgcatggctcctcattctcctctcggaatcgctccctccctccgcgttcggcaccgtgcacccccctcgcctcgcatggccgccacgggggtcagccgaggctggcgggaatacacgggccgcgtctggcatgcggctgaggagctttgcctccgcatcctcacatcctctgccatcagcctcctcttcgcgttgctcctgcctccacctctgaatcaaggtgctaggtaagaatgcagacgaggaaaccataaagacaacctacagccaagttctatcaccctgatggcccagaactcatgttttgctaagtcttctccacctaagtcctcaaaaatttgaacaaggccatattatcagataaaagcagatgtagctttcataggacttagttccagcaaagcaaaggttgacattgcaccaaacaatagcgtctatacttcattcttatggcttggagaagcctatgcaacatgacaagccagatgacatgtagatgagaaggttctgcatcaagagaaaccaaagcaaaatctttgcatcaagagagcaccgatgaaaagctgatgtagaggccagttgacaaacttatggaagaccagctgaccaaataattgaaaatctattgaactatgtatcaagttcattaatttgtgtaattctgaatgagaccttttatgctactgcaacgtctgtgaccacaaatgactgttgcagcaagaccatactccaggagtggagctgtctatatgaagagtgtaggtagagacaattggctaatattgtacaggttcagtttgcaggatcgtagcaacagggttcaaagacgtgtgtttgaaagggcagttgctgatgatcagcatgatggaaggtggggagttccattgctggtttaagctggagctagcttctgaagtccggtcaggtgtctgtatgtgttgcccttttttatttcatttcatgagagaggattgttatttgttccttgaactgtacttggtcgtacttgtgaataaatgttttagcatggttgttcaacaaaaaatacttgcaacaacaaaaaatagg

SEQ ID NO: 102676 - DNA, 502 bp, Zea mays
  Clone ID: MRT4577_25149C.1
agcagtggtaacaacgcagagtacttttttttttttttttttttttttttttgcaacggggaatgtagaccctttgccatgagaagagttgctttaattagcatactcctatggcattcatcttgcagcttgaaatggatattctccgcttcttcttttttcttttcaagatcttgggtcagcaactggactttatgcttagcctcatctagctctgactgcagctttgacagctgagattccattaccgaaacctgctccacagactgttggtgttgaagcgcacgtgcattcttatcattggttacctgtgaaaaggtgctcttaaggctttttatttaaccggggggttgcccgcgcactaaaagatgcctccacaaattttggggaatgggggcggggcagctcttattttttgggctcgatattgtccccccctttggcattaagcgcccaatacggtgaccgttggagccctacttatatttgctccccccttgat

SEQ ID NO: 102677 - DNA, 315 bp, Zea mays
  Clone ID: MRT4577_2514C.1
atgaggagcgaagaggtggtgcgccaggtcagaggcaaagtgttcctctccagactgggccggaggaggagcactgccagacgggtcctggggcggaggcaatgtttcggcacatggagaagaaagccgcaaacccgtgggccaagcgggcacccatcccacggccacgacctcgacctcgaccacgaccacgtggtgtgggagatccgcggccaggggaagggcgcgaggcaccaccagcagcagcagcagcaccagcaccagcagacggacccgcagatgtatgagcacgagaactggagggggctttcctga

SEQ ID NO: 102678 - DNA, 708 bp, Zea mays
  Clone ID: MRT4577_25150C.1
gccggccgggtcggggtcgtgagttcgaattcacgcttcaatgcactcatacgtgtccggtgagctctcccggtttcaccacctcacctcagccggctggacgcgccgcttttgcctagccctcgaccgccgcatattgcgatacttcggcgtgccacacgcactcgatcattttttgtagtagcatctagaacgcatccccccatgtaatcttcatacatgactcctattctacccgcatctcacatgccaaagcattaggatggctacgtccaatggtccctggctccatggaatccaatgataatcacccaagtacaccaccattggactgtgtcactccggttggtcaattttcatcagcagtgttggaggatgcaccacatgctattggagccattgatgccacccctatctctgaatacaatagaaggtcaaacatatcactttgatgccgatgatgatcctatactcagcgtatgaaagtgaacggaagactataaaaggccgactcccgattctggtcgagatggctcaaatgttaaggtacagcgcactaagcccacttacgacaattttgttgctgggaaagagcttgcctttctgccagattcatccgataccagcgatagtcgagaaagcaggtctcatgacctttgaggcactcctccaaagacatctgcagatggttgtcacacagtactgcta

SEQ ID NO: 102679 - DNA, 240 bp, Zea mays
  Clone ID: MRT4577_25151C.1
tggagggcgcgttcgcccagctgtggccctgagctgagagcaaagtatggagcgaaacttttcgctgagattggggggggggtacttggggggggggggggtcggaaatggggtcggagacgttcttggagatcctgttgggcattctgctgtcggcggtcggcgtgtttcttcgctatgggattggggttgagttctggatttggctggtgcttaccatactgggatacaattccgggc

SEQ ID NO: 102680 - DNA, 229 bp, Zea mays
  Clone ID: MRT4577_25152C.1
ctaacgcgttgcgttctagatctatagcgaatgtcccattacatattagtgatccaggaggctgatttgaccgcattagtcatcttctattattacctcactaaggctggagtcaattattctcttgctgactcagaattcaaggatcttacctaccttgaacttgattactttgtagaagacagactagattgtgatcactctacgacaaagaaatggctacaatgta

SEQ ID NO: 102681 - DNA, 285 bp, Zea mays
  Clone ID: MRT4577_25153C.1
gctgtctggttcaagaccggcgcgctgcttctggactgcaacaccctcaactacttcgggaacagcgtccccatcaacctggtggtggccgtgatcgcggaggtcatcctcgtcggcggcgccgagtactaccggatcaccaacggactggaccttgaggacaagctgcaccccggtgggcccttcgaccccttgggccttgccagcgatcccgaccaggccgccatcctaaaggtgaaggagatcaagaacgggccggttgcccatgttctcaatgttcgcctt

SEQ ID NO: 102682 - DNA, 825 bp, Zea mays
  unsure (1)..(825): unsure at all n locations
  Clone ID: MRT4577_25154C.1
ttgggtacctcgaggccggccggaggtctccaccccgtaatctccagtctgcatgtaacaaaccacgaacccaaccctcgcatcgctttcgcactgtttagtctttactgggcctttgtgctcccacaacatccaccatgtctggtgctcgccccctactgtcgaaccgcgcgtcttctgagataagcggtggccgcgatctggcagaagaagatgccctactcacaggccgccggaccggatacggacagaagggatattcgcaatcacagaaatggagagaagtcggactgtttgtctgggccgttattgcaacaggcgctgtcgttgtgctcggcattctcctccaaagttcgaccgacgactccaagacaccccaagcaagtgggaagaggaacctgattttcatggtttctgatggcatgggccctacctcactttctctcacgcgatctttcatgcagttccagaatggcgctcctttcaatgagcagctcgtcctcgatcagcacctcatcggccagtcacgaacacgctcctcttcctcgctcatcaccgactcagcagccggtgcgacggccttctcttgcgcacagaagagctacaacggcgccatctccgtaactcctgatcacgagccatgtggtactgtgctggaagcggctaagaaggcgggatacatgaccggcttagtagttacaacgcgcatcactgatgctacaccggcgtgctttgctgcgcatgtgaacatgcgatctgaggaagaccgcattgcagaacaaatggttggagaccaccgcttgnacgtgtggntgacttgatgtt

SEQ ID NO: 102683 - DNA, 485 bp, Zea mays
  Clone ID: MRT4577_25155C.1
gtggggggggggtttttttttttttttttttttttttttttttttatttttttttttttttttttttttttttattttttttttattttttttttttttttatttgggcgccctgatggtccccgcagatccccgcgggaaaccggggggggggggggggggggcacaaaggggcccccggaagccccgggggaagacccggccgtgcctaagcggggagcaactcacattaggggcaaagcgcaaacagaacgcttcccaggggaaaaaccgggggcgccaggggggccaaaaaagggaccaacccgcaaaaaaaggcagaccgcggaggggccgccaaggggggggaaaccccgaccaggaagacgggcaaaaacagcgggccaaacacggaaagagccggggagagttgcggcaagcaggccacccccccttgccccaaaaggcgaaaaccctgttggacggcgggaacggcgggtttaaca

SEQ ID NO: 102684 - DNA, 186 bp, Zea mays
  Clone ID: MRT4577_25156C.1
tcctctatagcggccgaccttggctagttctttttttcttttttttttttttttttattttttgtgtgctttgtgtttttttttatttttaattgttttttcttctagcggaccctggggctcctcccgtgaaaacctcgccccgtacttggagggtgaccaagtttccttttactgagactaatt

SEQ ID NO: 102685 - DNA, 280 bp, Zea mays
  Clone ID: MRT4577_25157C.1
ctaagaattttaaagcagtgtgcagtatttcctatcagtttcgtatgcgaacaatgaaaatgccatttttccttgtgacctctgtatatggaccaatactgtctatgcactgcatagcatttttacagatgcgcaaacatggcaatgtctgtaaacagcatttcaatgtttgcgcatctgtaaaaatgctatgcgtgctagacagtattgctccatatacagatgtcgacaaacattagaacatgctgttatacagatgtgtgccatttaccaaatctac

SEQ ID NO: 102686 - DNA, 142 bp, Zea mays
  Clone ID: MRT4577_25158C.1
cccacgcataccgaaatcaacaacgcccgcggttgtgcatggctaccatatggcgtccattacggctctcttggtcaacttgtgcgccatcctgctgcacccttctgagtgggacactccggacgagatcggcccagagccg

SEQ ID NO: 102687 - DNA, 570 bp, Zea mays
  Clone ID: MRT4577_25159C.1
atcttgtcgtcagcttgttgcatatgcctacgggtgctgttcatgttcagtgttttggttgcttgacaataaatcttgtactggaagaacatcaagttggtaaggtatattgtggacaatgtgatacactcttgatgtatccttttggggctcctgctgtgaaatgttccaactgtctttttgtcactgaaatcggagaacgcaatgttcggccgcggatattgatggaacagagtgtctcacctgcggcacaagaggaggttcactagagagctaggtcaggctttaacaacggctggtagtggaacctagatgatatcgctcgtagtaactccagacgctgccatggaaaactcgcaggtcatccggcatgatcctgtagctgtaacctcaaatggcctgtgggctgtggaagtgtggagtggatggataccttcagatgcagcctgtagtttagggatgaaaaaggcggatgcagtatggccaggatcaactgctaagcgaaaagattatatccagccgtagccttatcatagggaagatgaactgcttaagctcggctgtaactgg

SEQ ID NO: 102688 - DNA, 1694 bp, Zea mays
  Clone ID: MRT4577_2515C.1
tctttggatgatttggttgcatgcttgcacgcaggatatgtcccccaagttgagttctcttttctttgcacctgtgcacgcggctgcttcccccctatatatatctatataaaaaaagaaatcggacgtggcgtcggcagccgggcaggtaggaaaaggtatcagcgtcgccaatctccatggagctcacaggcgccgcgctccggcgatacgcgctgccgtcggcgtccccggtggccgcgagggtggggaggaggaggcgaccagccagggtggcctgcgtcgggggcggggggttcgcggaggaggggcacctcaggtactacgaggcggccccgcggaggaaggcggtggaggcggtggcgagggacctgggaaagctccgggccatggggctcgtcgcgggggacgcagccaaggagaaggtcctctcggaagccacggatcttctgctgcaggagctgagccagatgaaggatgcggaatacaagataaacaagatggagaaagaacagaatgctgctatgaaagcactgaagaagcaggagaagcgcaccaagaagactgccatcatgatgatgaagtgtgaagaagatgagtcatctgagtcgagcgagagcgattgtgaggacgaggcaaccatgaatgccgagcaggacatggtgatgtcaacagcggttcccgaggttgttgcatcaagcatctcagctgtcctcgcgatggagtgtgataaggctgcagtgaaggccatgaagaaaatggagaaggaacaaatgaaggccatgaagaagatggagaaggaacagaagaaggctgcgaagaaggccatgaagatggagaaggaagcaaagaagatggcaatggctacactgaatggctgcagggatgaagacgattcctcatgctcatcagagtcgagtgaaagtgaatgcgagggccaagttatgaggatgagccgctgcgctacaatcaccgcaccggaaatgccacctccaagcacgggtcttccaatcatagttcctcaaattccagcacctttggcaccacagccgtctcaatctcaaccttcagagccagcaaccgcagtgcaagccaccagagtcagcagcgttgcagtaactgagacatccacaaccagcagaattgaggtctgcatggggggcaaatgcaagaagtcaggcgcgcttgctctcctgcaggagttcgagaaggctgtgggcaccggtggcgcggtcgtcggctgcaagtgcctggggaagtgcggcctaggtcccaacgtgaggctgaggagcggtgcctctgcggaaggttctgcaaaggggaacccactctgcatcggtgtaggctttgaagatgttggcaccatcgtggctggtctctttggaggcgctgatctgggcatgacacccacctagacctggtggtactacctcgacctagtcgtacttcaagaaatcaagagcacaacttgtaatcacagatgttgcattgaacaaatgtatagtgcagctacggccttgctagtgctactgctaagtttatgtactctatgtctatatagaacacgtatggtaatcttgtttctggtatgtgatccatattggtcagtgattgttttcatgccagatgagcactaaaaaaaaaaaaaaaaaaaaaaaaaaaaaaaaaccaaaaaaaaaaaaaaaaaagcggcc

SEQ ID NO: 102689 - DNA, 237 bp, Zea mays
  Clone ID: MRT4577_25160C.1
gtggcactatctacaagggggtcctggacgacggccgagcggtggccgtcaagagactgggatacataaggcagcacagcagagaggagttccacgacgagctgcacgtcatcgcaaggatcaaccatatgaacctggtaaggatgtacggcttctgctcggagaggtcccacaggatgctggtcctcgagtacgcggacagagggtccttggctgacgtgctgttcagaggcagag

SEQ ID NO: 102690 - DNA, 519 bp, Zea mays
  unsure (1)..(519): unsure at all n locations
  Clone ID: MRT4577_25161C.1
tccaaaggtgtaatcaatggaactgcacctaatcctgtgcgtttgtcggagctatgcgaacggctggggcgaatcgtcgggcggccctcctggttgcccgtgccggaattcgcgctcaaagcggtgcttggagaaggcgcttctgtggtgttggaaggacaaaaggttcttccggcgaaggcaaagcatctgggcttctcctacagatacccctatgttgaagacgctctcaaggccattgctcgagacttgtaggttggcgacagtgagcaatttaatttaatttctctctacaaaaattaaataggacctttaatttgtgacgacacgcatgcatgcatgtgtatagagtttacactccgatcctccggcctcgtttgcatgcgcgtgttatgtaacacttgctctcttttcccttcttttgacatcatcaaatgttgtactcctagtagagtacttcttaatacaagtaagagttcacctttcataaggacagnnnnnnnnnnnnnnnnnnnnnna

SEQ ID NO: 102691 - DNA, 177 bp, Zea mays
  Clone ID: MRT4577_25162C.1
agggcgcgatccccagactgacttagatggcggctcgtgcgcggcacacacacggtggcgcgagcacggcccttcatgggcggcctggccccactcaagccctgactcacctactgcgacagacacgcaataatgactccaagctgggctgagcttcctaacatgattctttttcta

SEQ ID NO: 102692 - DNA, 565 bp, Zea mays
  Clone ID: MRT4577_25163C.1
accggccgagctggcggtgaccctgttccgccgagccgagccgtcccaccacatccctagcggcggtcgcagctatgtcgacgtagcagccgacgcgtgaggacagcgggaacatgggcaagctggcaaaccaggcgcgagcgctgacgaggtaggtggatcgagttcatgtgaacgagtggcgcgctccgccatgggaaacggcagaggggaggaactctcctaggaggagcgcaacctgctgaccatctcctacaataacgtcatcaggggccgcttggcctcgtggaggatcctgtcctccatctaacagaaggatgaggggcggggtaacgaggcacacgccgcctccatccgcacctaccgctccgagatcaaaatcgaagtcgaccacatctgtgacgggatcctcggcctgctcgactcccacgtcatcgcatccgacgacgctgacaagaccaaggtcttctacctcaagatgaagggggactaccgcaggtaccttggtgaaattaaatcgggtgaagagatgaaggatgctgcgtagagcaccatgaatggctac

SEQ ID NO: 102693 - DNA, 573 bp, Zea mays
  unsure (1)..(573): unsure at all n locations
  Clone ID: MRT4577_25164C.1
ttttnttttttttttnttttttttntttttttttnttttttttttttttttttttttttttttttttttttttttttttttttttttttttttttggcaaaaattcaaaaaaccccccttcccctttttaaccggggggggccccccaaaaaaaaaggaaggccccctttttaaaaaaaaaaaaaacccccttggggacccccccgacccccttttttttggccccccgcccaggtaaacccccaacagggcttaaacccagggggaaaaaggcccaaatcccggccccaaaaaagttgggggcccctggggccaaaaaaaaaggtacccccggttcccgaccccgggggcccccccggaaatcccgacccggacccggagggggacccactttcccctaaagggagccgaataaaacctgggggaaacaagggcaaaagcggttcccgggggaaaatggtttccccccacaaatcccccaaaaaaaacaacccgaaaccaaaaagggaaaacccggggggcccaaagggggggccaaccccccataaatgggggggccccaccggccccttt

SEQ ID NO: 102694 - DNA, 346 bp, Zea mays
  Clone ID: MRT4577_25165C.1
taaaaaaaaaaaaaaaaaaaaatcaataaaaaaaaaagacaaaaaaataagttcatccccagtaaattggtcacctgaaatgtaagggggattactctaaagactgaactctaaattacattggtcgggtcgcctcattcgtctgtcacattgtcatcatcttcggtgtcgggatgtctgttatccaggttgagaatagggaatccgctgccgtgagtaaactatatgctgattctggaaaataccgcttacatcagctggcgaatgcacaatacgatcttcaacggtatcagtttccacttattcgccacctgggttgagggcgtgaatggcagctttatgggcc

SEQ ID NO: 102695 - DNA, 508 bp, Zea mays
  Clone ID: MRT4577_25166C.1
taggggccttttttttttttttttttcttttttttttttttttttttttttttttttttttttttttttttttttttttttttttttaaactaaagattggggaggggcagggtacaaattttaaaaaaagttttatcccgaaagacgagcaaaaaaaacgggggaattttatatatagagaggggaaaaaaaaaaaaggccccccccgctagggacggaaccgaccaacttccgattttccgagtcaacaacaaaagggggccttgactcaggccaaggctgacggagggaactggggcttccgggcccacaggggggggccgacgaccttacccactttcccattcggggggggcccacttgccaaaggggggcggccgaacccggcccgggggcaaagagaaagggatggggggccccggccaacttgtctccccccgctttttagccgggggtcccctctcctgcccccaaaacgccgctgctgacaccccccccgagtcccga

SEQ ID NO: 102696 - DNA, 451 bp, Zea mays
  Clone ID: MRT4577_25167C.1
tttgggattcagttgtcctgtgacggcctggggcgaccgtagaccccgtgacacatcactgcctaccaacccgcccctagctgctcctgctgcgtgccgtgtgcgcctcgaaggggttcattcagcgctaatggaatgaattccatttacgccacgcaacaaacttaaccaacttatcaccgggatagtaatgaccgcagcatccgttgaatctcccgtacgaaagaacaggatatagagcagcagaccccaccctgacagtgtctccaactcgtcgtcgtcggcgctgcctgcctctgattgccgccactcagagatacttctgctcagacatgacagctgtgaccgattcatcagcgtcagcattttactggttctcctggggccctggcgggccttctctctctctctctctctctacaactctattaaataaataattaaatgtttc

SEQ ID NO: 102697 - DNA, 196 bp, Zea mays
  Clone ID: MRT4577_25168C.1
taaaatattgagagtgggcaatgaagactggtatgtttgccctatacccaagggacaaggtgcatgcagttacaaggtgccagcaacagatgctgttggagctggagacaacgacgacgcaaatggatcagccaatcccgcccaacctaatgacgacgagtggccattcgacgtcatcaacgatgaaatcgtgccg

SEQ ID NO: 102698 - DNA, 1156 bp, Zea mays
  unsure (1)..(1156): unsure at all n locations
  Clone ID: MRT4577_25169C.1
ctaaattaagtgccttgggaacagcagtttaactttaccttctactgacaacatgccaagttggggaagaatttctttatcaagtcaagtacatgataccaagcaatctagtggatatcctgcaatcaccttttttggcccgggctaaaatgcctacgctcaggactactccacaaacagtgatatctttggtcgtttgagagatacctccgaagactcttccaaagtggagcaatctatgtatgccagcactcgagattatggcaatgccttcaatagttcaatgattgccggtactgtagatcatgatacaaatgttgaaataactcagacatctgcagattccacacctgttaattctgaaagacaggatccttttctgtcatctggttatccaactacatacactcgatcaaggccatcatttcttgatatgattggagtgcaaagagcccccctaacaactcaagcctcatatagggagcctgcaaaggctaatcaactatccagctattcaaattatcagagttcatttttgcagcaatcaaatcaacaatccactggaagtaatgctgcagatatttcttttgcatcagaaagtcaggaatatagtcatgaaaaggggtcatatggcagctccactcctcctgatttcttacttcccaaagaagaaagaagtatacaccatggtaatcaaacattccaaaacttcacaactcatgggaatgatgatgattttgcagcactagagcagctcattgaagatttgacaaaagagaagttttctttacaacaaactcttcagaaatctcaagagctagccgaaactttggcgacagataactctgcattaactgataagttcaaccaacaggcacatgtaatcagccagttgacatctgacatggagagattgcaggaagagattcaagctcaactgctggctctggagtctatcaggaccgaatatgctaatgcacaactagaatgcagtgctgcagatgagagggccaaagtacttgcagctgaagtcttctacgaaagcgttgagtgtcagtgagctcaaacatgaaaggagttcttggatcaatatctcgtacatgcaactggtngctatgaggctatanaacaatngtcactagctggcgctggagtc

SEQ ID NO: 102699 - DNA, 185 bp, Zea mays
  Clone ID: MRT4577_2516C.1
cgcctctgaccagttcggtaccgccggatcgtcagcgtcactccccgcctcctctccccaatgacagtaggtttcacctcggaatggcggatcatgctaaccaatgtcactgtccttcagtaagcacggatcgccagattccattctggcgctcgagtcacactcgtgcaaggatgtggcggtgc

SEQ ID NO: 102700 - DNA, 377 bp, Zea mays
  unsure (1)..(377): unsure at all n locations
  Clone ID: MRT4577_25170C.1
ctataactttttattcacaactacntaatcatctatcctttnnnaaaagcaacctttttttttttttttacaaaatttataccctcacaaactcacaataactaaaactttaactcaaaaccatacttcacttcactattacatttttatactaaaaaaacaaaaaaaatcacacatgatctctctcacataaacttcacaataataacttttaaaactttctccccaccacccacaccctacattctatttcacacacatttaccttccctcaacctttatcaacttatataacacacttctcatgaacacatcatataaatcttactcaaactcaattgacactccaacttctaccatcttcacacttattctct

SEQ ID NO: 102701 - DNA, 243 bp, Zea mays
  Clone ID: MRT4577_25171C.1
cggggcgtggaccgtgtacgtcacaagcctctcgctcgggcgactcgccatgctgtacacgggctccaccaacgcctgcgtgcagatgcagagcctggccgtgcccgtcgactacgccgacccggtggtcaccaactggacacaagcacgatggcgactacgagctgtacccgcccacgaacatcgggcccaaggactctgcgaaccccaccacgcatctggatcgacccctgggacggcagc

SEQ ID NO: 102702 - DNA, 331 bp, Zea mays
  Clone ID: MRT4577_25173C.1
aagcaacaagccacccactattacattatcacgagggcacgagcgccagcattaaacattggtccacgcatcattatttatataatatacatggtaacagacacgctgcacgacagacagtccaagcggcatggcacggttactgttgatacgcacacactgcaaatactagatcgttgcggactcgtgggcccactcaagtattaccgaccgccacctaacgggcttccacttttgcttataatgcggcgtatcttagctaggggacaccatggtgatagatgactcctgtgagacagtgttatgatcatagcattgcacacaccataca

SEQ ID NO: 102703 - DNA, 284 bp, Zea mays
  Clone ID: MRT4577_25174C.1
ctcccgcgaagaggagatggcggagtcgttgaggtctccgcgccgctccctgtacaaactggtgggctcgccgccttggaaagaggctttccggcagagatgcctggagagaatgagaaacagccgggacaggctcctaaacaggtaccgccaggctggaagcagtgggccagggaattctcagaacagctttctagttcaagaggtgatggaagaagagtggaatgctttgcagtcagtggagaattgtccagaagacttggctcagctggaggagctgatag

SEQ ID NO: 102704 - DNA, 2066 bp, Zea mays
  Clone ID: MRT4577_25175C.1
gaacggaacccagaggaacagagcagacgacgcgaggcgatttctgcgggtttgcttgctccatctgtagaccttaggccgccgccgggcgaccgtgcgcgtgcggtgctcacgccccaccccgctcaggtgaaggcacttcaagatgggcgaggtacacgaagctgacaagaacattgagatctggagggtgaagaagttaatcaaggcacttgatgctgcaaggggcaatggcactagcatgatttctctcatcatgccacctcgtgatcagatttcacgcgtcactaagatgctgggtgatgagtacggaactgcctcaaacatcaagagcagagtcaacagacagtctgtgttggctgccataacctcggctcaacagaggttgaagctttacagtcgagttccccccaatggtttggtgctctatactggtaccattgtcaccgatgatggcaaggagaagaaggttacctttgacttcgagccatttaggcccattaatgcttccctgtatctctgtgacaacaagttccacactgaggccctgaatgagcttctgacgtctgatgacaagtttggtttcataatcatcgatggcaatggtacactgtatggtacactgagcggaaacagcagggaggttctgtacaagttcagtgttgatcttccaaagaagcatgggcgaggagggcaatcagcagtccgctttgcccgcctgcgcatggagaggcgacacaattacctgcgcaaggttgctgagcttgcgacacaatacttcatcaatcctggcaccaaccagccgaacatcgttgggcttattcttgccggttctgctgacttcaagagtgagctgggtaaatctgagatgttcgatccacgccttcaggccaaagtagtgaagatgattgacgtgtcttatggtggggacagcggcttcaaccaagccatcgagatgtctgccgaggttctttctgatgttaagtttgtccaagaaaagaagctgatcgggaagtacttcgaggagataagccaagacacagggaagtacgtccttggcatccaggacaccatcacagccctggaaatgggcgcggtagagatcctgatcgtgtgggaaaaccttgatgtcaggcgttatgagctcaagaacagtgccacaggagagacagtcgtgaagtacctgaacccagctcaggaggctgaccagagcaacttcactgacgaggcgacatccggagatctggaggtcattgacaacacgcagctgctggagtggttcgcggagaactaccaccagttcggctgcacgctggagttcgtcaccaacaagtcacaggaaggttctcagttctgccggggattcggcgggattggtgggatccttcgctacccagccgacgtcagtgcctaccaggacggtgacttgtctgatggggagtatgatgaagacttggaatagcaatcaaccagaactcaaatgaatccggtccgggaggagcctgcgctggcccgggccgtgccgggggggaaccctgaaacttccaaacgatcggtgcaaggagaccatggtggaggatctgtagggaaggaggcttgagcaacttatataggatatatatatggaagcttgtcaagctggtgagtggagactttggagacggtgttttgctctgttgatccgagcttgcagtctggtgatgctactaggaatcagccgtggacgctgccttctgttggtcaggagagcctataataatcgatcaactagcatcctattagtattgggttggtgccagtagtatggtgaataaaatacctggaggactccgaggttgcacgtacgctttatgacgtgcgtgatatctatgattgtgaaaatgtctgtgacctgtcatttcttataatccatgttctcgttgttgtggattgaggcaatattttgtggaagatttgtcattgggtagtaacttctcgcagagcaagtgcagtaggatgatgtgtgaaagaggaacagggagagaagaaaagccagatgttcatgaacagacttgatattttgtaag

SEQ ID NO: 102705 - DNA, 142 bp, Zea mays
  Clone ID: MRT4577_25176C.1
ccctgtctccgtccctgcctttggaggagcggccgcgtgggccggttcggtcaagcggatggcggctgctgtgcacagccttgctgccgggggaatcctgactgagcgtgcccccgtgcgtggtttgctggctccttgcttt

SEQ ID NO: 102706 - DNA, 1154 bp, Zea mays
  Clone ID: MRT4577_25177C.1
cgagcggcggcggcgctcgcaggccgaggcggccggcggaggtgacaaggaggccgtccgcgcctacttcaactccacggggttcgagcggtggcgcaagatctacgggtcggcgacggagggcgtgaaccgcgtgcagcttgacatccgcgagggccacgcgcagacggtggcggcggcgctggccatgctccgcgactccccgctggagctgtcgggcgccaccgtgtgcgacgccggctgcgggacggggtcgctggccatcccgctcgcggcggcgggcgccgacgtcctggcctccgacatctcggcggccatggtgtcggaggcgcagcggcaggcggcggcgcagtcgtcgtcgtcgtcgttccggatgccgcggttcgaggtccgcgacctggagagcctggaggggcggtacgacgtggtggtgtgcctggacgtgctcatccactacccgcgggaggaggcgcgcgccatgatccgccacctcgcgtcgctggcggacaagcggctgctcatcagcttcgcgcccaggacgctctacttcgacttcctcaagcgcgtgggcgagctgttcccgggcccgtcaaaggccacgcgcgcctacctgcacgccgaggccgacatcgaggacgcgctccgccaggccggctggcgcgtcgctaaccgcggcttcatctccacgcagttctacttcgccaagctcttcgacgccgtgcccgtcggctcctcgacgtagccgtgtaggccgcccgccgtgtgcttgtgtgtttgtttgcctcacgcgactgtttatagagctccagacggtcgccgcagcgcgcgcggcggcgtagcctgtttgtacttgcaagctcactcagttccattccgtagcttgatgccttgattgattcccacgtagacttccatcgacaaacacaattgcagggttttgagtttttgacccaaacgacacgacaaagagttcttatcatccaggggcctcgaccaccgtgctcgttttacaaaagctgtaattaaagactactttgcaagattatccatattttatgtgatatggctttcgatttttctattttaaggggaatatcacaaccatatcgctccaaaaagaaatcggccggtcaactgggggggccccttttaag

SEQ ID NO: 102707 - DNA, 396 bp, Zea mays
  Clone ID: MRT4577_25178C.1
ggttgggttttataaaggttttgggggtttttaaaccacagatgcagacccatcacattccatttcccatgatatttataagaccccagaatacccaacggactgtttttttcaaagaattcctcatcgaaccacctcaccataggggaaaaaagactaccttctacaatacttcctggattcacccaggtaatgcaatgaaaatgaactttccactactttctgacggaaaagaattatttcagaggaggctacttggtgaccaaaattatctactattctcacagatgcacccttttcatcccttgcaaatttgatggaataaactacaatttgactgcgccggtcagtgaaaaatatggataatcattgacgttgcagtatgttgagatctag

SEQ ID NO: 102708 - DNA, 1377 bp, Zea mays
  Clone ID: MRT4577_25179C.1
ggccgctttttttttttttttttgaatacaaaaatatagttcatatcgatttactctatgagctggttattctacattagtctgcaatagacttggtctttttctttcttcctcttggtatcgctaaataataaagacaacaagaattgaagaagagagagagggaaaagaaaagcccctcatatgtcatcatgatgtttggttctgttcgtaacacacctctgtttttttttaccccactttcccttctctttacttcttgagctctccaccatcggtctcctcaggccagacgtcgtagccaaaggtatccttcatattaacaaagcgcgtgtgcctgccccttgcaacctcctcgacagcgtcaaagtcctctttgctgagctcgggaatgttccagttgctctggatgcgcgagggggtggagctcttgggcaggacgacgtagccgcgctgcagaccccaggccagcaggacctgagctaggtcgtagccgctgcgctgggcaacctcgttgagcttggcgtttgtacgcaccttctcacccgtgctggggacttggttctgggagccgaggggtgagtaggccgagacgaggatgtcgttgtcctggcagaactgacgaggtctgagttgggcaggaaagggtggatttcgatttggttcatcatgggcttgacctttgcgaagctgaggagcttcttgaggccgtcgatggtccagttggagacgccgatggatttggccttgccggactcgtagatctcctccatggcgtgccatgtgggctcggggttctctgtgaggtccttcttgatgatgtatttgccgtcggcgccgatcttgggcatgtggttgtcgtcgctctcggcggcaatgggccagtggacgaggaaggcgtcaatgtagtccatgcccagcttggtcaagctgctgttgaagctccatttgacttgatcgggctcgtggaggtggttccagacttttgtgcagatgaagagatctttgcgggtgacgctggggttctccttgaggaaatcgcgcacggcggcgccgacctcctcctcgttctggtaaaaccaggcgcagtcgaggtggcggtagcccgtcttgagtgcggtggttacggcggcgtacgtctcgccggatgcgccctcactggcgaaggtgccgaagcccacggcggggatggtgacgccgttgtagagcttgtaggtcttttggttggcaaggggagccatggctgcggtatgcggagatgaatgtgaacaagattgagaggaggttttgtctctaggaattgcacaggaggcaaaggggaaaacaaaagggtaggatagaatgagatgggatttcttcccggcccccctcgagctc

SEQ ID NO: 102709 - DNA, 3831 bp, Zea mays
  Clone ID: MRT4577_2517C.1
atgtctacacaacgggaccatgtggatcctctcctcgaggaaatccccgtcacatcttctggtgaggaagtggaccccaaggtcctcgacctcgccatgaagattgccgagaaaatgttcctcaaaatgaaagaggaagatgctaggaaaaaggccgaagaagaggaatcaagaagaaaggccgaagaagataaatgtaagggaacatttgattataatgacgatctagtggatcttttggtgtctaaggtattgagcaaggtaagtctcaacaccaaaggatcatctaccaaaagcagaggtaatgactttagcaaagttcaattcgattactctagaaattatattcccaacttctcttccgccccacttgggaagttaccaactcttagtgagttgaactatgaagagtgggccgacaagatgaagtcgcatttaatcggtgtgcatcctagtctttgggagattgttcatgtaggtatgtataagcccgcccaaggagaagagatgaccccgaaaatgatgcaagaggttcatcgaaatgctcaagcagtgagcataattaaaggaagtctttgtccagaagaataccggaaagttcaaggaagagaagatgctcgtgacatttggaatattcttagaatgtcacatgaaggagatcccaaagctaaaagacatagagttgaagctttggaaagtgagcttgcaagatatgattggacaaagggtgagtcgctccaatcactctttgatcgattgatggtattggtcaacaaaataagagttcttgggagtgaagattggagtgactccaaggtcacaagattgttcatgagagcttataaagagaaggataaaagtcttgcaaggatgataagggatcgtgatgattatgaggacatgacgcctcatcaattatttgcaaaaattcaacaacacgagtccgaagaagcccccatcaagacaagagactctcatgccttgatcacaaatgaacaagacaatctcaagaagagcaaagaccacaacgcaaagaaagtggtcgagacctcaagtgatgaagatagctcaagtgatgaagacacagctatgttcatcaaaactttcaagaaatttgtaaggaagaatgacaagttccaaaggaaaggaaagaagagggcatgctatgaatgtggccaaaccggtcatttcatagcggattgtcctaacaagaaggaacaagaagccaagaaggaatacaagaaggataagttcaaaaggggaggcaagaccaagggatacttcaagaagaagaagtatggacaagctcatattggtgaagaatggaactccgatgatgagagttctagctccgaggaagaggaagtggtggcaaatgtggccatccaatctacatcaagcgcgcaactcttcaccaaccttcaagatgactcctacactccaacttgcctcatggcaaagggagataaggtaactttatttagtaatgatttttcaaatgatgatgatgatgatcaaattgccatgaaaaataaaatgattaaagaatttggcttaaatggatacaatgttatcacaaaattaatggaaaagctagataaaagaaaagcaactcttgatgctcaagaagacttgcttgtccttgaaaaggaaagaaacctagagcttcaagagttgattcacaataaagataaagaagtaattaacatgaaaacctctattgataatcttgcaaatgaaaagaatgcacttgaatcaagcatgttaagcttgaatattcaaaatcaagaacttcaagtgcaacttgaaaactgcaagaatatcaatgcctcatgtttagttcttgaatctaagtctagattaaatgataattcttgcaaacattgtgccaagtatcatgcttcttgttgtctaactaaccatgcaaggaagaatagcccacaggtgaaggtcaaagagatttttaaaagatgctctagcaatgatgggttaaagaaagttgaacccaagtacaagtcccttaagcccaacaatggaagaagggggcttgggttcaactcatccaaggaaaaccctagcacagtgcataaggggtggagatcccccaagttcatagagggaaccaccctatatgatgccttggggaggattcactcctcaaatgacaagtcacctcaggtctactcctctggtgggtcaagttgggtgcttgacagtggatgtacaaatcacatgaccggggagaaagacatgtttcatacattgcaactaactcaagaagcacaagaaattgtgtttggagatagtggcaagagtaaggtgattggtattggtaaaattcctatctctgaccaacaatcactttcaaatgttttattagtagattccttaagctataatttgttgtccgtttcacaactttgtggaatgggttataattgcttattttcggatgtggatgtgaagatccttagaagggaggactcctcagttgcctttaccggtcgcttgaagggcaagctttatcttgttgatttcacaacaagtaaagtgacgcctgagacttgtttagtggcaaaatccgacaagggttggctatggcatcgccggctagcccatgtcggtatgaggaatttggccaaacttcaaaaggataatcacatcattggactaacaaatgttgtatttgagaaagatagggtttgtggcgcatgccaagcaggaaagcaacatggagtcccacatcaatcaaagaatgtggtcacaacaaagaggccattggagcttcttcacatggacctcttcggacatgtggcctacattagcattggtggtagtaagtatggtttagttattgttgatgatttttctcgattcacttgggttttctttttgagtgacaaaggtgaaactcaagaaattttaaagaaattcatgaggagagctcaaaatgaatttgagctcaaaatcaagaaagtgagaagcgataatgggacggaattcaagaacacaggtgtcgaagaattcttaggagaagagggaatcaaacatgagttctcggtgccttacactccacaacaaaatggtgttgtggaaagaaagaaccgaactctaattgaagctgcaagaaccatgttggatgaatacaagacacctgacaacttctgggcagaggcggtcaacaccgcctgtcatgcaatcaaccgtctctatcttcataagatctacaaaaagactgcttatgagcttctcactggtaacaaacctaaagttgattattttagagtattcggttgtaaatgttttattcttaacaagaaagtcaagagctcaaagtttgcttctagagtggacgagggcttcttgcttggttatgcatcaaatgctcatggatatcgtgttttcaacaattccaccggtcttgttgaaatagcgatagacgtgacatttgatgagtctaatggctcgcaagggcatgtttctaatgacactgcaggaaatgaagaactaccttgtgacgccataaagaaacttgccataggagaagtgagacctcaagaaagggatgatgaagaaggaaccttgtggatgaccaatgaggtagttgatgtgggtgcaagggtggtgagtgacaatgtctccacccaagcaaacccatcaacctcaagtcatccaagcctcgaacaaaatcatcaaaggatgccaacagtggtagaagatgaacaagaaaatattgatggtgaagtgcctcttgatcaaataactgatgaggaagagcaaatacaaagacatccatcagtgcctcatccaagagtccatcatacaatttaa

SEQ ID NO: 102710 - DNA, 331 bp, Zea mays
  Clone ID: MRT4577_25180C.1
aggttccacaccctttttgtggcttcggaggaagacagattgtaccactggtcaaaatccccatgccagtgaccttcggattcatcaatatcactacaactgagcaagccgtgtttgacattgtggacatggattatccttataatgcaatcatgggccggggcaccctcattgctttcaaagcaatccttaatcctgcttaccttggcctgaagataccttgggatcaaggacccattcttattaatggaaggcaggaagctgccaaaagggcctaaggaaactggactgactccaaatcattccatatcttagagtggagctgaacctt

SEQ ID NO: 102711 - DNA, 348 bp, Zea mays
  unsure (1)..(348): unsure at all n locations
  Clone ID: MRT4577_25181C.1
ctcgagttttttttttttttttttttttnnnnnnnncnnnnccaaggggaggggaaaatatcgattactaattggaagggagcagaacagcccaacacaagcccatagagcaaacacatttgccagataccatggaattacctgatggacccaaaccttcatggtcttccagaatcaatggggattttttgacacgcgagcaaaccccgaaatgaccaacgcgagatcgggngnccctgaggacaaagagtgcaccaaaaacccagtagagctggagcccaagaggccgaaccattaaaataactaaggagggacgacaagctaacggcaacantnnncncccagggc

SEQ ID NO: 102712 - DNA, 1388 bp, Zea mays
  Clone ID: MRT4577_25182C.1
taatgtatgtcattttttcacatatatatttaatatataacctcgacggtatgtacatgaatttggaacaatgttcattttactaccgaaaatatatgatccaatggacaaatcaccctagaagaaacgtagtctcttttatgtgacatttcggatctgttagaatctcttcacttgaactggggctccttgcttcgcactagattccaacatggcttctagcacggcaacatcacgggcgccttcgacataagaaccacggggtgcagccttgtgatctccatctttgccagcttccaacatgtcatggacaaacgtcttcagttcttcattcactccacagaacgggtaaaatgtcttctggcactgcccattttcaccagagaataacacctggtagccatgttttccactatcaactccacgttctacctgaattgttccttttgttccatcgacccgccataatatctttggtgatcttgaattgacggcaaacacaaagacaccagcgcatccattttccagttggaagagggaacatatgttatctggtggcggcaaagccatatccacatgacgggagatagaagatacgcttgtgatttctgaacctacaagcattcgtagtcctgcaatgaagtgaacacccatgtccagaatgaaaccacccacaaaattccgtctccaggtgctattgaaatatggatttgaactgttcattgacccttcgatgataacttggatgtgcatcatatccccaatatcattgatcagcttgcttgactcaataaaggcaggctcaaatctgtagttctctccgactgcccaaatgggtttatgcgggaacaggttttgaaatgagtggtagattgacagtgcagtttctgcttctgttgttgatccagaagcaggtttctcttgaataacgtgttttccagccttgagcatctttagggaaagctcaacctggacttgcccagcgagaacaatagcaacgcccatgattgaactatctcccatgatctcctccagccccgcatcaccccatttgcactcgatgtcaggcgcgaagtcacgagcaagctccgcggccgcctttgcagattcctgggtgcgactccagatggacttgaggacgacgaggtgcgcgatctcgcggagccttgggatgtactgcgtgcgcgcaaagataccggcgccgatcaccgcgatccggggaagctccgcgcggccgttgccgtcacccgccatgttctcctcctcggttctcgccttctcggtgccgaaagactggatcagatctgactcaagcaatcaagcagacttcagatttgccttcgctgacttctcacctcgaagaccaacgctgctatggagacaaagac

SEQ ID NO: 102713 - DNA, 1159 bp, Zea mays
  Clone ID: MRT4577_25183C.1
gaccaccatcaccatggggaggactccgtgctgcgacagcaagggcatcaagaaggggccatgggcgccggaggaggacaagctgctcgtcgactacgtccaggccaacggacccggcaactggcgcattctccccaagctcgcggggctgaaccggtgcggcaagagctgccggctgcggtggaccaactacctgcgcccggacatcaagcgcgggcccttcacccccgaggagcacaattccatccttcagctccacgccgtagtcggcaacaagtggtccatgatcgcggcacagatgccgggccggacggacaacgagatcaagaactactggaacacgcacatgaagaagcctcctgccccgccgcccgccacacggcccagtgggagaccgccaggctcgaggccgaggcgcgcctctccctgctctcgtcctcggccgccacgacggtcacctccgccaccgcctcctcctcgtcgtccaccgtcgccgccgagcatgcggcgccacccgacatcttcctgcgcctctggaactccgaggtcggggattctttccgcggcgcagccgcgcagcaggggcacggtccggaggcgagcgcggcgggcgctggcgtgccggcgctgctgcctgagctcggcggtggcggtgacgattcctcggccgcgtcgacctacgaggctgaggccgcggcggacgacggctaccaggcgttcctggacctggcgatggaggagttcgcgctgctgcacggccggctcggcgcgttctcggcgttcccgcaggccgacgtgttcgctgaggcgcactgctgccttttcgctccgtttgaggagtagctttgctcgatctcattgccagtcatcagacatcagagtagtagactagacgtacgtacgtgaccacgtgcatgtaccctgcatgcgtccgtctgcgtacgcgtacgtacatacatacgtacacatgccgcttgtcttggggacgatggcgtatgtacgtgcctgtacgcaacgagcggatgggtggcgcgtgtgacagttcgttattagtctgtgccctagagcaagaggtttttgcgactgctccaaactagccttggcattgctctggtgaacgatgtcaactttcaagtattctgcctctgcgtgtttgtgt

SEQ ID NO: 102714 - DNA, 331 bp, Zea mays
  Clone ID: MRT4577_25184C.1
tttcgatatatcacccgacttatccttacggacgcttctattcaaaaccaacggtcaatacatgaccttccagcaggcctggcgcactctcaacgtttacgtccttaccccataccacctcatgcatcgcctctccgcttccgccttcctgctcgactttctctacgcagcatacttgttcacatttacagtcactccaaactacaccaagatcctctcgaccgtaatccgtatcgatctcggtaccacctactcatctgtaggtgtctacaacaacgctcatgtatatatcatcgctaatgaccaggctaaccgtatcacaccctcatag

SEQ ID NO: 102715 - DNA, 533 bp, Zea mays
  Clone ID: MRT4577_25185C.1
ttacctcttctgtcccgccaacttggtcatactcgatcagccctctacctcatttattgagcaggagcataagactaccagcgctcaggaacgtgtgctactacgatcatgatcaaacccgccatgaggctagacggctgtctatatgcctgcatgatgcactgcgtgctagcttttcaagctctttcgagacctgtgagtgctagcctgctggctatatgatagtgctggtaattctgctgggcaggcactggcgtacatcataggctagaggtgctcacaccatgacaccctagctagcgcataaaacgctgaacttcatctacccgcccgctgaagagaagcatactggaccgtgatgtgcgatctttattatgggggtgcgctcgtcttgctttcgcaggaatgtgctgattacctgatatagtgtaaaagtgtaatcactgtactgggtgcagaggaactacattgctgcttatatatatgtcgatgcgatggacaaaaaaaaaaaaaaaaaaaaaaggcggccgctg

SEQ ID NO: 102716 - DNA, 373 bp, Zea mays
  Clone ID: MRT4577_25186C.1
tcgcccactcattcgatccaatttcaatccatcgccgggcattccggcgcggggagtttattaagtcttctttcccataaggggctagtgttattttacctctcctcttttccgtctattggtttaatggctccccctgaatgtttttttgtttgtatcgagagagaaagagagaggagggtgacaggagaagcccgacaaatatattaatcagagtggttgctgcattgcagatgcaggtgcttgcaggttttgtactttgtgagaaggagagctacaccagcagctgagggagacagatctatagaggaaactttgcccctagtctagtcactcagtcaattaattttaagaaagcacttatagtgctttt

SEQ ID NO: 102717 - DNA, 1000 bp, Zea mays
  Clone ID: MRT4577_25187C.1
ccccgcgtccgcccagcgtccgcccacgcgtccgtatcgatgcgcgcgggggtgtggtcagtgcaagtcttcgtgctctcggcctcgactacctgcgcgacccttctcaggacgcgcaggcattgggacctgctcttgagctgtgggggcggcatttggagtttgtggtgcgccgtctcctcgagtcggagcggcagctctgtgccaaggtgtttgggcagcataaggatgtcgcgtccgcgtgctttgcagaggtggcggcacaagccggggttcttgacttcctgaggtttggccgcgcagttgctgatgccaagaaggaccccatcaagctccagcgtctgctggaggtgtttgattctctgaataagctgagactggacttcaacaggttgttcggtggcaaagcgtgcgcggagattcagagccagacaagggaccttgtcaagttgttgatagacggcgccgtcgagatctttgaggagttgattgtgcaggtggagctgcagcggcacatgcctcccccagttgatgggggcgtgccgcgcttagttacctttgtcgttgagtactgcaaccgtctgcttggtgagcaatacaggcctgtgcttgggcaggtgctaactatccatcgcagctggcgcaaagaggtgttcaatgacaggatgcttgttgatgtggtgctaaacatcgtcaaggcccttgaagctaattttgatgtttggtccaaggcatatgacaatgctacgctctcgtatctcttcatgatgaatactcattggcatttctttaggcatttgaaggctactaagttaggagagatcttgggtgatgtgtggctgcgagagcatgaacaatacaaggactactatttgtcaatgttcatcagggagagctggggagcactttcgccactactgaaccgggagggattaatactgtttttcaagggccaggctactggaagggacctggtgaagcagctccttaaaacattcaa

SEQ ID NO: 102718 - DNA, 263 bp, Zea mays
  Clone ID: MRT4577_25188C.1
cccacgcgtacgcagacccgtgggcattactagttcgatcttagcttgtgtgtggagatgtctaattcccatgggcacatccacgtatgcattttctgttacacgacgatggtgtagctcctttggccacatttctagaatctttcttcgtaggatttgaagttaggagtggccttgtccgattgcgcgctctggacggacatgcttgtttcctttaagtgaacggatgcataaaatcgcactggtctcttgatcttaggttc

SEQ ID NO: 102719 - DNA, 220 bp, Zea mays
  unsure (1)..(220): unsure at all n locations
  Clone ID: MRT4577_25189C.1
nncttaacctcacatccgtaaaaaacaccaatgctataacatatataaaaacaaaaaaacaaataggaagacgcgggcaccgtctaaaggattcaaatttttatacccttacctaccaggcaaaatcttttcttttggggcccccaaaattaatttaatggcccgcgttttaaaacatattgacttggaaaaaccccccgtaacccaaattaaatgcctt

SEQ ID NO: 102720 - DNA, 1680 bp, Zea mays
  Clone ID: MRT4577_2518C.1
gtccctcgaggctggccgggtaagatgtgctccctggagagttccaccaaataaactgaaatgcattgttttgacaggtaaaaaaaaaaaaaaaaaaaaagaatcctgtcgagacctgaatccaccctcacccagcggtccccatggcctccggcgaaggtgtagttgatcagctgtacgaggcggctggcggcgaggcagtggccaagatagagggggaggccaaggtggaggcggaggccaagatgacggaggagccggtgctgtacctcgacctgacgagctaccagctgcacgatctaagcgaggtggagatcccacccacgctggaggaggtcgacctcaccgccaaccgcctctcttctgttgatcctcgcatcggccaactcccccatctccgcaagctctcattccgccagaacctcctcgacgatgacgccgtcgcgccactcacgtcctgggaggctattgccgggttgaaggagttcgtccttagagataacaaacttacaaggattcctgatgctggcatattcaaggatcttctggtgttcgatgtatctttcaatgagatatcttctttgactggtctgtccaaggtttccatcaaattgaaggaactttatgtttcaaaaaatgaagttgcaaagatggaagagcttgaacatttccatgcgctggaaattcttgaacttggtagcaacagattacgggtaatggaaaatcttgaaaccttgacaaatctacaagaactgtggttgggaagaaatcgaattcgagctgtcaacttgtgtggtttgaagctaattaagaaaataagtttgcaaagcaacagactgacttcaatgcatgggtttcaggaatgtgctgcattagaggagttatacctcagccataatggaatccaaaagatggaaggcctctctactttgcataacctccgcattttggatgtttcagctaacaagctaacgactatagaaaatatcgaaaccttaaccaggctggaggacctgtggttgaatgacaaccaaataccatctctagagggtatagagacagctttggctggttcgcgggagaagttgacgacaatctatctcgaacgaaatccctgtgcaaaaactccagattactcgtcgacgttgaggaaaatatttccaaatctcgaacaaattgattcagatatcatagcatgataactagctaatccttgcccagatactaaggcaaagaaggctttggggttccccggagaagtcattaacagcaatcaacttgtgaggcgaacaatagacagtaatttgatccttaaagtcttcattgccaactctgctcgtgttgtggaagacattggttcggagtttgtagccttgagccgttacgggcttaatatagtgattggtaaccaaataattagaggtgtacgaggattgtcacaggatccatatccgtgttactagttttaagatgtttcatttcagttctctagattagtgttgatttttttttctctccaaatgaggctaggaacagccagcagttcatttctgtaagttgaatgcagacatctctgtgttgcatatcaacttgcaaggatgtgtcagcctgttgagaacccgaaattatcttttatttgaattttatttattactccaaaaaaaaaaaaatagagcccgg

SEQ ID NO: 102721 - DNA, 145 bp, Zea mays
  unsure (1)..(145): unsure at all n locations
  Clone ID: MRT4577_25190C.1
cccggtcgcccaccgtccggttcgcgggccgtcgccaacacccttaggtcgtcgattctaccccctggtgtgggcactgagaaacttgctccgattgagatgccgcaggccttacagctgcccccgttgtntcgctcggttgtgc

SEQ ID NO: 102722 - DNA, 740 bp, Zea mays
  unsure (1)..(740): unsure at all n locations
  Clone ID: MRT4577_25191C.1
atctcacacattatacacattctctccttcctttatggatcacaagtttaggttttagatctaacaagcgtcttccgctgcccccggcgcgtcgcccctggggagatcgttctccgccgggggtagcgccctcctaggatgcgcgaccggtccctctgaccgtcgtgttcgtcgtcctcgcttccgcggcagatccatctgatcccgccgcgcgtcacgtcatccaacaacaacagatcgggagtgtcacctgagggtatgtggatccacgagattggggcttcaacgtacgccgccgtggtgacgaccgcggacttcggcaccggtcggaccggagccacacctctcattgcgcgcggtgggcgcggggccgcttcgcccctccatcgcgggtcggggccgcaccgaatcctgtcatggggtggctttgctcttccgccacgggccaggccgcagctcccgctgcgaggccgcgccgtcgagtctccccttgcctcggagctgtgccacggctcctcgtcgctgggccgcccctcgtcatggagcggcgttgnggtcctcaccaccggccattcccgcgccatggagctgggctagaccgccaccatcccttgccctgcctcctcgtgtcgtggagacaatcactcctccactgctgggcgagccctgaggagtcttcactcctgtccttggtgtatatggctcgcggggggttgtgataaggctgatcccatctgtac

SEQ ID NO: 102723 - DNA, 377 bp, Zea mays
  Clone ID: MRT4577_25192C.1
gcgggggcttttcgaaattccgggccgcggcgggcgccgacaacgccttgattccgagcgcgacgccctctcgattccgacggcgacgggctgccctgcgccgctgcgcgccgtgccagagacgggtcgggtcagggtcagggtcagggtcaggccgtcagtcgccgccctgtactgcggccgggacgtgtgtcggggtgcgattcgtgccgcccgctcgtgctcggccccgcggttcacgccagcgattgcggtgtggcttccccaaattccagaacagcgtcgtttgctcgtttcgaatggagagatcgatctcactctcactcactgtcttcgcgcctaaacaatcgtccgtgcggccatcattcctattattt

SEQ ID NO: 102724 - DNA, 599 bp, Zea mays
  unsure (1)..(599): unsure at all n locations
  Clone ID: MRT4577_25193C.1
gncggccgggtcgggatcgggacgtcgnagacagnccggctgcctcactaggcggtacgactacatggcggtcagcctgcagcaagtcagtcgacgtcctcgagctcggcgcagcggacagctgccgcactgctcgtggccgctcgccgtggcggtgtcccgtcctggtggcgggcgcgccggcgccgtgcgcacatgagcatcgagcagttcatgtcgtgccagcccgcggacggccgagacgacggacccgccggccgagcctgcacacgcttgctgacacgccctcgctgttccggacctcatgcgcctgtgcgcctacaagaactcgccaggtatgcgcgtgtacaacatcgaccccaactgcgccatggagacttccggccaagtgcggtctcgccacgccgcccgactgctatcattgtgctgccacccaagccaagcggaacgcccccggcattgctacgctgtacgtgtctgtgtcgtgcatctgcagcacgctgcacgcacggggccgtacgtacgagtctctttctctctctcatcttgtcgccgtacctatctagagtgtgcgtgctcgaactaattatcatgttctt

SEQ ID NO: 102725 - DNA, 241 bp, Zea mays
  Clone ID: MRT4577_25194C.1
gaccgcacaggctcggggcatgtgacgcgtgcttgcgagtctggccatactatgagcggatggccggaccattggcctaccataaactgaacggctgattgtcaatctcggtctgtaccctattaccgagcctgagaggcgacgacagaatgccacgtacgcaccatgcacccagacgaccagacactgacacgaggaggatcacacactgaagaacagactcagccgccttactgaacga

SEQ ID NO: 102726 - DNA, 482 bp, Zea mays
  Clone ID: MRT4577_25195C.1
ataaagagcagactctgaggtatcacgttagcaccattgctgagcggtgactaatatgcgatggggtaccattttattcattggggcccaccaaactgcttttatggaataggagccaccgctactggcatgttggcttatcaccttagaaagggacacgcatggatgggctgacaatgaacgcggaaacgccggaggtaccttgtggaacatacccaaaaacttttttttttttttggtagaattatgcaaggaaatttaaaagcacttcctgtggacaatgcccggaccagtggcatcatactctgccttggaaatccacgtctgctgataagcgctgtgagaagccgcattatactcgccgatccaaacgctggacttcctttcaggggtgcgcaatcactgttaaccttactgctgctaggtagccaggggacgtgatactccttgctcatacgatacggcaatcccagtggaacatg

SEQ ID NO: 102727 - DNA, 354 bp, Zea mays
  Clone ID: MRT4577_25196C.1
accagatgaatgtgcctatagaggcaatggtcctagttgagggcacatgccagtgcccaacttgtttgatgaggtcataatcgtttgttacggtagcctcttgctgtctgcgtagataatgatgttggaggacctttcgagcaaccactgtgacatgctatgtagaggaggtgctacgagggcatactttatggaaggtatggcttttgttgccacaataagggtaccacccgccgattggtcatgtgagagtgttggtccgccagattccgaacaagaggctggttggtctctgcataaaggtacaggtggaggagggtaccgccctgctactggccttagagaggacaggcc

SEQ ID NO: 102728 - DNA, 296 bp, Zea mays
  Clone ID: MRT4577_25197C.1
caggaaaccacagggcccttgtcgcgccttctctttcgcttatttaggagccctgaactccctcagagtctatccagtcatgccctcttgtatgttgatgccacttcttggaagaagatgagggcaatgagttagggctccttttccccttccctcccaccagattgctctggcacctttcatttcttcctccaggctttactcccctttttatgcgccagcgatacactgggaccacgccttaccccggacaggatgaatggatcaaaggagtgaggatgctagagaacatcctt

SEQ ID NO: 102729 - DNA, 283 bp, Zea mays
  Clone ID: MRT4577_25198C.1
attcatatttcttgaagcttagatacagtctaattcatagcaaccatatctgctttatcctaggtgagggtagcagtccacaatggaatagatgacaatcccattataataaatgacaaattatatatcatgaatctcttctgtctgactaactcaataactttctatgaaagccaatggaattcaaataggagctaggagacaacaagttatgacagtggaggttgtactccttttatattgctgagagaactagttaaatgatcagattcttgctgttaag

SEQ ID NO: 102730 - DNA, 622 bp, Zea mays
  Clone ID: MRT4577_25199C.1
gtgccgcgcctgcaagtaccggttcggcctacgcgtgccgacctatgcgatcagagcgccaaccatttcatatattgttgaaagctcgcgtgttagctcctatcgtgtgtttattaggagatcactattatcatttcttacagctaaagagcttccctgttaggacaggtttggtcgccaatgaaagcactactccacctcttttacactttccaactattctggtcaatatcatgccaattaaagcccagcaaaataaaggagcaaggcatagattcatcgcataataatattgcataattgctttgcggccggacctatataatatcttgtgtagtcctatgatcctatcctcttcagtttatacacttctgctttgaatgggcttcaggttcataagcaaggagttgcgcttggtcgatctgtggatctctctagattcactgactatggtgaatcttagcatagaactcgaccttctattattttggatgtttggtttgcatgggataatctggtatgggatatatttatgaacattgatatcggttttatgcttactaacagaatgcatatggtctgaaaatggataaaatacccgctcttagatggcatatgcttt

SEQ ID NO: 102731 - DNA, 331 bp, Zea mays
  unsure (1)..(331): unsure at all n locations
  Clone ID: MRT4577_2519C.1
aaacaccccggcgctaccaccccncaataactccctcgacccacccctcctnctaccccttgaataaaccaacaatcccatgttggctttattagattgagcgaggcctacaaattcccacgcaaccaccaccctgcactcatcacaaacagtcgtctccttcccaaacccagctacctgctccctggattccacgcccttcctcactgccacatctaacctcctagttaaccctcaaacacgcctactacttctactaaccccttcttttcactctaactccgcaatctacatcttgtgtcctcctccctctagctactaggggtaccct

SEQ ID NO: 102732 - DNA, 477 bp, Zea mays
  Clone ID: MRT4577_251C.1
acactgagaatcgcatatacggcgtgtttgtactcgcctatctccgtgacccaaagcgttcccccttctaccattcttctctcatttctcaccgacgccgacggtaccccctttcgacaacaccatgagggagagcatctcgatccacatcgggcaagccggtatccaggtcagaaacgcgtgctgggagctgtactgcctcgagcatggcattcaagctgatggtcaaatgcccggcgaccagaccattgggggaggggatgatgctttcaacaccttcttcacagagaatggcgctgggaagcacgtgccccctgctgtttttgttgaacttgagaccactgtcatcgatgaggtgaagactggcacctatcgccagactttccatactgagcagcttattattggcaaggaggatgcaggcaacaactccgctcgtggtcactacaccattggctacgagattgttgacctgtg

SEQ ID NO: 102733 - DNA, 383 bp, Zea mays
  Clone ID: MRT4577_25200C.1
tttttttttttttttttttttttttttttttttttttttttttttttttttttttttttttttttttttttttttgattaatggttgtttttcccccccatttcaatttaggaatttatttcgggccgtccagggaagggcaaaaccctgaggggctaaaccataaacccaagacccttggcgggggaagaaaaaaacaggggcatccccaaaacacaatagtgacccccttcacctaaaggtgggggaacactctcccagcaccggataaggccctcactgcgaaaaggcgttgaaagcacaaacactccccccccccctgttaaaatctgaaaaataggggggagcagctccgcatagccattttttcggctgccggggac

SEQ ID NO: 102734 - DNA, 416 bp, Zea mays
  unsure (1)..(416): unsure at all n locations
  Clone ID: MRT4577_25201C.1
gactttcgcccacgcgtccggagccaaagctagctagctcctctcggtgcacgatcgagttacgagtacgagcacacgtcgccttccctaccgttgccaacaagcaacagagccaagaaatcagtcgcgctagagcgagcaaggacgatgctgggatgcttctcgcggctgcggcggccgacgacagcggcgccggagcccatgccggcggcgtccgacgacgcgtccacgtcgacggcctcggcggcgggctccacctcgccgtgctcgtggtcgtcctcggcgcgctgcaaggacgacgaggaccacggcggcggcgcggtgggcaaggacccgtcggcgctgtccgagcccgggctgtcctcggccatcgcgncgcgccggncctccctctcgtccccgggcgcggccaactg

SEQ ID NO: 102735 - DNA, 537 bp, Zea mays
  Clone ID: MRT4577_25202C.1
aaattggttcttctctcacactttttttttgtttgtaacgccagagcgggagaagacagaggaggcggggcaaaaaaaacacagccccttctaaaaacaaaacaaaaaaaacagagggggacacaacacaacagataaacaagtacgtgcagccacaactgcagatagggggggcgcagatctctccgttcctgtaaaaggaaaaaaaactgaaaaggggggggaagggggggctacctaatcacaaaaaatctcgcagacccaacaacaggagagcggcgggaagcaatcttctatgaaccccttcaccccgcgcgaggtcggtttccccgggggggggggctttctgccggtgcctccctgctgccccccccccgcccaagggtcccccgcgggtggtggaggaggccccttctgccgcggggggggggtgttgttcagagccatcctagaccgtcccctcgcttcttttggtagagccagagcacgcacgctcggcgagccgtggtggcgaacccccccccccgggggacccac

SEQ ID NO: 102736 - DNA, 368 bp, Zea mays
  Clone ID: MRT4577_25203C.1
aatagtcatgtgcaccgatttatattaaagagtacatttacaaaagtatataatgtgataagagtttatttgtattttaacaaaacaattatttatagttaatttttttcaagtttgacttaaaccttgtacaaaatgacttataatttagacaagaggagattacaaaaatacttcttctattccatgttaagagagatttcattactatgatttaattaaggaaaaacaagtaccctttcgtatataagaagaaatcgagtgactaaaaaatggaggtactctcattcgtttgtgacaccattgtactaacagagcaaataatagagagagggttggtctggaatgtttataataaagcgctaaca

SEQ ID NO: 102737 - DNA, 353 bp, Zea mays
  unsure (1)..(353): unsure at all n locations
  Clone ID: MRT4577_25204C.1
gcgcccacacatccactcacacttacattacagcattcatgccctctacttattctgctcacctgctatactctctaagaacctttttatacatgatccacacattantaaaacactcccatccttttctcctctagattgcagctcctatgccaaattacctgcactcacatttaaagtaggcacgccaccctcatttttcaccatcatcacataaataattatcgaccttttctcctaatacaactcccatacccattttgcaattacctttatctcaacatatcttcgatacttaccagacattacactccaaccgacctacctatacttgtgaatcacccatagttcat

SEQ ID NO: 102738 - DNA, 165 bp, Zea mays
  Clone ID: MRT4577_25205C.1
ttatatcctgctcatgacagatgacctgcatcatatatcggaggctgcaccttgcaaaagcaaagttatattctcctttcaagcaatgacattgcacagccttaatgcccctgcaaccaacaaacatttctttgccacattctactcgctgaacatccataacac

SEQ ID NO: 102739 - DNA, 429 bp, Zea mays
  unsure (1)..(429): unsure at all n locations
  Clone ID: MRT4577_25206C.1
gggggggacgcgttcgaacaaagtttctaaccagcttaagggcacaaaattatttgcagggctgctcaactctggaggtcatgaaactgagggtggggttgtgaaacttctctgtgcgcctgtgccaaacacctccttagttttcctctcgtgtctctttcagatgggggaacaaaaaaggaaccgaagaaacaatttggtgggttaaaatcgaagacaggtgaggctgacattacaggtgcaaaggtggatattanaggggggcttatcataaaagcagagaagcatccaaatgctgatttcctttacgtggaggagattgatgttggagaggacgcgcccagaacattaatcagtggccttgttaaattcataacctcttgaagaaatgcaaagccggaaaggttgcgtgctcttcattcttaaacc

SEQ ID NO: 102740 - DNA, 153 bp, Zea mays
  Clone ID: MRT4577_25207C.1
ctgcaaatgctactcgccctgtatcatctcattaatcagcgctggctgtagtggttactcgcaccgtgactcatacactatccagcaccctatctccagctcctttcagtttctacactatctttctcgtcacgttcgccctctttccccgtc

SEQ ID NO: 102741 - DNA, 156 bp, Zea mays
  Clone ID: MRT4577_25208C.1
tggcgttatccactagtctcctaggaacacagatcatctgtcttcttatgccattaattctctgtgtctgaagacacggatccctgtagatgttcagcacgtctgcgcttagtctatgccggtagacgaactgctacctgtgctcgagctcccagc

SEQ ID NO: 102742 - DNA, 250 bp, Zea mays
  Clone ID: MRT4577_25209C.1
ggcgcgcttgggattgatgtttggcccagagaccaaatggtgtcgctggagggctgagagaccgccaagaaatggcgagctgcggttttttatgcgcacactgaggtgaagctactgcctactgaaaattgtgctgaggaaatctggtgacagaaggagacttaatcatgcatttaaggaattgctatacctttacaatgcttagatagtattggtgatgagcctgatgatacaaacatagtattaagag

SEQ ID NO: 102743 - DNA, 991 bp, Zea mays
  Clone ID: MRT4577_2520C.1
gtgacgcctgagacttgtttagtggcaaagtccgacagggttggctatgacatcgccggctagctcatgtcggtatgaggaatttggccaaacttcaaaatgatagtcacatcattggactaacaaatgttgtatttgagaaagatagggtttgtggcgcatgtaaagcaggaaagcaacatagagtcccacatcaatcaaagaatgtggtcacaacaaagaggccattggagcttcttcacatggacctctttggacctgtggcttacatcagcattggtggtagtaagtatggtttagtcattgtttatgattttttctcgcttcacctgaattttctttttgagtgacaaaggtgaaacccaagagaccttgaagaaattcatgagaagagctcaaaatgagtttgagctcaaaatcaagaaagtgagaagtgataataggacagaattcaagaacacatgtgtcgaggaattcttaggggaagaaggaatcaaacatgagttctcggtgccttacactccacaacaaaatggtgttgtggaaagaaagaaacggactctaattgaagctgcaagaaccatgttggatgaatacaagacacctgacaacttctgggcagaggcggtcaacaccgcctgtcatgcaatcaaccgcctctatcttcataaaatctacaaaaagactgcctatgagcttctcactggtaacaaacctaaagttgattattttagagtattcggttgtaaatgttttattcttaacaagaaagtcaagagctcaaagtttgctcctagagtggacgagggtttcttgcttggttatgcatcaaatgcgcatggatatcgtgtttccaacaattccaccggtcttgttgaaatagcgatagacgtgacatttgatgagtctaatggctcgcaagggcatgtttctaaggacactgcatgtaatgaaaatctaccttgtgaggcctaatacattattaaacatt

SEQ ID NO: 102744 - DNA, 311 bp, Zea mays
  Clone ID: MRT4577_25210C.1
gtagatatgaggactgggctacgccttgagcgcccgatcacgtccgtccgtgttattggcgctgtgatatacgatcggcgtgttggcgtcgttgacgcagggatcgctggagaggaatcggagagaagggcgacttatccgaggtaatgaagtcatgaaccacaaggaggctgggtgccagacccacgagggacccatcctctgcatcaataactgaggcttattgagaagcgcggcgaccatgatcatgtgctccaggtgccacaaggagatgataacgaagctaggatcatgccaagctggctgccttc

SEQ ID NO: 102745 - DNA, 2802 bp, Zea mays
  Clone ID: MRT4577_25211C.1
agctgtgggacgcggaaacaggtgcttgcgaggcaaccctccacggccaccgctccgctgcctccgccctccgcttcggcccctctggcgccgtcctcgcttctggcagcaaggactgcgatgtcatcctctgggacgtcgttgcgcaggctgggctcttccggttgcgtggccaccgtgaccaggtcaccgatttggtgtttctggatgctggggtcttgcgggcctgctgcgcctgggcctggttgttgggggtgcggggccctccttcacacccctctctcccaatcgtcggccgcccccgcagtgagatttggtcaatggatgttgatcctagcgagaggtttttagtgtctgggtctgctgatccagagctgcaagtgtctcgcctccggcggtccgtggaggagggtggggggcggtgcgagcgggtgctcctctccctgttgcctgggcgtccacggcagagcaaggaacgagtggcaaatgttaggtttaatagggacggcagtcttgtggtatgccaggtggctgggaagacagcagatatttatagggttcttgatgaaacagaggctgcacgtaaggccaaaaggcgggtgaacagaaagaaggagaaagcatctgcgaaatccatgattgctgaagagaatggcactatcattgatcctttaccagttcaaaacttacaaaatcctactgttattgtcaccgatgtatttaagctatttcaagttttacgtgcaagcaaaaaaatatgttcgattacattctctccaagtaatcctccaagaggatgccttgccactttgtctctatcactcaacaataacatgcttgagacatattcagtggataaggagaaggtatcaaagatgtactcagttgagatgcatggacatcgttctgacatcaggagtgtctcccttaattcggaggacaacctccttatgtcgactagtcataacgctgtcaagatatggaaccctagtacaggggaatgccttcggaccattgactctggatatgggttgtcaagtgctttcgttggaaatcggtatgctcttgttggtacaaaaagcgtgtacctattccagatgaagatggaactgttggtgcacgaggctttgtcactggaagtgctgatcatgatgtcaagttctgggaataccaattggtgcagaagtctgataatgactctaagcagctgactgtaactaatgtgaggaccttgaaaatgacagaagatgttcttgctgtctcgatcagtcccgaaggaaagcacattgctgttgctctcttggattgccatgtcaaggtcttctacatggacacactgaaaccatctttaaacctttatgggcacaaacttccagttctctgtatggacatatcatctgatggagctttgctagttactggctctgcggacaaaaatttgaagatatggggtatggattttggggactgccacaggtctatatttgctcactcagacagtgtgatggatgttaagtttgtgtatagaactcattatatgttcagtgtggggaaagatcgcactatgaagtactgggatgctgataaatttgagttattgttaacacttgaaggacatcatgctgaagtttggtgcctcacactcagcagtcgcggtgattttgttgtaacaggttcacatgatcgttccattcggcgttgggatcgtactgaagaacaactgttcattgaggaagagaaggagaaaagattggaagaaacctttgaggctgatttagaaaacgataatgactatagatatgggcagaaagatgatgcccctgatgaaggttctgtgggtgttcctggtaggaaaacaaaagagacagtaacttctgctgatgcaatcatggatgcacttgacactgctgaggaggaactaaaacgcattaatcaacataaaatggaagagcaaattactgcgaaggcagctaaatttcaacctaatgttataatgcaagggcattcaccttcagattatgttctaaatgtagtttcaagcatccgtccaaatgatctggagcaggccctcttggcattgccgttctcggatgcactaaagctcatgtcttacttgaaggagtggtctttggttccttcaaaggttgagcttgtttgtagggtttgcttagtgctccttcagacacatcataatcaattaactgccacgccagctgcaagatccttgttgacagaactgaaggatattctttactgtagagtaaaggaatgcaaggatactataggcttcaacctcgctgcaatggatcatataaaagaattgttggcgttgagatcagatgcacctttccgtgatgccaaggcgaaactcatggaaatcaagaaggagcagtcgaagcggtcaagtagtaggcttgacggagatgaaaaaaggaaaaagaagagaaagaaagcgtccgctgaaagctgagccagtaaacaaaaacaaaagaatgttgtattgttgtccttaccttctgcaactactacatggacgtgctcgtttccttggttcacgagcacgcagaatttttgttagatgggtataatcggaaagtgcgtggacataaagatttctagaggttcgtcttgcgtatctgatggaagggaattatatcaggtggaacatatacattggtgtagtgtagtcgtgtaactaagggtgtgtttggtagggctttagcttgcccaaacacggttctagctctacttttttctaaaagcagcttgctgaagccatttcgtaaagaaacggtttatcct

SEQ ID NO: 102746 - DNA, 201 bp, Zea mays
  Clone ID: MRT4577_25212C.1
aattcggcacgagggtagattaggggactacagatgtactagtagaacaaataaatgtagacaatgggcaaagagaggtagtgaggaatggccgccttcctgtagatcagaagtgtctacatttatttgttctactagtagattaggggactacagatgtactcctgcagatggttaatttggtggctattttcgatatat

SEQ ID NO: 102747 - DNA, 379 bp, Zea mays
  Clone ID: MRT4577_25213C.1
ggccgcttttttttttttttttttggacaaaaaactatgtattatatataatgcaaaaccctgcgccaacttaaaggcagcacgagagaccaaaacacatagccgggctggtctgcctcaacgacattgatacagctggtctggtagggtacaccacgctaccgactgcaacgaacgagggacccctagacgacgacagcagtaacactagcctaatcgaccactatagtatgggccgcatgaacgactgatttataatgagccaggacaatgctggtcacacaactactgagtgctgctgtggtacaactacgactgcatgctgctaacgagcatacctccattacatccacatagagaactacctccactatcattc

SEQ ID NO: 102748 - DNA, 1166 bp, Zea mays
  unsure (1)..(1166): unsure at all n locations
  Clone ID: MRT4577_25214C.1
tttttagtgtctgggtctgctgatccagagctgcaagtgtttagaatccggcaatcagtggaggagggcgaggattggagcaagtgggatgtgctcaagctatttggtgagattccacggcagagcaaggaacgagtggcaaatgttaggtttaatagggacggcagtcttgtggtatgccaggtggctgggaagacagcagatatttatagggttcttgatgaaacagaggctgcacgtaaggccaaaaggcgggtgaacagaaagaaggagaaagcatctgcgaaatccatgattgctgaagagaatggcactatcattgatcctttaccagttcaaaacttacaaaatcctactgttattgtcaccgatgtatttaagctatttcaagttttacgtgcaagcaaaaaaatatgttcgattacattctctccaagtaatcctccaagaggatgccttgccactttgtctctatcactcaacaataacatgcttgagacatattcagtggataaggagaaggtatcaaagatgtactcagttgagatgcatggacaccgttctgacatcaggagtgtctcccttaattcggaggacaacctcctttatgtcgactagtcataacgctgtcaagatatggaaccctagtacaggggaatgccttcggaccattgactctggatatgggttgtcaagtgctttcgttggaaatcggtatgctcttgttggtacaaaaagtggtacgttggagattatggatattgctagtgggagcttaactgaggccatagaagctcatgctggctccatacggtcaattgtacctattccagatgaagatggaactgttggtgcacgaggctttgtcactggaagtgctgatcatgatgtcaagttctgggaataccaattggtgcagaagtctgataacgactctaagcagctgactgtaactaatgtgaggaccttgaaaatgacagaagatgttcttgctgtctcgatcagtcccgaaggaaagcacattgctgttgctctcttggattgccatgtcaaggtcttccacatggacacactgaaaccatctnntaacctttatgggcacaaacttccagttctctgtatgacatatcattcagatggagctttgctagntactggctctgcga

SEQ ID NO: 102749 - DNA, 731 bp, Zea mays
  Clone ID: MRT4577_25215C.1
aacaaaaaacatttttgtcctacataaaaaaagatacaaggaggggcttcaccaactttggctttaacactttaatataaaaaaataattctagccctaggataaaccgttcctttacaaaagggcttcaccaagctgtttttaaaaaaaaagctaaagctaaaaccgggttggggcaagctaaagccctacccacgactaccccaagggatatggcccacatgatatattccctttcatcagatacgcaagacgaacctctagaaatctttatgtccacgcactttccgattacacccatctaacaaaaattctgcgtgctcgtgaaccaaggaaacgagcacgtccatgtagtagttgcagaaggtaaggacaacaatacaacattcttttgtttttgtttgttggctcagctttcagcggacgctttctttctcttctttttccttttttcatctccgtcaagtctactacttgaccgcttcgactgctccttcttgatttccatgagtttcgccttggcatcacggaaaggtgcatctgatctcaacgccaacaattcttttatatgatccattgcggcgaggttgaagcctatagtatccttgcattcctttactctacagtaaagaatatccttcagttctgtcaacaaggatcttgcagctggcgtggcagttaattgatatgatgtgtctgaaggagcactaagcaaaccctacaacaagctc

SEQ ID NO: 102750 - DNA, 283 bp, Zea mays
  Clone ID: MRT4577_25216C.1
gagaaggtctagggtgagcttggcaaccctaacacggtggctcaacccatggagaaggatcagagggggcagttgaagaacacagaggagacaggctttgggatacccaggttgaggtggagcaaagataagcgataccttgaggatgattgtgcacacaagaaggcaatcgggtttcggagatactgaggggggggtggatgtaccgggcgagctaggaggtagaactgcaaaaagaaaggcgcgctaggcgttaaaatagaaccaagctaaactgcacttg

SEQ ID NO: 102751 - DNA, 564 bp, Zea mays
  Clone ID: MRT4577_25217C.1
gtgcgctaccctaagccaggtgagtttgcatcaacctcactctaatggatggcagatatctaaagctccttacgcttcgtgtgctgttcgcgcgcgcagagaatgcctacattaaatcagagcgttgacttgctcaaagtcccaatattacacatgcttctaccaccagctactagcaatgggcttaaaacacaccacttgggcaagcctacaggcatcaacatgcaacggcggtgagcggataacaacaacctattttccagatgcaacaacaatccttggcacatgtaacaatacaaaccatcgcaacgaaccagcaacaacgatttctaccagcactgagccacctagccatggtgaaccctgccgcctactagcaacagcaggtgcttgcataaaacccacttgctatggcaaacgtaattgcaaaccagccacaacaacagatgcaacagttgctgccagcgctcagacaactatccatggagaaccctggcgactgacctacacagcaacaactgatttcatctagctcgcatcgtgagaccaatgcacctacatacc

SEQ ID NO: 102752 - DNA, 270 bp, Zea mays
  unsure (1)..(270): unsure at all n locations
  Clone ID: MRT4577_25218C.1
aaatctctcttntaaaaaaataaactctatctcncaacttctcttattnanaacgcccggcctaattgcaaggctctccgccttcccacttatattntaatatcanacaacttttcacccaatccttataacaaaattntccctcccacttctatccctcattactacattcntcttaataaaaacccttaatccaccaaaacattctaccaaccattttacaccaccaaaacttttattttaaacctccccattctaatcttttacttc

SEQ ID NO: 102753 - DNA, 846 bp, Zea mays
  Clone ID: MRT4577_25219C.1
cattgggaccctcgaggacggccgggaaacgaatccgaaacctctccaagaatccatcgcagccgccatcatgtccgccgccggtggccgaacccttggccggagcagcttctcccgcgccacatctaaactggtggcgtcctcatccggctctgctggcgttaagattggcccgaacggtgcttctttcgtctcctcgggcattcccgacctcgacaggattttgggtggtggattccttcttggctcagttgtaatgatcatggaggacactgatgcgccacaccacctcttgcttcttcggtgcttcatgtctcagggtgttgtgcacaaacaacccctgcttttttcaggagctatgaaagagcctgtgttgttccttggtacactacctgctccagtttcatcttcaaaggaggatggacgacacagagcaatgggtcctgcagcaagtagtgatggacgagcaaatgatgagggtttgaggatagcttggcagtacaagaaatactttggggatgacaagacttcgcgagctgaacataaagacaataaacaggaattcagcaatgattttgatttgaggaagcccttggaaaggcatttacttaatggacagaatattgaatgtgtaagcactcaagatgctgacacactcagcagcctcccaggattgttgttctgctttcttatccaagcttccaagaaaagatggtgggagttcaactgctgggagaattgctatacaatcactctggcgcaccgcagtgcagatactttgaaaaggactgggacatggtctcatttatcagatcactgaaggccatggtgcgctcatctaactct

SEQ ID NO: 102754 - DNA, 666 bp, Zea mays
  Clone ID: MRT4577_2521C.1
ttccgccggagatcaatgagtggcaccagtaggcctacggggtgccttttatgtctgcagacgatgaagatgaagaagtctatgttgatgatcgcgaggagtttgccccgcctccctaccatggggatccgggtcaatcctcctcccaccctccgcctccttacccgggtccgggacccattcctggtgaccctaggccatccggctctggttaccaccaccaccctccacctcctcctgatcatcgtacatcttcggcatctgctttctctgcggctgatgagccacctcgggactccacttttgaggaggacgcgatgagggctttttccctgactacacttcatatcctccatcgtatcctccgtcatatcctcctcctggaggatactgattcttgtatccttgtctctctctccgtttttggtacttgttgccaaaaagggggagaaaatccaacttctagtttgtggttctttcgtattttcttttggattatttttgtttttggccactgttgtggcttgtatctttttttccattgtatgaaataaaactgttggattgttattcaaagtaatatgatggtcttctggccatcatcttttgtcctatcagtttgtaatgactactctgctatgaagtaaaaataatgtgtttatagac

SEQ ID NO: 102755 - DNA, 411 bp, Zea mays
  Clone ID: MRT4577_25220C.1
ctaattggtatggctggatttccttgagaggagctcagaagtgctgtgtactagttactcgtggcagaatgcagcttttggaggtttaggttttagataggagtcagtttgatggttcactgttaaccatcctccctcatgtaaccccactttcaacagtattagaaccgtcgaaacttgtatatttttcgggtagttgtccaagtttgttgaactgccttgaacaggttacaaaagtgtggggttttcttgttttgtctgttccaaatgatcatgttttttgcgtagaacggaaatggttgagttgctgatgcaactgaagaattgttggtcttcacgaagatggagctctgtcagacaatgcagcaatcttgctatgttaatgtcaaagatgcagaaggcaattgtaac

SEQ ID NO: 102756 - DNA, 1568 bp, Zea mays
  Clone ID: MRT4577_25221C.1
cgacaaagaagaaacgaaaccgaaatctctccaagaatccatcgcagccgccatcatggccgccgccggtggccgagcccttggtccggagcagcttctcccgcgccacatctaacctggtggcgtcctcatccggcgctgctggtgttaagattggcccgaacggtgcttctttcgtctcctcgggcattcccgacctcgacatcagtgaatcaatgttatttggtgctctctggcagggattttgggtggtggattccttcttggctcagttgtaatgatcatggaggacactgatgcgccatactacctcttgcatcttcggtgtttacagtcaacccctgctgttctcaggagctatgaaagagcctgtgttgttccttgatagccctacctgctccagtttcatcttcaaaggaggatggacgacacagagcaatgggtcctgcagcaagtagtgatggacgagcaaatgatgagggtttgaggatatgctgagcagtacaagatatactttggggatgacaagacttcgcgagctgaacataaagacaataaacaggaattcagcaatgattatgatttgaggaagcccttggaatggcatatacttaatggacagatttacgtaatggacagaatactgaatgcggaaacactcaagatgctgacacactcagcagccttcaggattgttgttctgctttcttatccaagcttccaagaaaagatggtgggagttcaactgctgggagaattgctatacaatcactctgtgcaccgcagtgcagatactttgaaaaggactgggacatggtctcatttatcagatcactgaaggccatggtgcgctcatctaactctgttgctgttgtaacatttccgagtacagttctgtcaaattcgttctgtaagagatggcagcacctggcggatacactgctgtccatcaaagcaattccagatgaggacaaagacttggcaaaactcctcacaggatatcaagatatggttggttttttgcatgtccacaaggtggcacaacctaacagtcaggtccctgtgatcttagaggcatccacgctctctctaaagctgcgaaagaggaggtccctggtcttagaacggttgaatcaggctccagtcgatgggtcaagtgggccttcgtctgctgcatcaagcagttgctcatcgcaaggttcacagcttgatttctaattggtatggctggttttccttgagaggagctcagaagtgctgtgtactagttactcgtggcagaatgcagcttttggaggtttaggttttagataggagtcagtttgatggttcactgttaaccatcctccctcatgtgtctatcagcttgttgtaaccccactttcaacatattagaaccgtcgaaacttgtatatttttgggtagttgtccaagtttgttgaactgccttgaacaggttacaaaattgtggggttttctcgttttgtctgttccaaatgatcatgtttttgcgtggaacggaaatggttgagttgctgatgcaactgaaaaaaaaaaaaaaaaaaaag

SEQ ID NO: 102757 - DNA, 644 bp, Zea mays
  Clone ID: MRT4577_25222C.1
cggaaaaaggcagaattaagtcaaaatgaatttgtcttgacaaacgagaggttccttgtcccagagatgctttttcatcccattgatcttggcataaatcaagctgggcttgctgagtgtatagttcgtgctgtacaagcttgccatccatatcttcaacctgtgctttttgagagcatcatcttgacaggtggaagcacactgttccccagattcaccgaaagattggagagggaacttcggcctcttgtccctgacgactacaaggttaagataactcgtcaagagaacccaatttttggtgtctggagaggcggatctattctagcatcaagtcctgatttcgaatcaatgtgcataacgaagtctgagtacgaggagatgggatcagcacggtgccgacgacggttttttcactgaacagaatactgagtttttggcgaagtagcttcagtgtaggtcaatcgcttaggagaagcgagtcttgtttgtaaatactggtgttgcatgtatttagtccagatgtttgacagtttggtggtatatgaattagaagtccggttaacagtaatcatttttactctgatttgacaactgtagctcgtgagattgaaatggcaaggtggttgaccggacccttgcgt

SEQ ID NO: 102758 - DNA, 536 bp, Zea mays
  Clone ID: MRT4577_25223C.1
atgcgcacattgatttgttttgtttttatttgagctttgccctgtatgttcagtttttattatccttctgtattgatctacttttttgacaaggggggcgaaggggactaaaaacgaaacgcccaaaaacataaaacaacccccccaaccaccaaaaaaggttgggggccaagcaaaaaacggcttcaaaaaggggcccgggggcgaaactggggggaacaaaaaacaaaggggacggggcccccccccgaaacgcgaaaaaagaaggcaacggttaaccacccggacaaacaaggggcagacccggaggcctgcggcccgaagcgggaaaacaaaagccctatgggggggggtgaaaacaccggaaacgagggggccccttttgggcgagcaacgggtccccccggcagggggcctggggggcccccacaccaaaaagggggaaacccaccgacccgtgacccggggaaaaaaaaaaaaccccggcaccgggggggatccgccggccaaaaaagggccccaaaaccctggggttc

SEQ ID NO: 102759 - DNA, 188 bp, Zea mays
  Clone ID: MRT4577_25224C.1
gcgcctgcaagagcagagaggcgaaagtgtacgtgccacaagcagcagcagcagaagcagtagccgccgccgacggaactcctcatcctcccagctggtcatcctctcccgccagcaggtggattgacgacgatgcagacatcaccttccgcggccagcccagaaggcccggacaggccacggcgcag

SEQ ID NO: 102760 - DNA, 442 bp, Zea mays
  unsure (1)..(442): unsure at all n locations
  Clone ID: MRT4577_25225C.1
tcgtattacgacagnacttaccttgtaagccacgatagtggctatttctatcctatataaatacaattacgcagcctcttataggaggtagaacactttctaatcttggtgattttctacatcagcatcggtagaacactttctaatcttggtgattttctacatcagcatcttgtttgtgttgccttcattccaaattctaagtcgttttgacttttctngatacataactctttgactatacatatgtagatatagtatataactagaagcatagtaaaagtcatgtatttagaaaaggtagaactacttacaatttggaatgaagggagtaanaattagtgatttntttagtaanttaatnaataataatnatttattagaattttgaaggtattttggatttagttggtattgattgtgttttatttttagtgntggt

SEQ ID NO: 102761 - DNA, 450 bp, Zea mays
  unsure (1)..(450): unsure at all n locations
  Clone ID: MRT4577_25226C.1
tgcataccatatagtaaacccaagcccatgaccactaacaggagccctatcagctcttctactcacatgccggncttcgtaatatgattccattacaactccacaattctcctatcattaggcctcctgacaaacatcctaactatatatcaatgatgacgagatatcatccgtgaaggaacataccaaggccaccacacccctattgtacaaaaaggcctccgatacggaataatcctgtttattgtctccgaagtattcttctttgccggatttttctgagcattttatcattccagcctagttcctacccacgacctaggcggttgctgacccccaacaggaatcacccctttaaatcccctagaagtaccccttctaaatacatcagtcctcttagcatcaggagtctcaattacatgagcccatcacagccttattgaaaggcaa

SEQ ID NO: 102762 - DNA, 322 bp, Zea mays
  Clone ID: MRT4577_25227C.1
tttttattttttgtttggcacgggacaaaacatgcgcccgggagaggattcccagcagcaacgctcaaagcctgtgccatataaacaagaaaaagcgctgcttattacgggttgtctgagacaacttgtttggaaaaaataacccgccaccttgttgctacatgaagaaaataaaggagatacagcccccgggataagaaaaaaaaagaactgatgatcctttctcacaaataacataattcccatacaacaatatcagatcacaggtcaccgtgcgttgctaacaagacagcctttgcaaacagcaacagcttcagaaggg

SEQ ID NO: 102763 - DNA, 424 bp, Zea mays
  Clone ID: MRT4577_25228C.1
gcacgagctccgcaggagttggctggcagtggcagcagatccgctactgatcaggtatcccggtacgtgggagagggagagctgaatgaattctgcttcctgaagatggagaaccggatgctccgtggagagtgctcagaatttgagatggcagagaaggaactacgagtcaaggaacagaatctacggctcgagattgagatggcgcaggagcagttcaagagactactgggcgaatacgtctcgttctcatctatgccgacgcgtaaaccataggcaccgcttccgaagccaactcattagcgcaaaaggcgtgtgtacctgtacctagctctcagaaactcggcttcggttcattttctgtgtgacgaaaaggtctatatgggaaattgagctgaaaatggggggaaaaaaaaaaaaaaaa

SEQ ID NO: 102764 - DNA, 299 bp, Zea mays
  Clone ID: MRT4577_25229C.1
cccactcaggcactcacccctgctgcctccgcacgtagtccttattaaagcgcaagccgccactgggcccgcacggtacggtcacagctgactgactcatcctgcgtcgtccgataatcatggctagagctccgatgctcctcgcgctgctgtgcacatgcgccgccgccgacggctccgacaatgctgatagatgggaagaagatggtcggactactcgagcacacagcagtcgattacagcgtctgcgtcaccaactgctgcgccaccatcacctacgaagagctgaccgacataca

SEQ ID NO: 102765 - DNA, 171 bp, Zea mays
  Clone ID: MRT4577_2522C.1
gccttgagggtgtatgttcgataaaataaaactatatatatctatctagactctaaagttgcatggcaaactgagacttgtactatcatctctgtttgccatgtgccttgagggtgtatgttcgataaaataaaactatatatatctatctagactctaaagttgcaagag

SEQ ID NO: 102766 - DNA, 337 bp, Zea mays
  unsure (1)..(337): unsure at all n locations
  Clone ID: MRT4577_25230C.1
aaacaaattgggaggagccattgtcataagactggacattatgtgataatctattaacaccacctattgcatcactatgtnccaaacaaatgatcatacttcatatatattaaaccaaagggtgtgttccagccacaggcatacatcccctggtgctgcgccccccccgagctctgggaaccagatcacaacctagaacaagagatcaccgcctactgtttggatgattaattgacaggcttcgcaagctattactccccacaatcccttggttgtacgccggggccttaccatacgtgctgcacgaggagtgcgcgaaaccattttcgaaagcttg

SEQ ID NO: 102767 - DNA, 218 bp, Zea mays
  Clone ID: MRT4577_25231C.1
tgaccaccggttcacattcccccaatgcccgtggtctatttttccatggtgcttttctgacccaaatgggcgcttgagttattcacgccctttacaacatgccatcaaggggggtttcagttttttatgtttaaacaattaaccattaacaatgttttttaaaagggtaagactttacaaggggttggcccaacccttattttccataggggggcaag

SEQ ID NO: 102768 - DNA, 259 bp, Zea mays
  Clone ID: MRT4577_25232C.1
gacacacgcgtgctgctacgtccgcccttttttacttctttttttatcttgtctttagcttcatacttaccggggcttttttcatttttttatgtaaaataaatatccccgaacaactttattacatgcattattacaaagggcctacctaccagtttattaacgtatccaatagaacccttttgctctattccgttaatttattcaacttatgacattcatgcaaaaaacacctttagacaaaaaaaccccgttttat

SEQ ID NO: 102769 - DNA, 202 bp, Zea mays
  Clone ID: MRT4577_25233C.1
gtgaggtaaagattttatcgaaatctaaccattatggtgtttgcaaatggtccaagctcccaaaactaaaagtgttttcagcttctgtacaacaacaccagagatctggccagcagcctatctccagcacttcataaaagtgttgacccccaggtgtggtaccaaactttgaagattaacctttccaagatccgataccaaa

SEQ ID NO: 102770 - DNA, 506 bp, Zea mays
  Clone ID: MRT4577_25234C.1
gggcgaacgcctccctggatgcccaagatcccggagaacctgcggtgaaaactgcggctatggacgagcccaatggcgtgtacgtccccggcggccagaagccaggggaaaggaaatctagtcccactcaggcgatgaactgcgcatgtgagtctggcaaggcaaataggagccagccgacgggcgaggtcagcgtggaagacctacaagatctacatcttcaaggtggtgaagcaggtgcacccatacatccttatctactctaacgtcctgtgcattatgaactccttcatgaaccacatcttcaataagctggccgccgatgccaacaagctcgagcggtacaacaagaagcccaccatcacctaccgtgagatccaaacctccgttctcctcatcctgcccggtgagctagacgagcacaccgattgccatggcaccaaggtgcgcaccatgattagctaatgctacgctgcctggactgcgctatcaagctcgcctggtgt

SEQ ID NO: 102771 - DNA, 2231 bp, Zea mays
  Clone ID: MRT4577_25235C.1
ccggccgggagcgccactaaacccgcgacgacggtcgaccatggcgtcctcgctgctctcctcccccgctaaacccaccaccgccaccaccaccaaaacgaccccggccccaagacccgcccgctccgcccatgtcctctccgccgcccgctgcctccgcctccgcctccgcgcggtccccgcccgagcgtcgtcgcagcatcctccgcctccgcccaccccgcggtcgcggcggccggattacgtcccgaaccgcatcgacgaccccaactacgtgcgcatcttcgacaccacgctgcgcgacggggagcagtcgccgggcgccaccatgacgagcgcccagaagctcgtcgtcgcgcgccagctggcccgcctcggcgtcgacatcatcgaggccgggttcccggcctcctcccccgacgacctcgacgccgtgcgctccatcgccatcgaggtcggcaacccgccgcccgccggggaggagaccgcccacgtgcccgtcatctgcggcctgtcgcggtgcaacaggaaggacatcgacgccgcatgggaggccgtcaggcacgctcggaggccccggatccacactttcatcgccaccagcgagatccatatgcagcataagctcaggaagacgcccgagcaggtcgtcgctattgccagggagatggtggcgtacgcgcgcagcctcgggtgccccgatgttgaattcagccctgaggatgccggcaggtcaaatcgagaattcctgtatcatatactggaggaagtcattaaagctggagcaaccactcttaatatcccagacactgtcggatacactcttccttatgaatttgggaaattaattgctgacataaaggcaaacacttctggaattgaaaatgctatcatttccactcattgccagaatgaccttggtcttgcgactgccaacacattagcgggtgctcgctcaggagcaagacagttagaggtgactattaatggtattggtgaaagagctggaaatgcttcattggaagaggttgtcatggcaattaaatgtcgtggggagctcttagatggtctatatacgggaattaattcccagcatattactttgacaagcaaaatggtacaagagcatagtggacttcatgtgcaaccacataaggctattgttggtgccaatgcctttgctcatgaaagtggaattcatcaggatgggatgcttaaatataaaggaacatatgaaataatatcgcctgatgatattggtttagcacgtgcaaatgaatttggtattgttcttgggaaactcagtggaaggcatgcagtgagatctaagctggtagagcttggatatgaaatcagtgacaaggaatttgaagatttctttaaacgctacaaagaggtcgcagagaagaaaaagcgtgtaactgatgaagacatagaagcgttattgtcagatgagatattccagcctaaggttatttggtcccttgctgatgtacaggcaacatgtggaacacttggcttatctacagcaacagtgaaactgatagcaccagatggagaggagagaatagcatgttcagttggaacaggtccagttgatgcagcttacaaggctattgaccaaataatccagatcccaactgttctccgagaatatggtatgacctcagtcaccgaaggcatcgacgcaatcgcaacaacccgggtggttgtcaccggagatgtgaccaacaactccaaacatgccttgactggccgcgctttcaaccgctccttcagcgggagcggggcagcaatggacatcgtcgtctccagtgtcagagcttacctgagtgccctgaacaagatgtgtagctttgctggtgccgcgaaagccagcggcgaggtacctgagagtgcaagcgtccaaagcgcagagtgagcttggcgacgatttggttctcatgtggactgggcggcgtaagagccagagcaactgttaaagagggtgacatttcgtttctgtattaggctgttcaatgttgggggttttgccttgtcagtgtggtgtgactgtactgttctttttttggaggatagcccagcttggaacgtgcaggcaattttggacctaggtagtgtacaatttgtatcttatatgaacaatacttccaataatcgaaagacttaagatgggttgctggagtcaaaaaaaaaaaaaaaaaaaaaaaaaaaaaaaaaaaaaaaaaaaa

SEQ ID NO: 102772 - DNA, 429 bp, Zea mays
  unsure (1)..(429): unsure at all n locations
  Clone ID: MRT4577_25236C.1
cttcattccccccttccttagcttgggttcttttaagcgggccgcccttntttttttttttttttttttttttttttttgggttttttttttttttttttttttttttggggggaacaattgcttgaacatttttttttccctgggttccaaatttttcccctttttttcttaaatacaacaggccgccaaccgaattatattatggggctttttacatgttccccttccgcttttttggtcaacaattggaaaacacaccttttcacaaaaaacgggttgttccaaactttccccaccaaaattaccgggggggggcgagaacaccctgcaaacttctttgtttcccttttgttccggttttttattccaatgattttatttttttgggcatggttaaaaaagcccctttttccaagcaggttttttt

SEQ ID NO: 102773 - DNA, 1268 bp, Zea mays
  Clone ID: MRT4577_25237C.1
ttggggggctcgcttttggctctccaaaatcccaaatcaccacatccccccattaatttaaggggtttttatgtccaccgccgccgccagcgccaactaaacccgcgacgacggtcgaccatggcgtcctcgctgctctcctcccccgctaaacccaccatcaccaccaccaccaaaacgaccccggccccaagacccgcccgctccgcccatgtccatgtcctctcggccgcccgctgcctccgcctccgcctccgcgcgtcgtcgcagcatcctccgcctccgcccaccccgcggtcgcggcggccggagtacgtcccgaaccgcatcgacgaccccaactacgtgcgcatcttcgacaccacgctgcgcgacggggagcagtcgccgggcgccaccatgacgagcgcccagaagctcgtcgtcgcgcgccagctggcccgcctcggcgtcgacatcatcgaggccgggttcccggcctcctcccccgacgacctcgacgccgtgcgctccatcgccatcgaggtcggcaacccggcgcccgccggggaggacgccgccgtccacgtgccggtcatctgcggcctctcgcggtgtaaccggagggacatcgacgcggcgtgggaggccgtgcgccacgcgcgccggccccggatccacaccttcatcgccaccagcgacattcacatgcagcataagctcaggaagacgcccgaccaggtggtcgccattgccagggggatggtggcctacgcccgcagcctcggatgcactgacgtcgagttcagcccagaggacgccggcaggtcaaatagagagttcttgtatcatattctaggggaagtcattggcatatcacttccagagatgtgtggagagacatgcatattccacctatgatgagttcctcaagctccatgaagaggaattgaaaaagactaccaacttcagaggcagcattgaactattacatgaatgaggacctttacttattcgatgagtttcaggcatcaagaactccaggttctaggaggcctaaaatcattaactaaccaaacagctgttaaaaagggtgacatttcgtttctgtattaggctgttcaatgttgggggttttgccttgacagtgtggtgtgactgtactgttctttttttggaggatagcccaacttggaacgtgcagtcaattttggacctaggtagtgtgcaatttgtattgtctctgaacgatccttccaatcctcaaaagacttaagatgggttaaaaa

SEQ ID NO: 102774 - DNA, 1335 bp, Zea mays
  Clone ID: MRT4577_25238C.1
gactgtatgtcgtcggactcctctccttttcgccggcactcacatacacatttcgcgcatccactgactttaacacaagatccccgccagcgccgccgcgcgaccaccccttcctaaaccccgacgaccaccaaccatggccttcaacgctaaaccctactgctccaccaccgccaaaccgcccacccccgccgcccaccgctcgccgtccggcccgtccccctgcatctccgtccgcgccgccgccgtatccccccgcgcccggcactcagcctatggcctctccgccgccggcaacgcgtcctccagcaccgtccgcctccgcgcgctggcccagcgcacccgggcgcagccgcagcctccccggcggcggcccgagtacgtgccgaaccgcatcgacgaccccaactacgtgcgcatcttcgacaccacgctccgcgacggggagcagtcgccgggcgccaccatgacgagcgccgagaagctcgtcgtcgcgcgccagctggcccgcctcggcgtcgacgtcatcgaggccgggttcccggcctcctcccccgacgacctcgacggcgtgcgctccatcgccatctaggtcggcaacccgccgccgggggacgacgggggcgcccacgtgcccgtcatctgcggcctctcgcgctgcaacaggagggacatcgacgccgcgtgggaggccgtcaggcacgcgcggaggcccaggatccacaccttcatcgccaccagcgagatccacatgcagcacaagctcaggaagacgcccgaccaggtcgtcgccgttgccagggagatggtggcgtacgcacgcagccttgggtgcgccgatgtcgagttcagccctgaggatgccggcaggtcaaatcgagaattcctgtaccatatactggaggaagtcataaaagctggggcaaccactcttaatatcccagatactgtcggatacactcttccttatgaatttgggaagttaatttctgacataaaggaaaacactcctggaattgaaaatgccattatttccactcattgccagaatgaccttggccttgcaactgccaacacattagcgggtgctcatgcaggagcacgacagttagaggtgactattaatggtattggtgaaagggctggaaatgcttcattggaagaggttgtcatggcaattaaatgtcgtggggagctcttaaatggtctatatacgggaataaattcccaacatattactttgacaagcaaaatgccaccagagcccagcggactttcttgtacaccacataaagctattgttggtgccacatgcctttgaccatgaaagtgcca

SEQ ID NO: 102775 - DNA, 831 bp, Zea mays
  unsure (1)..(831): unsure at all n locations
  Clone ID: MRT4577_25239C.1
caccctgcagtgtcgtgccgcccgtcgttccgtcgtgacagcaggggaaaagcggcggcgttcctcccagcggcgtagcggtgggcttccaagaacaaattacagttgcagaaaattagtgattccaatactaaacgtgatgagtgagaggacgcggattacctattcacgtagagctgtgtctaagaacagtgagatcaagaaagatgaacaaacagtcatagaaaaggaagatgacactgaaagcacattggagatagagcgaatcagaggtgaccctagtatgctccaatccatgacagtgaaagaactcaaggaactcacaaggaggatgggagttgctgcgagaggtaacaagaaagatttggtatcagctctgatggaatctctgggtgagggagtaattggtaaagagggagcatcaaccattgagcagattggcccatcagaagtaccttcaaaaagaaaaggtgccgcttcagtagtggttgaacaaaagctagaaacttctgaagttatttccgcaactcctagcaagagaagtagaaccaagcagaaatcaattaagggcaccactccggaggagaaccctgtgactactgtcaagataaataaaacatcacacaagaaggaaacagttgttgccaatggtgctattgcaaaggcggngttgggtcttaatgtggatggtgcagagccttggactgtacttgtacacaagaagccacaggctgagtggattccatacaatcctaaggtcatgaggcctccaccccttagcaaggatacaagggcgctaaagattctatcatggaatgtcaatggactgaa

SEQ ID NO: 102776 - DNA, 5341 bp, Zea mays
  Clone ID: MRT4577_2523C.1
atgtctacacaacgggaccatgtggatcctctcctcgaggaaatccccgtcacatcttccggtgaggaagtggaccccaaggtcctcgaccgacgacctcgccatgaagattgccgagagaatgttcctcaaaatgaaagaggaagatgctaagaaaaaggccgaagaagaagaatcaagaagaaaggccgaagaagataaaggtaagggaacatttgattataatgacgatctagtggatcttttggtgtctaaggtattgagcaaggtaagtctcaacaccaaaggatcatctaccaaaagcaaaggtaatgactttagcaaagttcaattcgattactctagaaattatattcccaacttctcttccgccccacttggaaagttaccaactcttagtgagttgaactatgatgagtgggtcgacaagatgaagtcgcatttaatcggtgtgcatcctagtctttgggagattgttaatgtaggtatgtataagcccgcccaaggagaagagatgactccggaaatgatgcaagaggttcatcgaaatgctcaagcagtgagcataattaaaggaagtctttgtccagaagaataccggaaagttcaaggaagagaagatgcctgtgacatttggaatattcttaaaatgtcacatgaaggagatcccaaagctaaaagacatagagttgaagctttggaaagtgagcttgcaagatatgattggacaaagggtgagtcgctccaatcactctttgatcggttgatggtattggtcaacaaaataagagttcttgggagtgaagattggagtgactccaaggtcacaagattgttcatgagagcttataaagagaaggataaaagtcttgcaaggatgataagggatcgtgatgactatgaggatatgacgcctcatcaattatttgcaaaaattcaacaacacgagtccgaagaagcccccatcaagacaagagactctcatgccttgatcacaaatgaacaagataatctcaagaaaagcaaagaccacaaagcaaagaaagtggtcgagacctcaagtgatgaagatagctcaagtgatgaagacacagctatgttcatcaaaactttcaagaaatttgtaaggaagaatgacaagttccaaaggaaaggaaagaagagggcatgctatgaatgtggccaaaccggtcatttcatagcggattgtcctaacaagaaggaacaagaagccaagaaggaatacaagaatgacaagtttaaaaagggaggcaagaccaagggatacttcaagaagaagaagtatggtcaagctcatattggtgaagaatggaactccgatgaagagagttctagctccgaggaagaggaagtggtggcaaatgtggccatccaatctacatcaagcgcgcaactcttcaccaacctacaagacgactcctacactccaacttgcctcatggcaaagggagataagaatgttatcaccaaattaatggagaagctagataaaagaaaagcaactcttgatgctcaagaagacttgcttatccttgaaaaggaaagaaacctagagcttcaagagttgattcacaataaagatgaaatgctagatgtcttgactaaggaagtctctttagtcaagataactatagagaataaagataaagaagtaattaatatgaaaacctctatagctaatcttgcaaatgaaaagaatgcacttgaaacaagcatgttaagcttgaatgttcaaaatcaagaacttcaagtgcaacttgaaaattgcaagaacatcaatgcctcatctttagtaattgaatctaagtctagctcctcaaatgataattcttgcaaacattgtgccaaatatcatgcttcttgttgtctaactaaccatgcaaggaagaatagcccacaggtgaaggtcaaaggaattttgaaaagatgctctagcaatgatgggttaaagaaagttgaacccaagtacaagtccctaaagcccaacaatggaagaagggggcttgggttcaactcatccaaggaaaaccctagcacagtgcataagggatggagatcccccaagttcatagagggaaccaccctatatgatgccttggggaggattcactcctcaaatgacaagtcacctcaagttaaggtctactcctctggtgggtcaagttgggtgcttgacagtggatgtacaaatcacatgaccggggaggaagacatgtttcattcattgcaactaactcaagaagcacaagaaattgtgtttggagatagtggcaagagtaaggtgattggtattggtaaaattcctatctctgaccaacaatcactttcaaatgttttattggtagattctttaagctataatttgttgtccgtttcacaactttgtggaatgggttataattgtttattctctgatgtggatgtaaagatccttagaagggaggactcctcagttgcctttacgggtcgcttgaagggaaaactttatcttgttgatttcacaacaagtaaagtaacgcctgagacttgtttagtggcaaagtccgacaagggttggctatggcatcgccggctagcccatgtcggtatgaggaatttggccaaacttcaaaaggataatcacatcattggactaacaaatgttgtatttgagaaagatagggtttgtggcgcatgccaagcaggaaagcaacatggagtcccacatcaatcaaagaatgtggtcacaacaaagaggccattggagctccttcacatggacctcttcggacctgtggcttacattagcattggtggtagtaagtatggtttagtcattgttgatgatttttctcgattcacctgggttttctttttgagtgataaaggtgaaactcaaggaatattgaagaaattcatgagaagagctcaaaatgagtttgagctcaaaatcaagaaagtgagaagtgataatgggacagaattcaagaacacaggtgtcgaagaattcttaggcgaagaaggaatcaaacatgagttctcggttccttacactccacaacaaaatggtgttgtggaaagaaagaaccgaactttaattgaagcagctagaaccatgttggatgagtacaagacacctcacaacttttgggcagaggcggtcaacaccgcctgtcttgcaatcaaccgtctctatcttcacaagatctacaaaaagactgcttatgagcttctcactggtaacaaacctaaagttgattattttagagtatttggttgtaagtgttttattcttaacaagaaagtcaagagctcaaagtttgctcctagagtggacgagggcttcttgcttggttatgcatcaaatgcgcatggatatcgtgttttcaacaataccaccggtcttgttgaaatagcgatagacgtgacatttgatgagtctaatggctcgcaagggcatgtttctaatgacactgcaggaaatgaagaactaccttgtgaggccataaagaaacttgcaataggtgaagtgagacctcaagaaaaggatgatgaggaaggaactttctggatgatcaatgaggttgttgatgtgggtgcaaaggtggtgagtgacaaagtctccacccaagcaaacccatcaacctcaagtcatccaagccatgaagaaaatcatcaaaggatgccaacagtggtagaagatgaacacgaaagtattgatggtgaagtgcctcttgatcaagtgaatgatgaggaagagcaaatacaaagacaaccatcagtgcctcatcctagagtccatcatacaattcaaagggatcatctggtggacaacatcctgggtagcatcaggagaggggtaacaactcgatctcgtttagctaatttttgtgaattttactcgtttgtttcctctcttgagccacttaaggttgaagaagcattgggtgatccgtattggataattgccatgcaagaggagttgaacaacttcacccggaatgaagtctggtccttagtccaaaaacccaaacaaaatgtgattgggactaaatgggtctttaggaacaaacaagatgaacatggcatggttacaagaaacaaagcacggttggttgcccaaggctacactcaagtggaaggacttgattttggtgaaacatatgcgccggtagcaaggttagaatcaattagaatattaattgcctatgctactaaccatgatttcaagctatatcaaatggatgtcaagagcgcatttctaaatggaccactacaagagagggtatacgtggagcaaccaccgggttttgaagatccaaagaagccaaatcatgtttatctacttcacaaggcactctacgggcttaaacaagcccctagagcttggtatgactgtcttaaagattttttaattaagaatgggtttacaataggaaaagctgactctacattatttactcgcaaagttgacaatgaattatttgtgtgccaaatatatgttgatgacattatatttggtagtactaatgaaaatttttgtgaagagtttagcaaagtaatgacgaacaggtttgggatgtctatgatgggcgagcttaaatacttcctgggatttcaagtcaaacagctcaaggaaggtacttttctatgccaaaccaaatatacacaagatatgctcaagaagtttggcatggaaaaggcaaagcacgccaagactccaatgtcatcaaatggacacctcgacctaaatgaagaagctaatcctaaatattgccatcttgttgccgttaagagaatcctaagatacttagtgcacacccaaaatctaggcttatcgtaccctaaaggctcccttttcgatttgcttggctactctgactcagattatgccggttgcaaagtagatcgaaaaagcacaactgggacttgccaattccttgggcagtccttagtgtcatggagttccaagaaacaaaattgtgttgcactttccactgcagaagctgagtacatagcagctggggcatgttgtgcacagttgttatggatgaagcaaaccctgagagattttggttgtgagtttaacaagattccactattgtgtgacaatgagagtgccataaaacttgcaaacaatccagtgcaacactctagaaccaaacatattgacattagacatcatttcttgagagaccacgaagccaaaggagatatcgaattgtttcatgtgagcaccgaaaatcaactagccgatatcttcacaaaaccccttgatgagactaggttttgctttcttaggagtgaactaaatatcttggattctcgaaacgtgtcttaa

SEQ ID NO: 102777 - DNA, 691 bp, Zea mays
  Clone ID: MRT4577_25240C.1
agtgaaattgatagcaccagatggagaggagaaaatagcgtgggcagggggggcaggtccagtcatgcagcttacaagggtgttgacaaaataatccgggttccaaccgtgctccgagaatacagcatgacatcagtgacagaaggcattgacgcaatcgtgacaacccgggcgggtaccactggagatgtacgcgtcaacgccaaacatgccctgactggccagtctttcaaccgctccttcagcgggagcggggcatccatggacattgtggtgtccagtgtcagagcttacctgagcgccctgaacaagatctgcagtttcgctggcgccgtgaaagccagcagcgatgtagctgagaccgcaagcgtcccgagcacagaatgagctcccgtttggttcagagtgacatgttgttcaaaatttctgctggaaggatggtcccttgagcttaggacaggcaggaagtcttggggcctatgtagtgagtgtacaatttctgtatctcatataccgtgctcgttgccagtttgtactgtaccatatataaaccatagaatctgttgccatttagaagtctggccaaggtcagctgtaatgcttcacatgcttatagcctggaaacattagacattgaaaaacccgagcagtgaataaaggatgcccaaggtagaaactctgatgaatcatc

SEQ ID NO: 102778 - DNA, 615 bp, Zea mays
  Clone ID: MRT4577_25241C.1
gtcggaatgcagcttacaaggctgttgacaaaataatccagattccaacattctccgagaatacagtatgacatcaggcacagaaggcattgacgcgatcgcggcaactcgggttgttgtcactagagatgtgagcaacaacgccaaacatgccctgactggccagtctttctatcgctccttcagcgggagcggggcatccatggacattgtggtgtccagtgtcagagcttacctgagcgccctgaacaagatctgcagtttcgctggcgccgtgaaagccaacagcgatgtagctgagaccgcaagcgtcccgagcacagaatgagctcccgtttggttcagagtgacatgttcaaaaatttctggaatgatcgtatattgagcttaggacaggcaggaagtcttggggcttatgtagtgtacaatttctgtatctcatataccgtgctcgttgccagtttgtactataccatatataaaccatagaacatgtgacatttagaagtctggccaaggtcagctgtaatgcttcacatgcttatagcctggaaacattagacattgaaaaacccgagcagtgaataaaggatgcccaaggcagaaactttgatg

SEQ ID NO: 102779 - DNA, 854 bp, Zea mays
  unsure (1)..(854): unsure at all n locations
  Clone ID: MRT4577_25242C.1
cattgggtacctcgaggccggccggggacaaggttcagggtattccacagaacgaggcgttggtcttctctgtgcaggaaaacttccacggtcggacatttgccgctattaccatgtccacggaccccgagtctcgtgagaactatggaccataccttcctggaatcggaagtgtctgccctgtcacaggcaagccgattcgttacaacaatgtcgacgatgttcgtgagacattagagaagcatggaaagaacactgctgctttcctcgtcgagcccatccagggcgaggccggtatcgtggttccagatgacagctatctgcgcgaagtaagggcgctttgcgacaagcacaacgtgcttctcatctgcgatgaaatccagacgggcattgcgcgaacaggcaagatgctctgccatgagtggagtggcattaagcctgacttggtccttcttggcaaggctatttctggcggcatgtaccctgtctcgtgtgttctaggttccaaggaagttatgcttactattgagcctggtacccacggttcaacctatggcggtaatcctctcggctccgctgtcgcgatccgggctcttgagctcatcgaagaagaaaacatgatcgagcgcgcagagacacttggtaacaagttccgtcaaggacttcaagacatcaacaacccgatgatcaagacgattcggggcaagggcttattaaacgccatcgtcatcgatgagagtaggacgaacggacacagcgcttgggatctctgcatgctcttcaaagagaagggactattggcgaaacccacacaccagaacattatccgcctttgcccaccgntgatcatcact

SEQ ID NO: 102780 - DNA, 2437 bp, Zea mays
  Clone ID: MRT4577_25243C.1
gccaaattctcaatcaccacatccccccggattaatttaaggggagtctaaggtccaccgccgccgccagcgccacctaaacccgcgacgacggtcgaccatggcgtcctcgctgctctcctcccccgctaaacccaccatcaccaccaccaccaaaacggccccggccccaagacccgcccatgcgctccgcccatgtccatgtcctctccgccgcccgctgcctccgcctccgcctccgcgcgtcgtcgcagcatcctccgcctccgcccaccccgcggtcgcggcggccggattacgtcccgaaccgcatcgacgaccccaactacgtgcgcatcttcgacaccacgctgcgcgacggggagcagtcgccgggcgccaccatgacgagcgcccagaagctcgtcgtcgcgcgccagctggcccgcctcggcgtcgacatcatcgaggccgggttcccggcctcctcccccgacgacctcgacgccgtgcgctccatcgccatcgaggtcggcaacccggcgccaggacccgccggggaggaggacgccgtccacgtgccggtcatctgcggcctctcgcggtgcaaccggagggacatcgacgccgcgatgggaggccgtgcgccacgcgcgccggccccggatccacaccttcatcgccaccagcgacattcacatgcagcataagctcaggaagacgccagaccaggtggtcgccattgccagggagatgggggactacgcccgcagcatccgatggactgtcattgaattcagccccgaggatgccgacaggtcaaatagagagttcttgtatcatattctaggggaagtcataaaagctggagccacgactctcaacatcccggacattgacggatacaatctttcttatgaatttcgaaagttgattgctgatgtaaaggcaaacactcctggaattgaaaacgctatcatttccactcattgtcagaatgaccttggtcttgcgactgccaacacactagcgggcgctcgtgcaggagcacggcagttagaggttactattaatggtattggtgaaagggctggaaatgcttctttggaggaggttgtcatggcaattaaatgccgcagagaactgttagatggtctctatactggaatcgattcccgccatatcactttgacgagcaaaatggtgcaagaacatagtggacttcacgtgcagccacataaagctattgttggtgccaatgcgttcgctcatgaaagtggaattcatcaggatgggatgcttaaatataaaggaacttacgaaattatatcgcctgatgatattggtctaacacgtgcaaatgaatttggtattgttcttgggaaactcagcggaaggcatgctgtgagatctaagctagtagagcttggatatgaaatcggtgacaaggaatttgaggacttctttaaacgctacaaagaggttgcagagaagaaaaagcgcgtaactgatgaagacttagaagcgttattgtcggatgagatattccagcctaaggttatttggtcccttgctgatgtacaggcaacatgtggtacacttgctttatctacggcaacagtgaaattgatagcaccagatggagaggagaaaatagcatgttcagtcggaacaggtccagtcgatgcagcttacaaggctgttgacaaaataatccagattccaacggttctccgagaatacagtatgacatcagtcacagaaggcattgacgcaatcgcgacaactcgggttgttgtcactggagatgtgagcaacaacgccaaacatgccctgactggccagtctttcaaccgctccttcagcgggagcggggcatccatggacattgtggtgtccagtgtcagagcttacctgagcgccctgaacaagatctgcagtttcgctggcgccgtgaaagccagcagcgatgtagctgagaccgcaagcgtcccgagcacagaatgagctcccgtttggttcagagtgacatgttgttcaaaatttctgctggaaggatcgtcccttgagcttaggacaggcaggaagtcttgggacctatgtagtgtacaatttctgtgtgtcatataccgtgctcgttgccagtttgtactgtaccatatataaaccatagaatctgttgccatttagaagtctggccaaggtcagctgtaatgcttcacatgcttatagcctggaaacattaaacattgaaaaacccgagcagtgaataaaggatgcccaaggtagaaactctgatgaatcaccctattcaatttcactggcatatgactatggaggactgaaagggcgaacaatgatttctctactcagcacatagcatactggactgcccggcttcccagattattgaagaatgttacagacgacttgcctgatttttgaatgagcgtaaaat

SEQ ID NO: 102781 - DNA, 440 bp, Zea mays
  unsure (1)..(440): unsure at all n locations
  Clone ID: MRT4577_25244C.1
attgaattctattgttctgagttctgtttaccaaattgtctgtctgcagttgcaccttgtgttacatgattttaattaaactgcataagacaaatgaaattggtattcttatactggctggggaaacctggatacatcctatttcaataatttttagcatctcctgtaatctgaaatgttaatctagtaggaaaagaagtaatgccaatgaaacacagaagactacaaagtctgaacttagaagctgagacacaggaaaacgtggaacaacatgaagatgtccaagatccacaaccagagctcaccattgggtttcctgagggagaagcgccaacaaggaataagtcattcaaaataatatggcaaaatggagttgttcgggaggnttttagaaatttccgaacagctgaattgtgggatctgaaaggaggaagagtact

SEQ ID NO: 102782 - DNA, 630 bp, Zea mays
  unsure (1)..(630): unsure at all n locations
  Clone ID: MRT4577_25245C.1
acacccccactggacgtcagcctagcaattagctcatcgactccagattggagaactcgacaccatgaaggtgctgatcgttgcccttgctctcctggcgctcgctgcgagcgccgcctccagtacaagcggcggctgtggctgccagacaccaccgtttcatctaccgcctccgttctatatgccgcctccgttctatctgccgccgcagcagcagccgcagccatggcaataccccactcaaccaccgcagcaaccaagaaaaacactacaggaagaaacaagacgcgcaacaaggctgcacgtgcacccaagcaaggactgaggaaaggtaaaagaaagaatgctaaggctgctcatgcacccaatgacgatgcactaacggaaggacgtataggttctgtagacatatcaaatggtgcaagcaatgaacatcctgtccaagaggatcaaaaagacctcatacggcaacaacacaacttctcaaacactggagacgacattattgtggatgatcgttcaggtgatgcanatgaaccaaaaattgttagcaatgaacaatatatttccgatgaagaagcaggcacagtgcagctaccgaaccctgcnncaacagacattctggaagcg

SEQ ID NO: 102783 - DNA, 155 bp, Zea mays
  Clone ID: MRT4577_25246C.1
ggccgacggacacggggataccgagctagtgcttcttgccatgacactagaaacaggcgcttcattatgagatacccacgtgcacatccgggagctgcactcacacagcgcgagatacacgaaacgcctgcacaccactgcacttatccgcgagc

SEQ ID NO: 102784 - DNA, 2886 bp, Zea mays
  Clone ID: MRT4577_25247C.1
cccacgcgtccgcccacgcgtccggtcatatgaagatcatgtatttgtgattaaaccaagatagcatagctggttttgattctgatcaggctgagagttctcctgatgcttccatgactgacattgctcccgttcttaatgagattgatccacttttgcgtgctgattccaatcgccccgatcctgttcctaatgatgattcagacacagattctcatgtctcagaggatcatcaaattgacgatgatagtaatgatgagggtgatgacattgatgctaaagataatgtggagggggagaaggaaaatgatgggaaggaagctgcatttctttggacagcagatgatgaaaagaatctgatggatcttggatattctgagatagaaaggaaccgcaggttggaaattttgatggctagacgaagatccaggaagaacatggcatttgaaatcgataacaacttgatagatgttcatagttctggctctggtacaagtttagatgatttgtcacgcttccgtgcacaggtacctcctattgcagtgcccaggaggaacccttttgaccttccatatgattctgaagaagcagcaattcctggctcagctccttcaatactgcatgcacggaagaacccgtttgaccttccccttgaacagtcaaatgacagtgttgttgtccatgcacatgatattttaaactctggagaacctgcgacttctcgtcgtgacatgatctttagaaggcatgaaagcttcaactttggaaggatggatgtgatccaggagaagcgtttttctagactcaagccatattttgttcctgaaactgtggaatggaatgcaagcaatttcgaaagacagttcaatgataagtctgagtctaagatgagctctgttactaaatctgatattgcttcttcagttgctgatcaggaggatcataaggaccaagatgaaaaggaccttgcagatgttggaagtgaatgctcagatggtatcaactccatagatgttgaactagaccacagtgacatcgatgaccgtgagattgctctacagcaatttgtctttgaaagagcacaagaaagggaagcacatcttgtttcaactaaaggaaaaggacgtgaagaagattatgcaccagaatcagctgggagttcaacgatgccatttcatgcagtccctgacctgcttagctgggaagatggagatggtgacaacagccttggtgctaaaccttctttccagcttaacacagaagttaaatgctcagaatgggtttcttcttccaggccacccgtggagggagaatctgattctggggatcttccagagtaccttgatactgaagttgcatcaagctcaaacacagccatacttggtgcaaacaatgcagctgagaaaggtggaaatgttgatcgcatgtcatattcaaacggtgaacagcagtgaagtcaaatgatttctctgtttaaggatttgactagtgaataagcatttatggggttctattgttgttgagtttcacgggcttgccactgtgaatatacttcagacatgcaaaacacaaagttctgatgtaaaccttttgtgaatgcgtttgcttttttgttttttttaatattgttttaaggttttggtgggtttgttttagattgatcccccctcgtttggctgtaatttgaagaggtaagttttgcccagacagttcggtgtggctgcagggacatggaacgatatgttatgccatgtgacttgagattttgttgtattgttttgaactaaggaggatggcactacaagaatggcacagctatatttggatatctacttgattctgatgatgaggctggtaaaatctgtgctgagcctatggaaggcagtggaattgatgaaagtttcctgtctgaattggatgtggtgggagactttggagttgaaccgatgagactggaccagcaggtgacagatcaggcttctcatggtgataaacactaccgatagtgttactgcagattctgttattagtcctcagacatctgacgatgtctccttgatcatgtcgaaagttggtgctgaagaatccagggagcagtctccattggttgatgacctaaatggctccgaattatattaagaagaaaaaaatgtttggaatcataaacacacacaaaaacattcacaccaacaaactcagattacatgcacaccttgactaagtttagaacagtaaaaaaggaactcggactagacctctgatctccatttgatatgctatattggtttaatcacaaatacatgatcttcatatgactcccctaagaatgagcacttacaacttctcgtgatgctataaggacgcacttacagatttttgcgtaaacaacgagcatcctagttgtgttttttaccagcaggcgctgctactcctgtcatacttcaaccatttgtattcacatggtcttaatggtttgatgacagctatcctgttgttttgttcttatctaaaacacagtcacgcttctgtcttgcattgtaatcgtatttttctgacacttgtgaacttggttgctcaggttcatgttgtctctgctaaatatgtagtgaagtgcgataatgatacttttgtgagacttgattcagtagtcattgaaattaagaaggtaccaggtgggagaaaggctttacatggggagtagaatatcaaccaacccgcgcctgggaacaggctgtaacctatgaggtcaagcttatggaatgtttgccatagcagttattacatttccttcgcctcacacccccccttcacttctcttacctcaaaaaaaaaaaaagacgggaacatctgccttaaggtcttaaccaaaatgttcttaaacatgtc

SEQ ID NO: 102785 - DNA, 341 bp, Zea mays
  Clone ID: MRT4577_25248C.1
aagactctatagtgagtcgtattataaaaaaaaaaaaaaaaaaaaaaaaaaaaaaaaaaaaaaaaaatcaaaaaatgaaaaaaataaaaaaggcgggagcgcaaattggtgggacgctgttcctaggtgtcaatggattggtttctcctcttcttaagtttttcctggtttaattgggttagcagtctttttttaacggcgttccggtttgaaccgtatggtaggttaactaattggcgttccataattaagccgtttcgctatctagcgttttttcaattttgccggcttcaattatcagcccaaactctttgtatctcggcatcattcttggatcgttt

SEQ ID NO: 102786 - DNA, 434 bp, Zea mays
  Clone ID: MRT4577_25249C.1
tttttttttttttttttttttttttttttttttttttttggtttttttggtgggaaatttttccaaagatgaaggggggtaattaaattaggggggggcgggaaaaccacaccatggtgggggacagaaaaaaaaaagacgggggggagacgggaatcccggaccggaaccagagggggaaccaaggtgccccaaagggaggccaaaaagggcccgggggggaaacgggcaaagctgattggggggggaaaagggggtcggccaaaaagggacaaaaaaaaccacccgggagaaaaaggggaaaagccggggggggccaaggggggggcaaagggaaattaaaggcaaagcgcccgcggcccaattggggagcgaaaaccgggcagggcggggggataaaagaaccggtcaacgggcgggaagaggggggccgc

SEQ ID NO: 102787 - DNA, 374 bp, Zea mays
  unsure (1)..(374): unsure at all n locations
  Clone ID: MRT4577_2524C.1
gggggggttttttttttttttttacatttacaaagcacacttcggtaagaagcaaacacacgtgtccactgcaaggaacttgcgggcttggttacatgcacatacaggattcgggcaattgatgcatctgcgtaacaaatgacactgttctgatgaggggcgtggtcagttgttcaccgtgtgaatcaggaatgcacatgtggcgtgtgctggggtgttgtgtggtgctggcagggggggaccactgtgggctgtggagagggggagcggtggcgtggggggggccgtgggttggcgggggtgcgcgggtgggcggaggtgcgcgggctgggggggggggggagtggncgctggggcgttggtgacggctgggg

SEQ ID NO: 102788 - DNA, 359 bp, Zea mays
  unsure (1)..(359): unsure at all n locations
  Clone ID: MRT4577_25250C.1
ggccgggcaaccgccgcanncaaccaccccgngngcnccaaccgcnccncgannggagcgaccgagggcgggaggccgacnagggnnnaccggggagcgcgcgcgcgagagagagagagagagagngagggcggaggaaaggggaganggcgcaggcggnggaggaanggnaccggcagaggcccaacaacacgcgccccaaccncaccgccggcggggggggcaccgacgggggcacccacgagaacaaaacgcggaaacaccaggacccgaacccgaagcccgaggggcagcacgacgagaacaggcgccaagacaccaacacaacaaaacagccgcaagaagggaaggcgaaccgg

SEQ ID NO: 102789 - DNA, 564 bp, Zea mays
  Clone ID: MRT4577_25251C.1
ccaaacagggggattccatattatacattattattggaaccacggggaaaaaagttcgggagcaagaaacagccagggcctcccgcttctccttataacatcccaagggacagaatcaaaccttcaacatcaaactggacccagccccccaggcaatgcaagggggggggggggacacaaagctttcctacggtctggggttgggtcccactttttggggaatctaagccaatcagggctcctcagggatcacatgaccccccccccccattaccaaaggaggcggttttaaagctccgctcccattggcccacaggccccgttgcggattggggaggggggcaagggtccttccccctttggccacccttgatctgcttcagggcgggcttgaccgctggaaggagggcttccaggctttctgccacaaaattgggggttgccaggcttgttgataaataagtgttgaccctttgatcccagctggggcccggaataccattgcaatgggggaaatcttcaaacttttttgagccataccaaatgggaaaccaggcgcttttt

SEQ ID NO: 102790 - DNA, 469 bp, Zea mays
  Clone ID: MRT4577_25252C.1
gtgtggtttaaggccttttcccccttttttttttttttttttttttttttttttttttttagcccaaaataaacccatggtggaactaatcaacccttggatcagtccccaaaaggcccaaactcaaaattcgattcagccccttattaccagatttccaccaggggggccccttttgatccttaccgggaaaccgcaaaaagaaccccccggtcctgcctttggaaaccctttactatgccgaccccccaccctgaggaatggcaaggcttcccaaccctttcgtaaaagctcaaaccatggatctcaaattctgaatcgagggctggccctgttcccaataatgggtccccccccttcccaagtttttttggaaaagcaaaagaaaaccctcatgtcccttccctgccaaaaagaaaaaaccccccctttcgtttcctgtatcccaaaaccatataaccagattttt

SEQ ID NO: 102791 - DNA, 1311 bp, Zea mays
  Clone ID: MRT4577_25253C.1
attgggtccctcgaggccggccggggacctcatttcacccatgggtcagaggagctctccgcctctccccttcacaccgccgcccacggcaggagagagaaagcggggacgagcaacagcaggccagggcaggcaggcgcaagaaacttcccccacctccacctcctcctcgccttccgcctttatttcttctcgtctccttcctcggtcctatctcctctcctgctccgccttttcctcatcggtccctcctcccctatcctctgctcctcatcccctgcgctccgtttcttcggggtttgaggcgagtgatctaggccatggcggccaccaagaaaaccaagatcgtcttggcccagccggcggttggggctccgacgtcgcggctgccgttcttttctcgcgcgcccggcccggtccgaggcgccggggacgaggcggcgcacagggcgagcctcaggtaccggtccctcctccaggactaccaggagctcatcaaggaaacccaagcaaagaaggagaggctgtacatggagaggctcaggaagaagaggcttttggctgaagtcaaattcttgcgtaagagataccaatctatggctaagaacccctctcagacaattgcttgtagagtgaagaatccagcactgtcgtctgcatcctggagggctgcttcggtaagtgacgcccagcaccagttggttcgtgctgtcgggagctccagtagaaaccagctggtgcagccaaggcgcggtggttctccaagggtgtatccggcgattgacctcaatgaggcctgtgagccgggttatgagatggaaatcgtcgaagagcgccatggcaacagggcccctcttggcatcaacaagtcaaagaggtatccaatggaaagtgatgctgctgccggcaacaactcaaagaggtatcctatggagatgggaagtgatgttgttgccggcccaacccaggggaggatgcctgtgttctgggatgtccagaacccagcagggcgatctgggaagaggaagatctcatgtcaggatcaacgttagtccttagagtataggtaaacgacaatgttagctctggtacagcagtagtgccctagtaggatcagtatgtgccgttgctagcctggtagatgtaaagggatggctgggacaatcttgacggttatctgctcatgtttattgatgatgaaaacatatgctgttgcatgatgaagtaggtgggcatgtgtgtctgtcattgttttaaagactaccgacccaaaaaaatcctaggcgcggctaggcgtcgccttaccgcttt

SEQ ID NO: 102792 - DNA, 324 bp, Zea mays
  Clone ID: MRT4577_25254C.1
gtggaagctcagacaggaaaaggcatcttagggcaggagctgatgacacctgcaatggaatgatgagtctattgcttcgatttaacgtgtgattacatatatcttgaacttattataagccagtatgtcgcctgtagagtgtagacaggtacttttataatatataatcacaacttccatatgtactgatacattttatctttgttctgcttgctactgttttaattgaatacaagacatactatggaaaaaaaaaaaaaaaaaaaaaaaaaaaaaaaaaaaaaaaaaaaaaaaaaaaaaaaaaaaaaaaaaaaaggggcggcc

SEQ ID NO: 102793 - DNA, 465 bp, Zea mays
  Clone ID: MRT4577_25255C.1
cattggtacctcgaggcggcgggacattcatctcccccttgaagtatagtctcggcggctctataagacgatgggcaacgacgacgtgatcgagagcggcgctggcggcggcgagttctcgtgccaaggactacacggaccctcccccggcgccgctgatcgacgcggacgaactggggacctggtcgctgtaccgcgccgcgatcgccgagttcatcagccacgctgctgttcctgtacatcaccgtgggcaccgagatcggctacaagcaccacacagacgcgtcggtgtcttggcgccgacgcggtgtgcgggggcgtgggggtgatgggcatcgcctgcgacttcggcggcatgatcttcctcctcgtctactgcaccgactacatctcagggggtcacatcaaccccgacgtcaccgtcggtctcttcctggagcgcaacggctcgctggggcgcgcgct

SEQ ID NO: 102794 - DNA, 308 bp, Zea mays
  Clone ID: MRT4577_25256C.1
aggataaaccttgggggcccggcgggtcagagagttcccaaaacgggggaacttaaacccacggaacccaaatggggcaagaccaagggaaaaaagaaaatcccctgccccgaaataaaccctggccaacgacaaggggggggggggggagttaaaacccccccccccgggggtggggcttttaaagcgccttgggggtttcctccaggccaaaaaaaaaaaaacgccccccttcctcaatggttgggacggggaccgggaggggctcggccaaaaaagcgaaccccttcgggcccccgcccaaaact

SEQ ID NO: 102795 - DNA, 339 bp, Zea mays
  unsure (1)..(339): unsure at all n locations
  Clone ID: MRT4577_25257C.1
aaggaacaccaaaatgacatatattccaaaccatctataccatgtgggtccttctaattcagcacactggacatccttcagacatggcaatacaaacagcacaatagctcgacangattgcatatgcatcatcttacacaactactgcaaagcataccatgatcatacctaaagtcgacttacttgctgaaccactcagcttcacatgaccttgccatggctacgtgaccatacatgtagatagcaatctgctatcgaccacagccctataccagtaccgtgcacattatcattgaaacgaaagactacgcctgcataacctatgcatcacatgctatg

SEQ ID NO: 102796 - DNA, 977 bp, Zea mays
  Clone ID: MRT4577_25258C.1
cttttctagacgacgcctgtgtacactcacatctcccgttgttacttgttcctctcctcgccctttgtccagcagcagccgccgagggaccgaggaccgtccccggccgagacgaggacgctgctgctcctcctcctggtcgagacgaggatgctgctgctcctggcgctgttcggctctccagtctccatcgcaatcggctctccaagtctccatcgcgatctccacggttgggcgcctgggcggacacgcacgggaggccgcagtgaataggaggttctgtggaatgaagatttggacaagggctaagatcaagtcttccattatctgttatctatctaagctctaacgctatattggaatctctacagctaatagttagctagctaataaattatttacagggttgaaacagctaatgaactaattgttagctgtaattttaatttgtcctccgccgctactcgagtcactgctccctctccctgtttccctggcggactctgctgctgttgctctcctagaggctagcgctacacttcggctggatcccgcggacgcgggatggcgccgtcctcgtcctcctcgtcatcgagcggctaccacgcgagtctcgccatcgctgccatgtgccgcgccaagcagccgcagatggtcccctccggcaccgccccgtctcctcggctccggtctccggccgtccgtctcctcgtctgtagaagcggacgaagaagacctcgggtctctgagcgagaggatggcgcgcaagttacagacgcagtgcaggtggcggggaagaagaaacagcaccttcccgtcgtgggccgccgacgacgggggagtggaggccgccagcatgggcatcatggcgtcgtcgccttctgccgcctctccagcagccatcgtctccgccttcctcgcgcccccgctgtcgctgctgcgtcacgttgcttctctcttgcccggctacctgggcc

SEQ ID NO: 102797 - DNA, 176 bp, Zea mays
  Clone ID: MRT4577_25259C.1
tgcaggagccgggccggaatatattgccgggtcgccgagctcacttgacggcggccgacctctgagttcaagaaggttgggagcttgcgtgaaccattcacgtcaaagccaaatacatggtgaacttgccggattatacgggcaactgagatgtctgcatcatatcatggaacctg

SEQ ID NO: 102798 - DNA, 240 bp, Zea mays
  Clone ID: MRT4577_2525C.1
cggacgcgtgggtggttggatacacccaaacagtgatgtagtaaccgggaactgggaacttggccacgttgctcgttccaggaacattcgttccgttccgggaacgtgggaacaatctcgttccagtagtgttaaatcctagttttagtatcaagaaaaacagcctagctgtaagaaaaataaataaaagtcaacacaaaattaaaaaaaaaaattgtcaacaaaattaaaaaaaataca

SEQ ID NO: 102799 - DNA, 678 bp, Zea mays
  Clone ID: MRT4577_25260C.1
tcgaggccggccgcgatggaagtcccctggggtcgacggcgacgtcggctgccagcgcttcgtctctctctctcgacgacagcttctcggcgaacgccggcatgcagtcccactgttggattccctgaattattcaccctatttacttccatcggtagatgcagcatatatatatgcatggatgattcatcatcaagcgcgcgcggagtatcagatatgattaagtatagagtttatgaaataattaatatagatatagtaggtttccctcactctcatcgatcagggtagtaacaacatgggttacatgtaaatatgtttacgtacgtacgtatatataatgtctagtgaaggcaacggcaagcatatatatatgagtgggtgtcagtcacgagccagtaaggaatagctagtacttgaaactcctttacagctaagctatatgtttgtagcgtgcatgttattgcattggacacggatgcgcggctagagattcttacattattcttcataaaaatgtgcctgcctcccttttactcgcatatgcgtgatgcacactatacacattcttttcagagagccgctatatattctcaggcgcttgttttttttctggaaacatcttatacagtaaattcgtacagttaaaggacgaaaaaaaaaaaaaaaaaagcggcc

SEQ ID NO: 102800 - DNA, 516 bp, Zea mays
  Clone ID: MRT4577_25261C.1
cccctcctcgagttttttttttttttttttttttttttttttttttttttttttttttttttttttttttttttttttttttttttttttttgggaaaaaaggggttacgttatccagggttttcctcaccttataaacccaagaacttggcccttttgaaacacaaaccaaatgcttctgatttggcacatgaggcaggagcggcccccaccataaaaaagaaaattttttttttccatgacccaacattggaaaaaaattaacgggggggggcacttgcaaaagggcccttttttttttgaaaccaaacttttgagttattaaccagggggggggtcctcaaaaaaaaaaggagcccttcacaactacaggggggaaaaaggctcccccacccccgtagtaatcccatagcccgccaaaattgatccccagctttgattttttaagggcccccaaccaatccgggtcatttggagttgccgggcccaaaacgaagggaggggctcctaaggggg

SEQ ID NO: 102801 - DNA, 170 bp, Zea mays
  Clone ID: MRT4577_25262C.1
gccgctgctcgtttcagaacgcggcggcctcgcctgcctgacactccctcgaaggcggccgcatctactccatgtcgacctccgcctccaaataagaaaatgcgggtgacacgacgccaccgtcatatccagctgcgtccttaacccatctgtaggccgctcgatccacc

SEQ ID NO: 102802 - DNA, 846 bp, Zea mays
  Clone ID: MRT4577_25263C.1
accaagcccacagaattccaagaggggaagtatagagagagggaggagcggcaccggagcctggaggggagatttcgtttggcgcactagggagtggagagcgatagagttggaaggtggaatcagaaatccacggcgaatacagggagtaggggggatctggagctcctgaggagtagtagtaggtaggagctgtaattgtaacggttggcagagggggatcctctcgatctgttcttgaggagagctggaagactcccatcttttgagccgcggagccggagaaacttggatctcgaggccctccaagagaaaccgtttctcgctgctagcctcctgcattgctgcctctcccccctcacacccgacctgccacaaggagaagggtggaatctctgctcgccttctccactaatcggctcagaatctgggttccttgacctgttcttgggagcgccgtgcctcaaatctttaggggggaaaaaggtcgatttttttttgttttgtgtgtgtgttgggtagatgcgggagtgatgtcgactactttatgagctgccccctcccctgctactttgggggtttagattcgctatagttatggcggatctcgccatggaccattaggagttccatttcgtcgaaggcgaaaggagcttgcccgtaagctgcaatgtctctcaagagcatcgttcgggagctgaaggagatgagggacggcatcgggagcatgtcgagacgcggcggcagcggctccgacggccgcgccgccggccacgcccgctcggggtcgcggcattcctggcctagcctgtgggcggagcagcaacagccgcagcggcagggcca

SEQ ID NO: 102803 - DNA, 853 bp, Zea mays
  unsure (1)..(853): unsure at all n locations
  Clone ID: MRT4577_25264C.1
cattgggtacctcgaggccggccgggataacgacaaggtggtcatttccatctctaccgagctatcgttaagatacgctactactagatgtggagtccgatcaccgcccgagtcccgtccgtactcctgcgcccgtcgtcgttgttggtcttccttgatcattctatccgattcggacgcactgctaccgcgtcgccgactaggcgcatcctcaaggcggaggccaagggcgagtggctcctcgagccttccctcccccgcctacctcgaaggaagactgccgggtgacaatgaattccacccgttgggtctggcggacgacccagagaaactgaggtgtgacgagcagcgagagctggtgaatgtgaggagggcgatgctgggcgaggccgagatgctgatcccggacgtgctgaccaaggacgagctgatcaacgagccgctgtgctacgacgccggcaaggcgtactacttctgcgtcgtcgtagacgctgatagcgatcgagttcatcctgttgtctctacgtgaagatccggcgcgggtacgacatctagaaccacgcgagcgtcaaccaggagcccatcttcaagaagtacaagctgccgacggacgagtgcggctaccccggcagcgtcttcaacccgctcaacttacgtgcccacactcgaggncaatgcgaacgagctcgccaacgacaggctggccatgctggcgttcctgatcatcctgatgcagcacaacgtcatcggcgagggggtcgttcgacaacctgctgcagcacctgtcccgaccatggcacaacaccatcatccagaccctgtcgggttgaggcgaacggccatcaggtcatgt

SEQ ID NO: 102804 - DNA, 532 bp, Zea mays
  Clone ID: MRT4577_25265C.1
cctggccccctgccggggctccccgattgtggtacctcgagggcggacgggacggttttcacacggcgtcgcgctctctctcgtttcctcttccaagcacccgtaaccctattgatctcggaacccacagccgagcgcggtatctcggcgcttcaccttcctccacgcgaggcatggacgaggactactagatggctaccgccggtgccgatgagatgatggggcgacgacgacatgcgcgactacaacggctacgaggacccggtgatgaaggagtacgcggacaacgaggtcggcgaggagggggtcaagaagaagctgcacaaggagggccagggctgggagactcccgacgtaggagacgagagtgaagtgaattacacgggttatgtctccttgacgcgacacacaccgactccagacgcgatcgggcagaaccctcaaagaccaaactagtcaccggtcaagcgaaaaagggtggggaatcaaagaatcaagaccatgacgacaggagaacaatgctattccgacc

SEQ ID NO: 102805 - DNA, 344 bp, Zea mays
  Clone ID: MRT4577_25266C.1
gcataccgcatattttaagcatcccatgaatgctcaaaaacttcgtatgctgcaattgatggatcttacattccgggttggcaaggtatgctcatccgtatttgaagattgacgttgtttataacctgatactattatttgataagatacatatagtcttgtcagttggctttacctttcgaaacattttgattgttattgtatttaataataacatattttcgtctttcctgtaaatacctgttaaagttaacccttatttctgttacagttttaaaataaattatttatcttattataattattattttatttctttcttatattattttttatttttttta

SEQ ID NO: 102806 - DNA, 408 bp, Zea mays
  Clone ID: MRT4577_25267C.1
ctcgaaccatcgtccgacacgcgtccggcgtatttgccgtggagatttcaggcctgcggcgaggattgcaccttgtgaatccgcggagaaggcgaccagctgcaccatggcctacagactgctcaaccgctacatcaggcataaccgtaccgtagctgccgatctaggactcgctatcagaactgaatcctatgcatacaggacctagacagacatccaaaagggtgagacgctgaaagagaccatggatctcttcccacacatcgctacattctgctcagatgctgccactaacgaagccctcgatacgaggtaaccagagaagcgccaactgactatcccatatggcggtaaggtccttcagttacatgactttcctgctgataatgcacacgaccatgatcaaat

SEQ ID NO: 102807 - DNA, 322 bp, Zea mays
  Clone ID: MRT4577_25268C.1
ctcccacccactccaccgcacccaccacacatctacctcactcccaaccaacaactgaaagatcagttttacatctacatcattcttcaccatatctatctctatcctatatccctacctcgtacctaacaacctccactcaactcctcatcctcctcatctacacccattgccactgcccatttccacaccccaaccccatctcaaccaccaaaacactcacctcgaataccctatctcctaccaccaatccacccgaccatactgccccctcctccaatcccaatcccaaactaccaaataccccaacttataccaaacc

SEQ ID NO: 102808 - DNA, 285 bp, Zea mays
  Clone ID: MRT4577_25269C.1
gccaggaaagtaacaccctcgttaggacacttgtcatggtcagcaaaacatatcaaagtgctgctttgacattgccaatcatggcaataaatgtgaaatatttacaactcacggccactgatttgccaaggggcgggggggcaatagatgtggcagttaaaattctgtgttattcggtgtgtggtgagcagcccattttcacagttgcccttgcttgagcttcttcttgaaggacatcacctttcttctttctttcctttggttcctggttgttcctcttttgtc

SEQ ID NO: 102809 - DNA, 326 bp, Zea mays
  Clone ID: MRT4577_2526C.1
gacccgccgcctctacttccttgccgccgtcgccgtatgcttcctcctcctcctcctcccagcctcctctgtcgccaccgacgtcgattactgcagtaaaaaggagtacccggtgaaggtgagcggggtgcagatcgtgcccgatccggtcgagcccggcaagcccgccactttcaagatctccgcttctagtgggggggccatcccgattttttttttggagatcgacgtgaagtacttcttgttctacgtgcacttggagacgcgccacccctgcggagagatcttctgtccggcgaccggagacttagggctgacccacaagc

SEQ ID NO: 102810 - DNA, 377 bp, Zea mays
  Clone ID: MRT4577_25270C.1
gagctcactagtcggtggccgccctttttttttttttttgttgttggggtctattacaagctttggggagcctaaaaagcattgtcgttcgtaaaaatgtgcgtacgctataaccgcttatagaggggctgagccacaactctgggataatgcgaaaaaggaagtgcctagacggagccctgcataagagttaaaatggtatggcaaaaacgggagaggggtcttgcttgacaatggcttggagcttcacgtgaactcacatgctcccagatatggtggcggcgagcctttaaaccggccttgggttgtccactttgacttttccacggggccttattttaatccgggcttggtgcttaaccgagatccatgcaaag

SEQ ID NO: 102811 - DNA, 617 bp, Zea mays
  unsure (1)..(617): unsure at all n locations
  Clone ID: MRT4577_25271C.1
gaaaaaaaaaaaaaaaaaaaaacaaaaaaaaaaaaaaaaaaaaaaaaaaaaaaaaaaaaaaaaaattaaaaaaataaaaaaaaaaaaaaaaaattaaatatttaaaaaataaaaaattaaaggggaggcggtttataggggacccaagcttctgatccccggccctgcccggccccccccctcctttggggggggggggccccattccccttgcccggggctccccaccgacgacctggggaaaccccgggcttgccccanctgagcccctttccggccgttccccttttccccctttgccccattcccaatggggcccgccccgcgcgccttcccctttttttccccccccaagaggggggttggggccgccccctttcccggggcctnagccgcggggggggggggggttccccccgccgggcccgctccctttcccccccccctggcccccgcccctcnccttttttccctttcctttttcccccttttggccggttttcccggtnccccccnactcgggggcgccccctttgggttcccgttttggggttttggggcccctcccccccaaaaacccnaatnggggggcgggggccccttgggggccccggccc

SEQ ID NO: 102812 - DNA, 624 bp, Zea mays
  Clone ID: MRT4577_25272C.1
ccgggaaccttctatggttggggccagtatgctacacgatgcggtttcggcgtgacaacgcctggtagtcttgtatataagacctacggcttcttctatatgaacttctagagcgagtggctggccgctgttgtcgtgagccacagtacgcgaccacggccgaggtcaacgaggagctgctcttcccggcccatcctgggtatgaaggcctacatgcatgcatgagaaccatggataattatctgtcaatgaacaggagagccctcgtcatgacagaggggaaagacgccggacctagcaagctaaggacagtgcgtgtgcattagcactaccaccgtaccaaactagagcgacagaaagcccatatcgagagctatgcaaacggcacacatgatgcactgtatcattctactgacggaacagaatgaggaaattacacatagctgtggaacaagaaacctataccctgtgaatgctacttattgtgtggtgctctggcgtttggatctacatgtctcagatgcgggatctgcacacgtgcgagaatgtttggctagtgcaacatgcgtgcgtgcattgccttactagcatttgtgtatctccttggactctagaccgtactaa

SEQ ID NO: 102813 - DNA, 381 bp, Zea mays
  unsure (1)..(381): unsure at all n locations
  Clone ID: MRT4577_25273C.1
cgggnccggaatccccgggccgaccacacccttccaaccttttgtttttggtaaagaagccaggttttaggaggcggttagaccattttgtaaggggcaggatttggttttagggcgcggtgcgcacctgaccaaggctattcttttgggcctctgcaaccggcgtgaaccacacaccgctatcaacctgttggcgtccatgatatcagggggttgcttgccaaatgaatcgactaacactatactggttgaaggctggcctaatgaaggctgggtaaaggaggcaggagaattgttggctaaattgtgctctaaaggagttgtgattaaaaaccttatgaagaagggatccattaaattgctaaatgggcctacacaaac

SEQ ID NO: 102814 - DNA, 115 bp, Zea mays
  Clone ID: MRT4577_25274C.1
aaaaagaaatatgaaacgtgagccaaagccaagccttgtgtagctgtatcgcggcatgagctcgtggcatgagctggacgtgtttgttctgatggcaaatcagatcttctcgccc

SEQ ID NO: 102815 - DNA, 302 bp, Zea mays
  Clone ID: MRT4577_25275C.1
gtaatatgcgtctcgagctcctcccagcggttctccaccatgagggtaatggctcccaaaccgcctagtacggacctgtttgatggactgaacaagggacatgtcgtcaccaagaaggaattgcccccacgcccctcggatcgtaaggggaaaacaagcaagagggtgcactttgtgaggaacctcataagagaggttgctggttttgcaccctatgaaaagcgtataactgagttgctgaaggttgggaaggataagagggcacttaaggttgcaaagagaaagcttggaacccacaaacg

SEQ ID NO: 102816 - DNA, 460 bp, Zea mays
  Clone ID: MRT4577_25276C.1
tggccttggacctttgggctgatttatgtgcttgtcgcaagcagtggcccttggcactcagccgtccgtctcctcctccttgtcgagggtgggtgatcacctccgcttccttcttgataacaaattaatgggttcgagactctatcgcgagatgtcgcaaacaaggaaatacggaagccgggagtcagctaccgaggatgagccaggtttcgcctgcccatactggaccgtatttgaaaccaccttggtcaactaaagcccacacaaaccacagaagtaacttggtctggaactgccttgatttattaacttgatataaatgaataaggttccagtggcgcgtacttagggggtccccgcggtctaacacgcgacgttcccctgttttcgtcgacccctcgcaaacaaaatgacgtcgggagttactggcgcgaccgaatcagcgtctcggcacgtgcgt

SEQ ID NO: 102817 - DNA, 443 bp, Zea mays
  unsure (1)..(443): unsure at all n locations
  Clone ID: MRT4577_25277C.1
cgggggggggggggtcctacgatccaaactctctgtgctcgcacctggcgaagaactcccgaccgtgagcgccgagtacagcgaggctgtggagaaggccaggcgcaagctctctttttttttttccganaagagctgcgccccgctggtggggcggctcgcgtggcactccgcggggacgttcgacgcgtcggggaggaccggcggtccattcggcacgatgaancatcanncggaattggctcacggcgctaacgcggggctggacatcgcggngcggctgctcgagcccatcaaggaggagtccccaatcctctctnaccccgcttnctaccacctcncgggagtngcggccgnggcggccaccggngggcctgngattcccttccccccccgnngggaggccangcctgaacccccacctgngggcccccttcctgacg

SEQ ID NO: 102818 - DNA, 369 bp, Zea mays
  unsure (1)..(369): unsure at all n locations
  Clone ID: MRT4577_25278C.1
cgacgggacgacctcgctgtcgaatatggagtcgccgaggttgccggcggtctgggtgcggtagatcctcctgccgccggcggaggcagaggagtctcctccgggggtcatcctacggcctccgccgccccccgaggaggatgccatgggtatgggcgggttctcggctaccctagtacagccgccgcaggagcaagtgaattgcgatgttcttcttcttcttcccgatcaatcagctctctccgcggcctccccctgcaacagccagaattgaatngaacaaagtcaagttgtacatgatttgatggagatgaaatttgaatgaaaggagcggggggccggacggagtaaacaaaaaaaaaaaaaatt

SEQ ID NO: 102819 - DNA, 334 bp, Zea mays
  Clone ID: MRT4577_25279C.1
gttatacaggttcatagaaaggattgtacttgcatatgccaaaaattgcggagactattcaggggaagggagtcagggtgacacacacgaagctgcaacgcggaactgcacgaatactcaaagaaccagacacacgaaggagctgatgcagctgttgtcagaaggggcggcgccacctaataaaaggttaggaaggctgtgaccggagcttatctagacacacaaccttgggaatatacacggccggcttcctgaccaaaaagaggatagggttgtcgcccatgacaccagcgctgacgatgcgcgccgggtgcagcaagagagagagattgtc

SEQ ID NO: 102820 - DNA, 445 bp, Zea mays
  Clone ID: MRT4577_2527C.1
aaaaggaaccgggttttttaaaatgtttttggaacagcccaagaaaaaaaaaaaaagccaacatgttgggccatacaaaagtccgggcctgggggaaaaaaaatgtttgaaaaagcccccccttgaaaatttaacaggggggggcacccccatatgggaaaaaaagcccaaacatcgttgcacgggggggggggaaagccctactccgaaaagggaaggcgccttctagcccggacagggggggaatcttggaaccgggttaaaacggggttctgggacatttccccagcccaaggcatatccccgataaattttcagacaatgaggaacaacaaccccaaggggaggggccccaaaatggttttaaaaaaaaaaaagggaaccccaaaaggggggggggcccaaaaaagggggagcacttgccaaatcaacccaacctggggtt

SEQ ID NO: 102821 - DNA, 231 bp, Zea mays
  Clone ID: MRT4577_25280C.1
gggagcttcgaggcggccccgcgcggtccgtgggccgggggggctaacccaatggaccggcccttggggccccaaccccctaacctgggttcgggccggccgccaaccaaagcccccgttggtaacctggattcttacctaaaggccttcaatcataattccgcacaccggaacttcgcgccactgggtttttaacccaacgccattaccaattgggtgaattaaccggtc

SEQ ID NO: 102822 - DNA, 612 bp, Zea mays
  Clone ID: MRT4577_25281C.1
atccgtccccttccacctctccccgaccttgccgaccagccgtccatcccaccgccgcatcctctgcccgaggagacaggagaactgcagggtgccggagacgccgagatcctcggcaccctcctgagactgggtactcagatgtactccaacgccctccgcaagcttgcctacatgcgccatcctatgggagcatgtgtctgaggatggctctcgaagcactagttgtgcaccagctggtacaatccgatgcgcagctccaaggtcacctcgaccacatggttgagcgcgccagcactagacaacgagcaacgctaccttgacgatgatgaataagtgctcagatttgactgtcagggacctgtatttttttgcgacatgtggtcagcacacatggtcagtactgtgcatgcaccatgagttagttgttgtctcaggttgcgcatttcaactgtgtccttgtaataaaatggtcctgcccaacggatctgatggatctcatgtgtaagctacagattatgggctttgaacatgatcgctgtactttctctgatgcagaattactcactctataatgactgtgcttttgcaatgccaacacagatgactagt

SEQ ID NO: 102823 - DNA, 371 bp, Zea mays
  Clone ID: MRT4577_25282C.1
gcggccgccctttttttttttttttttttttttgtttttttttttttttttttttttttttttttttttccaaataaaaaactttatttttgaactataccttataagaaatctaaaagggggcccccccaatgttggtttgttggttgaacactgttgggtttgtaaaaacaagttggttgaatggcatcaatttttgctatattaagagggtgccagcttttggcccaacttgctgttagaacggtaacaactgtggtagttttcaaaaatggtccatggtttacacctttttgttgttttaatggtataagttgttgctcttttaaataaactgggaattctctatgctttttgttgttttaatagaa

SEQ ID NO: 102824 - DNA, 714 bp, Zea mays
  Clone ID: MRT4577_25283C.1
aattcggcacgaggcgcgagctcgcttgctgcttcctgtggacttgttcgtcttccaactcttccttcctgtctgtccccaactcggagcggcgacgccgagctcaccaaccctcccgtccggccaccccgtccccacccacggctactactactagtacccggcgctcccccttcctcggtccattcatttgccaccgccgtcccctcctctcctctgccccttcgcttctctctgtctttcctaccgcttctattttagttcattcaactcaggttccattcgtcattcaaagaagagcaaggagcttcacagatccggccgccgccgctacctcactctacttcctgctgtggcccctgccttcctcccctccctccctgcttctcccccatctgaatctgcgtgcgcgccgctgcttcttgctttgaatcctgtcccggggttccgccctgatttctcggtctttgtcggatttgctttccgttcgcaattcgcaaggggggcaaaaaaaaaagttgccatctgttttctgtccttccgcagcgaaatctgccggttttgattgatcagccaccgccactgaccgatccgtacctgcatcctccagtacccgggccgcccgccatggcctccaccggcggcggcggcggcctccgccacagcaacagcagccgcctctcgcgcatgtccttctccggcggcggaagcgac

SEQ ID NO: 102825 - DNA, 354 bp, Zea mays
  unsure (1)..(354): unsure at all n locations
  Clone ID: MRT4577_25284C.1
ccggaatnntcccgggtcgacaccagcgccgtgccggaaagcgagctgggctctcgtcctctcgcctcacagggtcggggctcggcttgtgtgaggggtctcgcggcggtgtcgcgctgaagcggcatgagcgggatcagagcacgccaccacatgctgttccgtacctctgctttcatagccgactagcctgtgacacggccgaccactgtcttcacaccctcttcagaacctaccgtgaggtgctggattacacgatcatacttgatcggcatacgcttacttcccacggctttgactaccaaaccttctccacggccgatgcaattccgaacgccatcgaagaccctaacg

SEQ ID NO: 102826 - DNA, 158 bp, Zea mays
  Clone ID: MRT4577_25285C.1
tcccgcgcgccacgccagcgtgcggggtgaccaaaaccattatcttctatctactccagagcgcgaaaaaaccccatcgcgaccatcagggggtggctcgttgccctcgctctcctgcgtctcgcactggacgccacctgcacgcctacacggggggg

SEQ ID NO: 102827 - DNA, 312 bp, Zea mays
  unsure (1)..(312): unsure at all n locations
  Clone ID: MRT4577_25286C.1
acagtgacatttcattaaaattttttttttgttttttattaatgaattcaatttactttatagaaataaaaaagcttgataaattttattaaaaaaaacaaaatttttttttnttatctataaaaaatctttttaaaaaaaaaaaaaaaactcttgagggtttaaaaaaatgccagtgttaatctgtgttaaatttctttaaaaaacgttaacaagaattttttggttgtatacccaaaacactttttttgagaaggttttgttaaaaagaactcacttacaaaaaaaaaaaggtttttttaaaaaataaaa

SEQ ID NO: 102828 - DNA, 686 bp, Zea mays
  unsure (1)..(686): unsure at all n locations
  Clone ID: MRT4577_25287C.1
ccacgcgtccgaggctgctgatgttcattggatcaatagcaatcagtatggttttatcaactcatcagacaagtatgcagctgcgcctcaccgtggagtgcctactgttcgtcatctgggacatggcagtcctgatatctaccggaatggtgctgtaattcctaatggaagtaaccgacggggtttgacacatgtgaataactgtccttttataagttatcctgactgcttatgtgaaacctgtgaatattgtcagattcgtctatctgaaaatctcaaacgttcatttgggcccagacattcacccaaatgttcattagacgattgcatctctgataaagcgaaaagttcaccgtcatccttggattctgtggccatgaaatctgcccaactgccctatagttcagtcgatgaagttgttggggaattgtaccacctggcgaaggatcagaatggttgccgtttcctccaaaggatatttattgaaggttctcgagaggatgctcgaaaggtctttgatggtgtaattgagcatatcgatgaacttatggtggatccatttggaaattatttgatacagaaaatatttgagaagtgcaaatgatatcaaaagatgcatatactttatgaaataccaaaatacctggccagctaattgaagttgcatgncacatgcatgggacacg

SEQ ID NO: 102829 - DNA, 140 bp, Zea mays
  Clone ID: MRT4577_25288C.1
ggccgcttttttttttttttttttgtagtggcaaggctcagccacaccattttataatcacacgagagaccgaatgagggagcatgcacacacagacacgtcacaagggacccattgactacgtatgaatgcatatagag

SEQ ID NO: 102830 - DNA, 306 bp, Zea mays
  Clone ID: MRT4577_25289C.1
acgcggacgcgtggggccgaaataccgccttattaggaatggtcttgctactaagggggggaggggctgcaagcatatgaaggagcgtaagaacagggtcaagaagatccgtggtgacaagaagaccaaagctggggacgcctagaagaagtaaacgttcggttacatttgtattactgtgctgggctctgggaggtctagctgtcatggcttatttatggccgtgttatggtttgttgcacctttggcactgaagggatttttttggaattcctgtgtactgaagtgaagttctgtcagaatatt

SEQ ID NO: 102831 - DNA, 619 bp, Zea mays
  unsure (1)..(619): unsure at all n locations
  Clone ID: MRT4577_2528C.1
acgtaggtcggtnccgaggtaaaaaaaaaaaaaaaaaaaaaaaaaaaaaaaaaaaaaaaaaaaaaaaaaaaaaaaaaaaaaaaaaaaaaaaaaaaaaaaaaaaaaaaaaaaaaaaaaaaaaaaaaaaaaaaaaaaaaaaaaaaaaaaaaaaaaaaaaaaaaaaaaaaaagttttttccttccccgggggccctttaggggcaatttttgaaattttctttaaacttgggggccttttaacttttttttaaagggccccatttccccttttggggggtgttttaaaaattaattgcccgcttttttaaaactttttaattggaaaaacnnnnnnnnnnnntttnttntttttttttttttnttttttnnnnnnncccctgggtttcccaaattaattccctttgaaaaaaatccctttttccccatttggtttaaaaaaaaaaaggccccaccaaatcccttttcaaaaaatttgcccaccttaattggaaaatgacccccccttttacggcccttttaacccggggggtttttgtttttcccccaaggttacccttttattttgcaagcccttaagccccctttcttttggttttttccctttcttttttccccatttt

SEQ ID NO: 102832 - DNA, 1701 bp, Zea mays
  Clone ID: MRT4577_25290C.1
cctagttctaggatgcgagcgccgcccttttttttttttttttaatagaaatggggtcctcctctcgtcaaaaaaaaatgtgacaacttacatcattcctaatgttgttgctcatgacaattttcggtacaaactattgacagcaaagggcttttggtcgaagcaaatctcttgcaagccatgcaaacatatcggtcgtctcaatcagctcgcacccaatgcagtaaaatatagaaatgtaccaggacggcagaagcgaagtatggcatctcataggcagaagctatctatatatcaaatgtcaggtgactagagcgaaacacagcaagctggctccgtccgaacaatcaaatctcaaaccatttttaagtctagacgtcctgaatgggagcggagatgaactacccatgtatctgctggacaaacaaggcagacactatcgaagcttcgactcatttgacctgctgctccggaagtttgagagtgagaagaacgaccttgatgctcttgttgatgtggcagcacctgatctctcccgtagcttatccgagttcaaagagttgaagctgccggtagttgattgagctgataagatgctattagtctttgaaccatcaaaagttctcctgcttgaatttgtaccatcactagtgcctcttggttcttctagttcatcttctccttctgaaactaccgaggggcttgcccagccgttagcattgttgtctcccttgttttttcgagcaaactttagaagcctcttgaatccttttggagaatccttatgaaaaactattgcgggtgggttttcagcatttccccactcaataatttctggttcattgctatctgcttgcagcatttgtgacaacgaatgacgcactcttgggcttgatgacggcaatggtgcaattcctggagaagttacatcctcaacaactacattttcactcgaaacagtgacttctagttcttgacgctctacttctacccacgcagatgatgagatgcccatgtcatcgtcaggaggttgtatggcctcatctaactcatccgtagagggttcaacttggatactggagcccatttctgttgcagttaaactcgaggccggtttctctgttttttcaatattcaagtcattatcgagcgaaatttctaaattttcatcaacatcatgtgctggttgagcaagatcagcctccagtaccttagtagttggctcggttgtcacaggagattgctccttatcttcagcttggttaacacttccggtatcttttgagaagtcattaggttggggtaccttattcttcaccataccagacctaatgctctgactaattccagtggttttcttcaaggttttggactcaagaggtacaacactgcttttatttgaaaccttttgcaagctttgcttcgtttttacacctgatttttcttctgaaggtgaaactttagttattctgcttgtctttgttgctgttttggtcttctcttcttgtccctttatagctggcttggtagcagtaatggtttccttcttgttcttcactgattgaatggccctttccgcttttgaagctggctgagacggcgagggcgttgttggagtccttcggctagtttgtgtggacgttgaagccatcccaggagaccttttagttttttgtgacgtagttgctttagtcaaagaac

SEQ ID NO: 102833 - DNA, 154 bp, Zea mays
  Clone ID: MRT4577_25291C.1
cgtcgccatgtctaatgatatagatgtacctgttgtcaatgtgctttgcatgtcactatcattgtaggcgttttgaatgtgtaggcatactcgctagcattataaattgcatacaactacaccatttatgaactaaatggtactcaacaacatg

SEQ ID NO: 102834 - DNA, 493 bp, Zea mays
  Clone ID: MRT4577_25292C.1
aaaacaggataggaacggggcggctccgcccgattgattttttgaagcggaatggttccaaatctggggggaatattccctaattaaaaccattccgttctagttactttggaactaaacagcaacaaaactgggacagaacagctctgttctacttgacttttcaaccaaacactaccttaaactggcggattcggggtaatttactggttcgagggatgggttcaaccggagcagctccaccgcgctctaaaatttggcctgcatataaacacaaactaattttttctctctcgctacattgaatcgagctagcctaggaatgacatgcccccaaaatttaatacccctcatttgaaataaaaagaacatagaggcagcagcatcagtggcagtgctaaaccgcaactgcccgagcaccagctacaggtatagctaccaaatcgtaaagccggttacatttggcaaaacccaaatgtttggaccaaaccgt

SEQ ID NO: 102835 - DNA, 667 bp, Zea mays
  Clone ID: MRT4577_25293C.1
ggtaccggccccccctcgagttttttttttttttttttttttttttttttttttttttttttttttttttttttttttttttttttttgggccccccataggcggaagctttttatttataaaagggcaggggactagggcgaaacacagcagggtggctccgcccgaacaatcaaatctaaaaccatttttaagtctaaacgtcctgaaggggagcggaaatgaactacccatgtttttggtggacaaacaaggcagaccctttcgaagcttcgactcatttgacctgctgctccggaagtttgagagggaaaaaaacgaccttgatgcttttgttgagggggcagcacctgatctttcccgtagcttatccgagttcaaagagttgaagctgccggtagttgattgagctgaaaaaatgctattagtctttgaaccatcaaaagttctccggcttgaatttgacccatcactagggcctctgggttcttctagttcatcttccccttctgaaactaccgaggggcttgcccagccgttagcattgtggtctcccttgttttttcgagcaaactttagaagcctcttgaatccttatgaagtttgatatttacaatcaaaaaaaaaaagaaaaaaaaacccaaaaaaaacaataaaaaaaaccaaa

SEQ ID NO: 102836 - DNA, 340 bp, Zea mays
  Clone ID: MRT4577_25294C.1
ggtaccctcgggtccggccggggaggacccgcacaggcatcccaaacgtttccacgttcccggatcccggatccatcccctactttatatagccttccaaaaccccaaacctccgcgtctctcccagccctcacgaaaacgagatggagtttctgtaccgcgccgtcgacgagcctcgaagccggtccccgccaccgccagcggcaccagttactcctggttccggatcgactgacggccacggaagcgacggtccggcggagtgcgtgggtaatttctgccgtgacgctatggcaggtccgatctgccccccccggagaccggcggaagccgaccccta

SEQ ID NO: 102837 - DNA, 760 bp, Zea mays
  Clone ID: MRT4577_25295C.1
ccggcgtttccttcggtgcccacgtcgcacactcgcagagccgccagccacctcccctctccatcttctccccatggcacccctcctctccctggctggacgcgggcatcacctttttcctccctctctcttccccatcccctccacgcggccatctggctgtggctcggcagccggcccggtgccctcgcccgcatgcacggcgtccatgctggtcgtcgaggtccctgcgtacaagcagcagaaccgtcgcaacctactccatattcagcgacttcaccttgattgcaatctgttcctgagcttcgaggaatcgacgatcgagatttggtgaaccaccggtcctgagatcaagctcttcgagttctacgagatcgaagaccctgagcatctgtttggtgaaggttgcctttggtgcaatctatgctcaggtaaagaaaaaggtgtcgaggcggatctccaggagttccaggacttcgacgagttcgaggattaggctagcgacctcccccagtcagctgcctgtggtgggttgtttacgttggctacgtttcgattctgtgtactttgatttatattatgtaaatggctctagtctgtaatattattacttactctttattgtaattcgaagcattgtgctatgatgagtcatttatgtaatcgctgtgtacgtgaattactgatcctggcacgtacatggttcgcattcggtttaccttcaaaaccgggtgtgccagtaaacaacgcgcctggagat

SEQ ID NO: 102838 - DNA, 820 bp, Zea mays
  Clone ID: MRT4577_25296C.1
ctagccgccgcaccgccactgaacctgggtgcctgcgcaaccaagcccaagacgcttgaggggcaggccccagctgaggccaacatctccacacccaaggttgcacccgagaccactaccgtccccactgaggttgcggctgaacaggtagttgagaaggtggtggaggaggacaaggagtgggcgccggcgggggcggcggcggagcaaaagctgccagcgactgccgagcccgagcagaaggctgatgaggtgatcactccagaggcggcggtcgtcgccgagcccgagaacaaggaggaggaggaagaagctgtggagaagactgtcgtcgaggaggagaagccatcagcccctgcagaggaaaagattgccaccggtgaggtgatggccgagcccacggtggaggtgatcaagaaggacgctgaggaggaggagaaggagacggataaagagatagagaagccaatacaaagctgatcgtccatgcatgcatgtcaattggttgatggctgatgatcgttgtgcgagcaaagctaaggggccacttgaattctctagagttggcatgcatatacatgtataggtcgggagagagagtcggccaccatgtaacaaacctttgatgtctcccatttttcctccacggggttcttataaaacaatatgtcttgggcctactgtggatgttgtctccattattaattaatcgctttgccatgaaaaaaaaaaaaaaaaaaaaaaaaaaaaaaaaaaaaaaaaaaaaattaaaaaaaaaaaaaaaaaaaaaaaaaaaaaaaaaaaaaaaaaaaaaaaaaaa

SEQ ID NO: 102839 - DNA, 179 bp, Zea mays
  Clone ID: MRT4577_25297C.1
cccacacgtccggccaggctgacggccgctgacctgacatgtcatgcgcaccttacgctgggcacaggcgcgcatgccgctcgactgtaacggatcactgcgctgtctgtcgcactaatcaccgtgctcgcgctacgatctccgcgccagcatctctaccatgtgtcattgcacatcgt

SEQ ID NO: 102840 - DNA, 234 bp, Zea mays
  Clone ID: MRT4577_25298C.1
ttcattctcgacaagcggggagttctcctgggtcggtgtgcattgagcggggggaggtgggactgcataacaaaacccatcctcgtcggatcgaagatgatgagttcctgttctcctggatgctgctggtaccatcagcagcgagaagaagactttttggccggaggtggcggtcataaccatcaaggaggcgactgttaccattctcaaggacattgccctacgcgttcatcc

SEQ ID NO: 102841 - DNA, 380 bp, Zea mays
  Clone ID: MRT4577_25299C.1
ggccgggccgggttttccgaatattctgctactactcatatatcattgccgcctgggacgagaccatgcgataccgttctccgttaggagggactcctactttgtctcacactctctgatgacgccgacaaggaaactgagaattggactagcagcccttgtgttatgcgaatagcaccgatgacgatctggagaaatttgctactgacctcgcggccagtatctggaagcagatgtgtaggtgctgagatcaagtccatccccagctagactttctcgtactatggccaggtacctgagacaactgcaacgatcggcggtgtcccggaacgttacaacatagactgaacgacagaccgcatttgacacctacatctcca

SEQ ID NO: 102842 - DNA, 2078 bp, Zea mays
  unsure (1)..(2078): unsure at all n locations
  Clone ID: MRT4577_2529C.1
gcacgagcagcggcgcacggcgcgggcggggcggcattcgcgtgcgtctcgccgtctcgtcacatggtggtgagggtgggccggtggggcttgtacgctagccattaataggccaggtcgcgcaccccatcccattcggcacgacgcgcccgccggtctccacccctccccccaccccctgcttaaaatcccgcgtcccgatcgcgcacccgactccgcctccgctccccgctcgccgccgcgattgctggattggctgccgccagcgccccggtgctagctcccgttcctcgcggtggtcgctggactagcctggacgccgcggcccgccgcctggtcgaagagatggactcggtcatggccgcccccgactcgccgccgcagactgtcgtgctcgtctctgccggcgccagccactccgtcgcgctcctcacgggcaatgtcctgtgctcgtggggcaggggcgaggacgggcagctcggccacggcgacgcggaggaccggctcgtgcccacggtgcttagcggcttcgacgcgcccgcgatcacgtccgtcatctgcggcgccgaccacaccaccgcctactccgaggacgagctgcaggtctacagctggggctggggagactttgggaggctggggcatggcaactccagcgacgtcttcacgccccagcctgtcaaggcgctgcaggggctcaagatcaaacagattgcctgcggggacagccattgtcttgccgtcaccatggccggagaagtgcagagttggggccgtaaccaaaacggacagctaggccttggaaccactgaagactcgctgctcccacaaaagattcaggcttttgagagtgtttgcgtgaaaatgattgctgccggtgccgaacatactgctgcagtaactgaagacggtgacctctacggatggggttggggtcgatatggaaacttaggtcttggtgaccgtaatgaccgtttgcttcctgaaaaagtatcttctgtggagggtgagaagatggtgcttgtggcatgtggatggcgccatacaattacggtttctgactctggtaatctgtacacttatggttggagcaaatatggtcagctagggcatggtgattttgaagatcatttagttccacataaagtagaagctttgaaagatagcactatatcccagatttcaggcggctggaggcatacgatggcacttacatcagagggaaagctttacggatggggatggaacaagttcggacaagtcggagtcggcaacaacgacgaccacagctcccccggacaagtcagttttccagaggatcagaaaatctcccaggttgcatgcggatggaggcatactctggccctctccgagaagaaaaatgtcttctcctgggggaggggcactagcggacagctcggcaacggtgaaatagtcgacaggaacacgcctgtgctgatcgatgccctgagctcagacggttctgcctgcaagaagctggagtcatccacggcagccccattcgcagccaaagtttgggtgtcgccgtcagaacgatacgccattgtccctgacgagaacgtccgtaaagcaggcggaggcacggcacgaggcaacggcgccgacgcgaacgtgccggagaacgacgtgaagaggatgcgcgtgcagtcgtcgtagtaggtcttctactaccgtccactccaccacccccccgttaaccctactactagtagtaagtactacgaagacgaaccggtgccccatctagcggcgcccgatttttgtgcgttacgttctgcctaaaagtgctttccgtcgacggacggacctcctggtgttgagatggtagcggtagcactgcctcgcggcgatggtgtgtgtgtgttgtgacgtgattcacctcttagagtagagaggtggctagcccagtcgacctgtgttgtgtgtgttgttaagatgtgtcctggatcttttgtgacattgcatggagggtacaataagcgcttcgtttctcgtttcttccaaaaaaaaaaaaaaaaaaaaaaaaaaaaaaaaaaaaaaaaaaaaaaaaaaanagg

SEQ ID NO: 102843 - DNA, 542 bp, Zea mays
  Clone ID: MRT4577_252C.1
gtgggggggttttttttttttttttttttttttttttttttttttttttttttttttttttttttttgggatcaagaaaacatacgccaatattaataacccaggggcaaaggggggggaataaaggcttacaacgtaagttggaaaccaggggggggcggaagataagaaccgacagaaacataacacgataggagccactcagggcagatcacaggatagcagggggacacaagcccgacgacgccgggccaggagagcgtttagtactcgacaccctcggcgccggcctaaccctgggaaaactcagcaccgacctcctgggagtccttctcgagcgcaaacagatcctcacgagcctgggagaacttgccctgctccataccctcaccgacgtaccagggcacgaaggcgcgcttggcgtacatgagggcgaacttggggtcaaaggggggagaagacctccacaacactggtggagttggagatcatgcacacggcacgctgaaccttggccaggtcaccgccggggaccacgctgg

SEQ ID NO: 102844 - DNA, 273 bp, Zea mays
  Clone ID: MRT4577_25300C.1
acaactgccaattcaattacaatatgctaatactctcatatgccatcataaacttatacatttaaataatgttagtcctctagaggactcaaagtcatgacgagttcaacatgtactacatatctgatctcataactatacgtggattgtataccagctcaaacaacttcattttaaaagttaacaaagaatctctttgatacttatttaaagagcctgaaatatcacatagattattttaataaactatccaaataatactatgaatattta

SEQ ID NO: 102845 - DNA, 222 bp, Zea mays
  unsure (1)..(222): unsure at all n locations
  Clone ID: MRT4577_25301C.1
ccgaatccgggcggcgcgggggtggttttttttggttcggggcccctggggggggggggcgcttacaatgccccggcgcgttttaaggcgtctggggggggttcagcacgccccccgttgggaagggggcttcggggggggccgccgcggggcgtnggccgggcgggctgggccaatggcacgggcccttggggggcgaccgccctttcgtgggtcggggcg

SEQ ID NO: 102846 - DNA, 237 bp, Zea mays
  Clone ID: MRT4577_25302C.1
ttgcattactattttttcagggtttagcatcaattcttagctttcttcctgaaaccatttcccatcttctactatttgaagaactagaggcatagatgtattaatgtggcctttatttttcttgtgagaataagaaggataatacacctcccatgctggaaactaccttagaaacttaggtgaagagacaggtgtcagatatattatgtgacttgcccaagattgcctggcccgtgg

SEQ ID NO: 102847 - DNA, 1233 bp, Zea mays
  unsure (1)..(1233): unsure at all n locations
  Clone ID: MRT4577_25303C.1
ggcccttaggctctcacgctcttaaaaaatctatagaaagaaggttttttaataggctctttctagaaaatagagagtagttcctcgaaaaaaccacaggagccggagagccagaaaaagtagcttctatcggctcctcttacattttttctcttcgtcggcactacattgtagaagaagatgtaggagaagctatatttctaactaaacacggtactatatatttcaatagctctttctgaaaataaggaatggactgttttattagagaagccatagagctagcagagctggagctggagctgggagaggaaaagtcctaccaaagaggaccttacgattgtttataaataattaaatatagtcaaactagatgttgattgattactcaaatgatgagatgtacatggggttngggtgtactgtgtacataacagctgactcttcctcctattctatgaattgtctgctacgcgctaaatgttgcacatccgaagagcacatgcgcttgacagcaaattttgctttacccaaggtcaactgatcagttcctctgtgtcgtcttcatactccatccagacattcagctcaagtagctagcgctctctgtactgtacatacgtacgtacgtacttggtgatattgccttgcagtttagctccggcatccaataacggctggctagcttgaaggcagctctgaggtcgttcgcagtgcgccgccgcgcggcttcgcttgtaaccgccggggcatcgcgctgacaccccgggagctgaagcggttgtcggacatatacgaccatgacaggctgcgggttcacgtccggtcctccccatcatccaatatctacgggaggaaggagtccatgcgcggcaaggaccccgcgctggtcaatggtcatccatggcgccgccctcgcaaggctctcgtggactactacccgcagcggcggaaaactcagtatggtgatgtatgacactcgccataccatgattctggctcgtgttggacgatcatggtcccatggattcgccggtataaacgaatcactgttatttttcatttgagaagctgtgtgcagctgccatttttattctagaagtgtgcggctgaagtaataaaaatgagaaagcttctgcttgggccatgcaacgtgcacgcgcgttattatctctgctatagatgacaataggtaaatagccatcgtgttttgctatcccatacaaccatgct

SEQ ID NO: 102848 - DNA, 570 bp, Zea mays
  Clone ID: MRT4577_25304C.1
ccggccgggtctgtctctagaactggaattgcgatactggcatcccacaccacccagcatctttcgaattgcgcatatattatattcctggccacatacaggtaatcgcagtcggcacgaagagtaccaaccatgcccatgtcctggttgtcctgctcattacgtgcaccgatatgcgacacgcaaggaaatgatagaatgatacccagcgatttgccggcccatgaatgataccacacactgccacactgagctgctcgagccgaacgcttcttggacaggaggtggaagagcactcgctccgccgatgcatctgcactacgtagtgctaaagaagagccctcgatagtctgccatgcatcaacaaacgattcttaatagcttccattagccccccctcatctacgacaaatgcgatgcatgttacgactgactggcttgacatattctgactgactagccatgaatcttggtcatgtatgcccaccgtgaactacctctgctaatgtatgaaggatgtcataaataactcagtatttgttaaaagagatagaagaaaccggccctcga

SEQ ID NO: 102849 - DNA, 292 bp, Zea mays
  Clone ID: MRT4577_25305C.1
gttgatttttctgacagcgcgtctcttgctgctgctttgaagctcgaccagaaggtggtcaaggaacgcccagtcagaatcagatgtgctgttccaaaaaaggatgaccaaaaagtcaatgacaatgggaactcagatcatctgaaaagtgaaactaggacatgctatgaatgcggaacccctgggcactcttcttcttcttgccctaataagaaggattctgaagcaaggaagagctatgaatgtggcaccccggtgcacctctcttgtgcttgcccaaataataacgatt

SEQ ID NO: 102850 - DNA, 590 bp, Zea mays
  Clone ID: MRT4577_25306C.1
cctttatctgggcactctatggccttggttaaataaaagtggtatgttgttgcaaaaaaaaaaaaaaaaaaaaaaaaaaaaaaaaaaaaaaaaaaaaaaaaaaaaaaaaaaaaaaaaaaaaaaaaaaaaaaaaaaaaaaaaaaaaaaaaaagggaaaaaaaaaaaaaaaaaaaaaaatttcccttggccgaaacaaccttaagggaaaattttgaaaatttccataaaattgggggccgtttaaaatttctttaaaagggccaatttccccttataggaagtcttttaaaaattaattggccgcgttttaaaaacgttggaattgaaaaaaccttgggttaaccaaattaaatccctttgaaaaaaatccccttttcccaatttgggttaaaaaaaaaaagcccccaaccaatcccctttccaaaaatttgccaaccctaaatggaaaatgaacccccctttaaacggccaattaaacccgggggttgtggtggtttaccccaaaggggaacctttaaatttgcaaggcccttaagccccgttcttttgctttttttcctttcttttttggcaactttggcgggttttcc

SEQ ID NO: 102851 - DNA, 501 bp, Zea mays
  unsure (1)..(501): unsure at all n locations
  Clone ID: MRT4577_25307C.1
cctttatctgggcactctatggccttggttaaataaaagtggtatgttgttgcaaaaaaaaaaaaaaaaaaaaaaaaaaaaaaaaaaaaaaaaaaaaaaaaaaaaaaaaaaaaaaaaaaaaaaaaaaaaaaaaaaaaaaaaaaaaaaaaaagggaaaaaaaaaaaaaaaaaaaaaaagttccttggcccgaaacaaccttaagggaaaattttgaaaaaatcaataaaattgnggggccgttcaacaatcatttaaaaggcccaaattccccttaaaggaagccgaataaaaattaattggccgggttttaaaaacgtggaaattgaaaaaaccttgggttaaccaaattaaatccctttgaaaaaaatccccttttcccaagttgggtaaaaaaaaaaaaagccccaaccaatcgcctttccaaaaatttgccaaccctaaatggaaaatgaacccccccttaaccggcaaataaaccccgggggttgtggtggttaccc

SEQ ID NO: 102852 - DNA, 304 bp, Zea mays
  unsure (1)..(304): unsure at all n locations
  Clone ID: MRT4577_25308C.1
aacaaatgcctcctacctcaaagccttaaatcttgatcacgtcaaaaggtcattagctggtaagcagtactcccaactcgcctacaagcccacattccaccacctcctggactacaacatctctacccctcncatttttattttctcttatgcccctatccttctcacaccncgccggaagaacaaaggccccaccaaccccctatcttatgagcccaacaccataccagaccactctgcaggctacattctcaagaaaatcatccatgaaaaacacaccatcgagagcgctaataaagagacc

SEQ ID NO: 102853 - DNA, 1133 bp, Zea mays
  Clone ID: MRT4577_25309C.1
ggccgcaaatttttttttttttttttgctacacagaaaccccctagtctgaataagtatttaccatacaaagcacaagcaaaattgaaaacagaaaagcaaaaaaaaattgtttttcatggtttcaccaattcttcaaaaacacaacatcctcgttgttactattattaccattacaagtaacctcacaatatctgaagcagcaggttccatattattccttttggcaggagagatcagatggcaggagtgtgttccaagatgaagcgatggaagtcctgttggactctctatcatctcaagaaaacagtagagtacaggcattatcagcatgttttctttcaaacctcggagggacttattcctggtcaggagaatcgtacactgcagcatggctcacaaagaaagctggtctcacatcaacatcacaaagaaatacaatcaggaacatcgactggcttgattcttgcagaattgcctcttatgcactgcatggctcggaagcgagctggctgcccttggtgaaaatgccataagatattctgcttgtgagatcttgttgcatgacatagcaagtcaccttcatccaggaaatgagcttgacgaaagggttctagcatgcatgtgtctctataattacacctctgagccgagccccccccccagcgcgccgccgtagacaacggtcttggcgcatttggccgagcacctcgcgggcaccttccctgtctgtctgtgcagacgatgcctaaccttgccgcctaacattccaagagaagcacgagccgtaccgctgtacagcagctgatactgacagctcttgtcctgattccttgaatttcccccggcttggtgagtccgtgtggtgcgcagggtgccaggacgacccagcccatgtggaagtcaaagaatgtaccaccggcaacccaacagcaggactgcaggagcacgacgcaacgaaacggacggcgacgatgatgatgatgccgtgcgcggtgcgccctgctcgagccgaatctggctgctgtgtcgtcgcctggtttggcagattttaggcgcattcgttgcctgcaactgcattggatcaaaaaaaaaactattccccatgcctgtcatgtgccggcatatgctcac

SEQ ID NO: 102854 - DNA, 180 bp, Zea mays
  Clone ID: MRT4577_2530C.1
cccacgcgtccgcccacgcgtccgcttatatttgctggaacatgaataaaagggtctccagctggtactgcttagctcttacaggaaaacaatgggagagactttggacttcctgacctaaattaagcattgcgcatggagaaccttatatttgctggaacatgaataaaagcatttgac

SEQ ID NO: 102855 - DNA, 403 bp, Zea mays
  unsure (1)..(403): unsure at all n locations
  Clone ID: MRT4577_25310C.1
cgattgggtacctcgnagccggccggggaacattctacactcgaaccgacaagacgcagtatccaacgcagagaccacgccactacagagctctcttgtctgccgctacgaaccatccactccaacgcatacagtccaatgggagctacgctgatgtgctgcatgaactccttcgcgtcatgcacacctggcgcgtgctaggcattaccctgtaggaatggtacagggttatacactggccacacgccacggactgtacggcgcgagggcccacatacaaaacaccgtgccaagatagcaggggagatccacctggccctcgccggccgtgaccacatccccgaaaaaccagatggcggtgagttccaaccacgatctgcgggacactctgacagatatctga

SEQ ID NO: 102856 - DNA, 757 bp, Zea mays
  Clone ID: MRT4577_25311C.1
gctcagagtttcaaaagctggggttaacttgctcttgataaaatggatgaaggagctagagaaaatattctatggaaacattgtgaagtatgatgctgcgataagcccagaggctcgtcaagatgatcttgtaaatgtcatctggagaaatatttatgctgaggaaggttcagaggttatggatgcggctgctgcccctgctgtccaggcattggcaagatacacacgaagggaggcaacttgtctatcattgactgacaaagattctatgttctctgggaacttcaaattcacaaccctgctgccggcaactcccagttccagcccaaagaagcctgtgcgatgaactgccgtggtacatccacattccatatgaagatttgaaaacagcaggatcagtggatatctgtcattctctcagcaatacaaataacaggcttcttccagcagtagtttattctggggttctcacgattcaaacccttttgatggatatatacttctttctagataggaagtttattttattaatcttacgagaatctgctctagtaggccacccacatgaatggagcctttttgtctctttttctatggtaatctttttcctttggctgatttggactctggtcatcgtgccagtgcctagtgggaggtgatagagaaagtaaccatacaaatgcattgtctaaatatgtacttttgtttgaagccatagctggatggtttgggaaagaatgcagatgcggtcagcttt

SEQ ID NO: 102857 - DNA, 425 bp, Zea mays
  Clone ID: MRT4577_25312C.1
ccctttgggctggtttatgtgcttgtggatgtgcgggtggatgtgcgggctacccagttagtcgtgttaagagccttaagccgtcgtctagaatcgtcgggcgaagaagggaggcgtacctatcggcgaaaccagcgtcgaaacgtctgctaattccggtgcctttcgggctacctccggatatctcgaaaggagagtctcgtcgggagaactaaacgagcccgccggagataaggccgtccccgtctcgctctagggatcaaaggctaccgtacgcgccggcgagatttccgaggagagggaggtcggcctaattacggacgccgccgtcgtataaataaaagtaaccgtcgagaagactaaggatcggagtaatgccgcctccgttcacgaattagctcgggtcaccggaatcggtaaagctg

SEQ ID NO: 102858 - DNA, 1619 bp, Zea mays
  Clone ID: MRT4577_25313C.1
gaccctcgggccggtcgaggcgggccgggcggtgagccggcatcttctttttccgtcccctcctgcagccgccgcccgccgagacgccaagcgcgagcgggaggagaccatgtcacggtggcgcgccgccgcctacagcatctccgcagctgccgcgtcccgcaactctgcggcggaggccggcgccctctccagggccttggcgaaggctccctcgccgccttcgcttcctctccaaaccctcacgagaaactttgccaagtccgctgccgccgccacggccacgtcgcccggccctggcgcttcctctccgcccgctgggccgaggcccgagattagactgaagtctatgttcttatccaagccctgttcattagcgttgccacctgactcccctcatagagcagtggatccacaatataagggcatcaagcgattcctactcacattgttgttgttctacagtaagcaaagcaagtccatcagaggagcaaatgttgtttatgatcgaatcacttctcaagttgatgcacctactatttatgatgtttttcagttggagaaaacatttaagacaacattttcattgcttgttctccatatgtggcttgttctacgccgcttgaaggaagaagggaaggatggtgttaagttcggacagtacatctacgaaatgtacaaccacgatgtagagctcagagtttctaaagctggggttaacttgcttctgacaaaatggatgaaggagctagagaaaatattctatggaaacattgtgaagtatgatgctgcgataagcccagaggctcgtcaagatgatcttgtaaatgtcatctggagaaatatttatgctgaggaaggttcagaggctatggatgtggctgctgcccctgctgtccaggcattggcaagatacacacgaagggaggcaacttgcctatcattgactggcaaagattctatgttctcggggaacttcaaattcacagctctgctgccggcaactcccagtcccagcccaaagaagcctgtgcgatgaactgccgtggtacgtccacatttcacgcgaagatttagaaaacagcaggatcggtggatacctgctgttctctcagcagtacaaataacaggcttcttccagcagttgtttactctggggtccccacgattcaaacccttttgatggatatacttcgttccagataggaagtttgttttgttaatctctagtctcgagtatttgctctaggagaccacccaccagaacggagccttcttgtcgccggaccaggcatcgattcgcacactgtatgaggcgatgctgaaagaaaaaaaaaggaaggcagcaccgatgttcggtcattaatatgcagtttctttcggctgcatgtgtctcttatgtagagtaaaactaatttattctcgcatatagaatgatactataccggacatcaattgatgatgtgaaccgtatgcaagatcatcgccatctactgtagtatgtgacagtgtaagttgttttttttccttaaaaaatgtaggcggagcaaagtcgaatctgttgtgttttttgcgatttatctggggaagagaaagaaaatggaccgctttaacatgct

SEQ ID NO: 102859 - DNA, 376 bp, Zea mays
  Clone ID: MRT4577_25314C.1
ggacaaaagaggggggttagattcccatatagcacaccccaggtgggatccaaacgaccagtccaagacaagaggctggagctgtaaccttgaagggtgaactgctccattattgaaaaaaaatccccctttttttacaggcaaaacatacggacttaacacgaaacaaatcccttgcccactggggcattggattctttctaaccaaacgatttacaatttaaatttggggggccagcaaaaccctgaaggttagattttttttttacaagcaatcgcatttaaacttggacaacctgtggttaccaatcagcaatgttaacaggtgccacacacacacacacacaaggggccgatcttgggggtatccaccctt

SEQ ID NO: 102860 - DNA, 373 bp, Zea mays
  Clone ID: MRT4577_25315C.1
gttggcttatactcaacgtacggtgaagaatgggatgcaagaggttcttctggggtaaactcacacctggctgcggatggctattgtaaagaaagctggtggagtgcctggaggtacaacaaaaggccaatccgggccaaggcctaactctctcttcacacagggtgctggatgtatggggagggccctaccatccttaacatacgcgaactggagactcagaggccccaccgcttaggcttcgtcaccttctccacggaggaggcgatgcggaacgccatcgagggcatgaacggcaaggagctgggcggccgctacatcagcgccaacgttgcccactcccgctgcggacgtggaggctgttgtagtgggt

SEQ ID NO: 102861 - DNA, 375 bp, Zea mays
  Clone ID: MRT4577_25316C.1
ttcccatctctacccactcatccttatcaatatatatctctaactccattttatcatgtgcacattcccaaaacttcatagctggcttaaaaatacttctcttcttctcattcaatcactaaatcactataacatataacccctccactctactttttttacaaaataatcattctcctcatacaacaatcaatactctcatcttcttttttcatacttcacttacacaactccatctcttccaccataataacttccaccatttattctcaatccatcaatatttcattaaattccaccttttaaacaataatctttaccctaaaaacttcctactcctctttaattctctcaaccttatccttcattaatctt

SEQ ID NO: 102862 - DNA, 209 bp, Zea mays
  unsure (1)..(209): unsure at all n locations
  Clone ID: MRT4577_25317C.1
gggcaacgggtggggcgccacatgcaaattcagataattcagacgttcggctttaaagggggttaaannntaaatttacagcataggggggggcccttttttcggcttcaaatatatatgatggcattttttatacagtacaacttctcaaagaccattaatatatattaatatgggagctactaaaacattggagatgaaaattattt

SEQ ID NO: 102863 - DNA, 467 bp, Zea mays
  Clone ID: MRT4577_25318C.1
gacctttgggctgatttagtgcttgtttatgtgcttgggaatcctttcaggcgtcaaaagagggccatcggccagaggaggcgacgccccagagtgcccggtcggaacagacatctccgcgtccgacaaaatagggatgtccatagaaggaaaattagcagcgatcctcaccgtcctctcggtacacgaggagatagaggcttcctgctccgtcgtcgtagcggagaaaatagtaccgtatttaaccgtaaacgtcacaacgaataaggtcgaatcatctaagccggacaccttgactataagcggctagtccatactgttcggacccggccgcccggtcgaagcagacgggagcccagccgtagcgggtatcccggaccgggcgtacgactgccccgaaatcaaagtactgttaatcgaatcgagagattccagaaattggtcggagcccacgccgctaagcgaag

SEQ ID NO: 102864 - DNA, 449 bp, Zea mays
  Clone ID: MRT4577_25319C.1
cctcgcaaatacaacagtaagacagatcgatcgagcagggaagaggaagaaaatggccggcggcgagggggccgcggcggtgatgtgcacgccggcgttcgtggggcgggtgctgcgcagccggtggtacgtggtgttcgcgtccatggtggtgatggcggcgtcggggtccacctacatcttcgcgctctactccaaggagctgcggtctgtgctggggtacaaccagcagacgctcaacacgctcggcttcttcaaggacctcggcaccaacgtcggcgtcgtctccggcctggtgcagcaggtggcgcccacgtgggccgtgctcctcatcggcgccggcatgaatctggcgggctacctcatggtctacctcgcgctcacggagcgtacggcggcgccgcccgtgtggctcatgtgcatctacatgtgcgtcggcgccaacgcgc

SEQ ID NO: 102865 - DNA, 429 bp, Zea mays
  Clone ID: MRT4577_2531C.1
ttatttaacaaagggggacgcaccacggggtggttttattgacgtacagttacatgacataaagaacaattaaggatgagggactgacaaaacagacatgcttcctgtatatgatagaccaccaacgaacatgtacttaaactgctactcgaggcgttaagcatgcatgcaagatgaagtcatgagcccctggggtatgctgtgtttgggtatcattctctcgggagcgaacaaaaaaaaagagagagagagaatcaacgaggaggggacagacacggctggctagagaaggaaacgcgagaaaaagtcccctctcgctatccttcagtagtgtacagtaacgtgcgcgatcggtgcacgctctatacggcgcggtaggaccgtggcaatggcaggccgaccaccttgccgcaacggaagctgggcctc

SEQ ID NO: 102866 - DNA, 815 bp, Zea mays
  Clone ID: MRT4577_25320C.1
cgtctccgcctcggccagcctctggccctggtacagcaaatggagcagattatgggcaactccccatcgcccggcacccccaagccgccgccggccaccaacgacgataagccgcggcaacagcagcagcacagcaacaagaggtacccttcttccggcactggccacgctaccaccatggttccttattccagatccactcctctctcgaatccgaaatggaaaagggtacttctgaagattgggggcactgcattggctggagaagctcctcataatgttgaccctaaggtgatcatgctgattgccagagaagttcaagtggcatgccgccatggtgttgaggtggctattctcatgggaggtcggaatgtattctgcgctgactcttgggttgctgccactggcactgatagagcttcaacgcatccgattggaatgatggcagcagtgatgaatgcagtattgctccaagcgtcactggaaaaaataggtgtggagacacgagtccagactgcattgatgatgcaagaggttgcagaaccatacataaggcggcgagctatacgccatctggaaaaaggaagggttgttatctttggtggaactggtgctggtacaggaaatccactttttacaacagatacagctgctgcactgagagcttctgaaatcaatgcagacgttgtccttaaaggtgtcattggagatgatgaatatggttgtcctcctaagagcaacggcagtgcaccatttgagcacatctcatttagggagttggcagcaagaggaaccagccaaatggacatgacagc

SEQ ID NO: 102867 - DNA, 361 bp, Zea mays
  Clone ID: MRT4577_25321C.1
acatagaaccgaccgactatggggggggggttatatataatctccatatataccccaaccaacctctaattaatttaaaacttgatttcactcttactcaactgacgatatactttggaagaaatagggctattcatcatctgccctttattgaaggcttgtatcaatcttgttacaaaaactcctaggacttagacccttgctcctccctggcaaaaatggggtgcttaaaacttcaaaataaggcctgcccggcttacattttaccaaaacaaagctgggagatcatggggttgaaaaacctctacaacttctttatgttgtccttgaaccagttcgccttggttaaatggtgggcgtc

SEQ ID NO: 102868 - DNA, 395 bp, Zea mays
  unsure (1)..(395): unsure at all n locations
  Clone ID: MRT4577_25322C.1
cctttctccgcacaggctcaccaaacgacgttcactttccctcgacccgtgaccgtgagcaagcgggtggcgacggcgcgcggccggccatggtgagcgagagcaaccgcggcggtgcggaccggacgacggcggcgggggaggagcgcgggcagctgctgttcgacgtgccggagatcaggttcaccaagctcttcatcaacggatccttcgtcgacgccgtctcaggtacatgcaagacgttcgagacgagggacccgcgcacggggggcgtcatcgccagcgtggcagaagctgacaaagaagacgtggacttggcagtgagggcagccagggcccgcttcgaccacggcgagtggccacgcatgtctggatcccgacgggggcngatcatg

SEQ ID NO: 102869 - DNA, 413 bp, Zea mays
  Clone ID: MRT4577_25323C.1
ccaagcttacggtcgctttcacacttttccgcgcaacaccaaaatctcattttttctgttggaggccccggccccccctgtgattcgaggcttttcccaaaaaaaccccgtggggtaactttactggggccacataaaaaaccctgaaacgattctcttatgggggcccaaaggctataccgctaaaggttacacacgggtctatgggggaaaggtttatgccttttcggggtgcctctctacggggaggctctgaattaatgatttgcacagcgcccccgcaaaggcgggttgtgtattgaggggagatccgcatcctcggggagtgactcaatgggagggggggatgggttgccgtgagcggtatcacctccctcaagggcggtaagacggccattccccgaaccagggga

SEQ ID NO: 102870 - DNA, 305 bp, Zea mays
  Clone ID: MRT4577_25324C.1
gggccacgaactttttaccccctgggggacaagcccatgaggctctgagaaaaaaagaattttgaggccccattcccaaaaatttttctgaccattggccccgaaaaaaggtcctccacttttccactacaaaaataacccactgtccttgtttgaaaggggaacccggttactattacccgagtggaaaccagtgaggaaaaagggtcttccgcccctggcggagagcggataaaagccccgacacaggggacccaaaaaaaaaaaaaaccttgaaaccgaaaaaatattcctattccaggggg

SEQ ID NO: 102871 - DNA, 925 bp, Zea mays
  Clone ID: MRT4577_25325C.1
tagatcgcgagcgccccctttttttttgtttttgagacggaacaaacaaataaaaccataagcaatagcacatcagcgaagcgaagcaaagcaaagcaaccagtaaaacaaaattgggtaggcagaagaaccagcaatgtttgagaaccaaaccagccaaaatactggaacagcaatatagtctgctcacgaccaaccaaaccttcgactcataacatcctgaacaagcacttcatctctggcctggttatatgatattgctattgttttgttagagctagcctgcagcttgttcattcaaaggcccactgattctccctcctcactttagcctcttcctcaggtgtgaagtcattctcgatgtcgaatgtctcgcgtatctcctctggagtcttccccttgatcatgtccgcgacggcctggcaggtcaggtctagcagcccattgatctccaggtagtctgcagccttaatgagctccaagagggtgaccaggtcaacatcgacgaactcagcatcaaaggacttgagatcgtccgctgaggccttgttactcgcagcacttggctccgcatcaccgccatcggcgcgcggcgccgaggcgtgcttcctgcagtacgcgatgaccttgtcgaggatcttggcgttgacgttgaagaccgggatgtcactgtcgtcgcagtccgccatcaggttcaggataatcagcgattccctcgccacagactcctccacatcgaacttcttgaagtcgctgctgactagcgtccgcatcttctccttccccgctgccgctgcttccgccgccatcgacctgactgccggatgggcactgcagttggggccttgggtgtgtgtgggtggggggtgctgtgacaagagggaaaaaaaccacgaaggcgcccacgcgtccggttcccggccgg

SEQ ID NO: 102872 - DNA, 1960 bp, Zea mays
  Clone ID: MRT4577_25326C.1
cattgggtacctcgaggccggccgggagcgaggggaaccccgggcacgttttctcgaagaagggaaggcagcctcttcctcgtcgccggcgacgtcaccctcagcggctatcagggatgccggtcagggtggtagataccgccacgccttcctcccagccctccccagctcgacggctgctggtaggggcatcaccgcatcatccctgcacggtaggctcttgacccctgcacaatacggctggagggctacgagacgagtggtggcggagtctgctcgctggaggttgggcgcgtggacgaggtgaatagttcatttagaacctgctgcagatttgcaacaaaaacatgtatgcaactaggagatctatgatccatctcgaagatgaagaattagatgatgaacttgaccacctcatgcttctcatgatgggtgaatatcggaagaggaagcataagcagcgaaagaagcatcaaggttcagtttttggacacaaggtttacaatcaaaatagagatgaacaccgtggagggggcgactgcgccccggccgggtcggcatcgtccttacagacgagacacgagaggcagcgagccagcgaccggcaacagttttctcggaaggcagcctcttcctcgtcgccgccgacgtcacccgccgcggctgtcggggatgccggtcagggtggtcgataccgccacgccttcctcgcagccctccccagggcaagaagcaaatactggacacccatctcctcctagatgttcactcttaagtgctggaagatcttttgctggaactcagaatgtttcaagtctgcagaaggatgaagcatggaaagtgaatgtccgcatccatggttgcgatcttgaacagggttatctatgtggaacgatggaagcgcttaatgttccattagcagatacacctgtagtgacattctgggagggggagatagtggatgctaaaaattacacctttttcactggcaagtgggaggcatcaccagaggatgatataagacattggtccaagttcccatcatttatgcctcttctgagtcagattgagacagacggtggcaagtctctggactttagcaactatccttacatatttatgagatggaaagaacagtattttgtcaatgttggagttgactgtgggttaaccatcgctggtttctactacgtctgcttttcttgtagcgatggctccatcagtggattttattatgatccaaatagcagtccatttcagaagctcgaactgaagtgtaccaatgagaaaaaatctggattcaccttttcatcctatgagctgcagtgacaggaccagatgcatatagtgtgtctggtactgaactcgtactcccttaatgaaaggaatgagtggtcgtttacgtaacagtttgttttctagcaagacgaagcaaactgtcactttgtaatctgcagaagcatcctgtcttttctaaaatgtacctttggtattatgcttgtgataaatgttagatgtgtcaaaataggaatttcagaggcttgtcctttctaaaatctaccttttgtattacgtttctattccacaattgttatctgcaattggggatttctatttatgatatacacattgtgcgtggttcctgattagtacaataaaattttttcgagcaggacagatgccctcgacagacaactttctgttagcatatagtgtgtgtactgaactcgtactccctaatgaaaggaatgagtggtcgtttacgtaacagtttgttttctagcaagactaagcaaactgtcactttgtaatctgcagaagcatcttgtcctttctaaaatctaccttttgtattacgttcctattccacaattgttatctgcaatcggggatatacacattgtgcgtggttcctgattaaatgggttacatgtacaaaaaaaaaaaaaaaaaagcggcc

SEQ ID NO: 102873 - DNA, 266 bp, Zea mays
  unsure (1)..(266): unsure at all n locations
  Clone ID: MRT4577_25327C.1
gggctatcccccccaagccaagcaaaancctggcccctctaaaacatcacctggccgtcaaaacaccacgacctggccgctaccaccgcgctaccgcccggcacggcagcagtggcgcccgtggcctccacgctacaacacgaccactgccaccggcctaagcgcctccaaaaagcctgaagcctcgtcaacaattcctgaacctcgagtaccacatgaccccggacctgtcgccccccatcacaagtgcacctcaatcaaagtac

SEQ ID NO: 102874 - DNA, 160 bp, Zea mays
  Clone ID: MRT4577_25328C.1
tacgtaagctcggaattcggctcgaggcacacctgccgctgctcatgtcctaagctccggcgatatgtaacgcttcggacgatccgttccgtcgtcgtcgatccgtgacacatattcactccttgtcctcaacatcaccttttcgtacgactgctgatga

SEQ ID NO: 102875 - DNA, 1207 bp, Zea mays
  Clone ID: MRT4577_25329C.1
gggaaaaaaaaaaaaaaaaaaaaaaaaagcgagggggcaacagttttctcgaagaagggaaggcagcctcttcctcgtcgccggcgacgtcaccctcagcggctatcagggatgccggtcagggtggtagataccgccacgccttcctcccagccctccccaggccttaaaatcaggatacccagctgggatccttacccagcttccatcttctctgcacgaggcaacgcgcttttttctagcatatccttctcgtcagctacgcattcgttcgcaatcggccgcatgaggcccacatcatccttcctcaagggctgcacagttaagcgcgacggctgcacacggctgcaaggtacagctcgacggctgctggtaggggcatcaccgcatcatccctgcacggtaggctcttgacccctgcacaatacggctggagggctacgagacgagtggtggcggagtctgctcgctggaggttgggcgcgtggacgaggtgaatagttcatttagaacctgctgcagatttgcaacaaaaacatgtatgcaactaggagatctatgatccatctcgaagatgaagaattagatgatgaacttgaccacctcatgcttctcatgatgggtgaatatcggaagaggaagcataagcagcgaaagaagcatcgaggttcagtttttggacacaaggtttacaatcaaaatagagatgaacacggctttctttgatccatgcgatggagtttgacgacggaggagatgggcttgccggcgggtgggagcagggcgcgccgacgagggatgaacgcggccgggagggagcgcacaaactctggagggcagccttgttcaccaatgggtgacggccgtggacggagagacgagacgtgcgggcagcggtgcgcgacggcgagtcaccaagatgagcggagaggtggggagcacgggaaatgcaccggcggctcacgtctgtgggcagagatgccgtggccccgacatatggcggctgcggatcaggggcgcagaagccctatcactgaagggagatgtggatttcctgaacggtttggtagttgagatactagaataggacctctgtacgaggttgtatatttaggacctttaggttggagtcctatataaatttgattattgttggaagctatttttagtcctcaaccctttaatttaagataaggcccagtttagc

SEQ ID NO: 102876 - DNA, 393 bp, Zea mays
  Clone ID: MRT4577_2532C.1
ttggggtttttttttgtttgttttggggtttctttttttgtggggcagggccggggaaaggcccctttatgacggagaaaaggaccagctagccatatacgaaaaccgaaccggactaccccatggccccaaaaacctagaaaaaaccggcgggctttgacgcgccgaacgaaaggccgggggggggcccggggggaacccaataccaggggtgggggtctgggggcccccaaaggaaacaaaaaaaacatcttcgaaggcagggggggaggtcaaacccccatcctaaggggcaaaaggcgaccaaagggggctcgggttacaaacacccatagagtgcgggtcggctattgcggtagggagaggggacggccccccggaacaacctggtgg

SEQ ID NO: 102877 - DNA, 1056 bp, Zea mays
  Clone ID: MRT4577_25330C.1
ccggccgggatcggccgcatgaggcccacatatccttcctaagggctgcacagttaagcgcgacggctgcacacggctgcaaggtacagctcgacggctgctggtaggggcatcaccgcatcatccctgcacggtaggctcttgacccctgcacaatacggctggagggctacgagacgagtggtggcggagtctgctcgctggaggttgggcgcgtggacgaggtgaatagttcatttagaacctgctgcagatttgcaacaaaaacatgtatgcaactaggagatctatgatccatctcgaagatgaagaattagatgatgaacttgaccacctcatgcttctcatgatgggtgaatatcggaagaggaagcataagcagcgaaagaagcatcgaggttcagtttttggacacaaggtttacaatcaaaatagagatgaacacgggcaagaagcaaatactggacacccatctcctcctagctgttcactcttaagtgctggaagatcatacctctagattcttgtcgaattgcatctatggcagtgtttagcgaggagcttcacgaccctttcgtggctgttccggctttctttgatccatgcgatggagtttgacgacggaagagatgggcttgccagcaggtgggagcagggcgcgccgacgagatggcagccctgtgcgccaacgagggacgaacgtggccggaagggagcgcgcaaactctggagggcagccttgttcaccgatgggtgacggcagtggacggagagacgagacgtgcgggcagcggtgcgcggcggcgagtcaccaagatgagcggagaggtggggagcacgggaaatgcgcaagcggctcacgtctgtgggcagagatgccgtggccccgacgtatggcagctgcggatcaggggcgcagaagccctatcactgaagggagatgaggatttccagaacggtttggtagttgagatactagaataggacctctgtacgaggttgtatatttaggacctttatgttggagtcctatataaatttgattattgttggaag

SEQ ID NO: 102878 - DNA, 1402 bp, Zea mays
  unsure (1)..(1402): unsure at all n locations
  Clone ID: MRT4577_25331C.1
atggccgcatcactcccgtcggcagcagggtcaaccactgccaccggcgcacgcagctgtgcacgaggtctcctcacccaccggccgccgcgtccggacccagcccggcaactcgcacctcctcctcctgctgccgcccgcgcgcttggccccgtgctcacacgggggtgtcgatcagaagaacatcctgctcacggcgttccccgacgcgtggctcgtaaggcactcttcccgcggtacaagtgcgacccacggtgctggcggagaggaacctagcagcggaagatcgagttcagggatggcttctggtggaaccttccggaaccttctcctggtgctccccctctacctcgcgctcgcctcgttggtcggtggcgaggcctcgaggaggttctggatcgagaacgatacctttaggaaggatggagtaccgttccaaatcgtcggtggcgatgttcactatttccgcattgttcctgagtactggaaggatcgccttttaagagcaaaagcattaggcttgaacacaattcaaacatatgtaccttggaatttgcatgagccagaaccacagagctggaaattcaagggcttcacagacattgaatcatatctgagacttgctcaagaactagaaatgctggtcatgcttcgtgtagggccatacatttgtggagaatgggacttaggaggttttccgccttggttgctcaccatagaaccagccccttaactgcgatcatcagattcgtcctatcttttcctggtggagagatggtggggagtactacttctgaaagtggcaccattattatacaataatggaggtccagttattatggttcagattgaaaatgaatttggttcttttggagatgataagaattaccttcatcaccttgttcaactggccaggagatatcttggaaacgacattattctttatacaactgatgggggcgccttgggtaatttaaagaatggatcaattcctcaagatgacgtttttgctgctgttgattttgaaactggatccaatccatggcccatattcaaattacagaagaaatacaacttgccaggaaaatcagtccctttaagttcggaattttatactggatggctaacacactggggtgaaagaatcgcaacaacagatgctactagtacagctaaagcccttaaaaccattttgtgccacaatggttctgctgtactttatgtctgtcactggagcccattcatcagtgcattgcatttgcagtctaggtctattaattctatttcttcatgaggttgtccagatggctcatggcgggaccaattttggatttataatggtgcaacactggggtcagatgatctgattacnaggcagacctcactttctatgactatgatg

SEQ ID NO: 102879 - DNA, 1300 bp, Zea mays
  Clone ID: MRT4577_25332C.1
cattgggaccctcgaggccggccgggaattcatatgagtcatgttggctagagagtggaaggctaggcattctactcaatagatccaaggttcaatccctaggcagccatagttgtcgatttttaaaaaaaaaaaaaaaaaagtccttacagacgagacacgagaggcagcgagccagcgaccggccttctatagtgtcaccttttttttttttttttttcccggccggccgggctgcaacagttttctcggaaggcagcctcttcctcgtcgccgccgacgtcacccgccgcggctgtcggggatgccggtcagggtggtcgataccgccacgccttcctcgcaaccctccccagggcaagaggcaaatactggacacccatctcctcctagatgttcactcctaagtgctggaagatcttttgctggaactcagaatgtttcaagtctgcagaaggatgaagcatggaaagtgaatgtccgcatccatggttgcgatcttgaacagggctatctatgtggaacgatggaagcgcttaatgttccattagcagatacacctgtagtgacattctgggagggggagatagtggatgctaaaaattacacctttttcactggcaagtgggaggcatcaccagaggatgatataagacattggtccaagttcccatcatttatgcctcttctgagtcagattgagacagacggtggcaagtctctggactttagcaactatccttacatatttatgagatggaaagaacagtattttgtcaatgttggagttgactgtgggttaaccatcgctggtttctactacgtctgcttttcttgtagcgatggctccatcagtggattttattatgatccaaatagcagtccatttcagaagctcgaattgaagtgtaccaacgagaaaagttctggattcaccttttcatcctatgagctgcagtgacagggccagatgcatatagtgtgtactgaactcatactcgcctaatgctgctgtattgaaagaaacgagtggtggtttatgcaacacttcgttttctcgcaagagcaagaccaagcaaactgtcactttgtaatctgcagaagcatcttatcttttctaaaatgtacctttcgtattatggttgtgttcatggtatggtgcgtccaaattcagttggatagggaatgtgagggctagatgttgatccagagaaatgctatataccttttccacaaaaaaaaaaaaaaaaaaggccttgttttctgcccttggggatttctatttcaacatgtctatgat

SEQ ID NO: 102880 - DNA, 881 bp, Zea mays
  unsure (1)..(881): unsure at all n locations
  Clone ID: MRT4577_25333C.1
ccggccgggacttacctggacggggtcgactagggatcaagaagcccagtggcctaggtcagtggcctgcattgacatggcgggtgcgctgacttaccatctccccaagtgggagagtggacgtcataatttgtgatagagggggtacgcgttcgcgcggcccctgccatcgtccttacagacgagacacgagaggcaggagccagcgaccggcaacagttttctcggaaggcagcctcttcctcgtcgccggcgacgtcacccgccgcggctatcggggatgccggtcagggtggtcgataccgccacgccttcctcccagccctccccagggcaagaagcaaatactggacacccatctcctcctagctgttcactcttaagtgctggaagatcttttgctggaactcaaaatgtttcaagcctgcagaaggatgaagcatggaaagtgaatgtacgcatccatggttgtgatcttgatcagggttatctatgtggaacgatggaagcgcttaatgttccattagcagatacacctgttgtgactttctgggagggggagatagtggatgctaaaaattacacatttttcactggaaagtgggaggcatcaccagaggatgatataagacattggtccaagttcccatcatttacacctcttctgngtcagattgagacagatggtggcaagtctctggactttagcaactatccttatatatttatgagatggaaagagcaatattttgtcaatgttggagtcgactgtgggttaaccatcgctggtttctactacgtctgcttttcttgcagcgatggctccattaatggattttattatgatccaaatagcagtccatttcagaagctcgagctga

SEQ ID NO: 102881 - DNA, 107 bp, Zea mays
  unsure (1)..(107): unsure at all n locations
  Clone ID: MRT4577_25334C.1
gccgccagagagatcgccattttgactgggtccctttcgnatctgtacgctcgtcaggagctttcttcggccgccgttctcctcggttgccagggagaaccagccgt

SEQ ID NO: 102882 - DNA, 2610 bp, Zea mays
  unsure (1)..(2610): unsure at all n locations
  Clone ID: MRT4577_25335C.1
ggtaaacgttttctcgaagaaggagcctcttcctcgtcgccggcgacgtcaccctccgcggctatcagggatgccggtcagggtggtagataccgccacgccttcctctcagccctccccaggatctccaacaaccaggccttaaaatcaggatacccagcttccatcttctctgcacgaggcaacgcgcttttttctagcatatccttctcgtcagctacgcattcgttcgcaatcggccgcatgaggcccacatcatccttcctcaagggctgcacagttaagcgcgacggctgcacatcacggctgcaaggtacagctcgacggctgctggtaggggcatcagcattaccgcatcatccctgcacggtaggcccttgacccctgcacaatacggctggagggctacgagacgagtggtggcggagtctgctcgctggaggttgggtgcgtggacgaggtgaatagttcatttagaacctgctgcagatttgcaacaaaaacatgtatgcaactaggagatctatgatccatctcgaagatgaagaattagatgatgaacttgaccacctcatgcttctcatgatgggtgaatatcggaagaggaagcataagcagcgaaagaagcatcgagtgccagtttttggacacgtggtttacaatcaaaatagagatgaacacttctcaacatcttcgtttcgcaatgtgtcgtgttttataatgtcaaaaatctcagcgacgagaggcagcgaggggcaacagttttctcgaagaagggaaggcagcctcttcctcgtcgccggcgacgtcaccctcagcggctatcagggatgccggtcagggtggtagataccgccacgccttcctcccagccctccccagggcaagaagcaaatactggacacccatctcctcctagctgttcactcttaagtgctggaagatcttttgctggaactcaaaatgtttcaagcctgcagaaggatgaagcatggaaagtgaatgtacgcatccatggttgtgatcttgaacagggttatctatgtggaacgatggaagcgcttaatgttccattagcagatacacctgttgtgactttctgggagggggagatagtggatgctaaaaattacacatttttcactggaaagtgggaggcatcaccagaggatgatataagacattggtccaagttcccatcatttacgcctcttctgggtcagattgagacagatggtggcaagtctctggactttagcaactatccttatatatttatgagatggaaagagcaatattttgtcaatgttggagttgactgtgggttaaccatcgctggtttctactacgtctgcttttcttgtagcgatggctccattagtggattttattatgatccaaatagcagtccgtttcagaagctcgaattgaagtgtaccaatgagaaaaattctggattcaccttttcatcctatgagctgcagtgacagggccaaatgccctcgacagacaactttctgtcagcatatagtgtgtactgaactcatactccccaaatgctgctgtattgaaagaaaggagtggtggtttatgcaacacttcgttttctcgcaagagcaagaccaagcaaactgtcactttgtaatctgcagaagcatcttatcttttctaaaatgtacctttcgtattatggttgtgttcatggtatgatgcgtccaaattcagttggatagggaatgtaagggctagatgttgatccagagaaatgctatataccttttccacaattgttctctgcaggatttctatttcaactgtcatacccgggtctaaaaaaaaaaaaaaaggggcgtgcggaaaaaaaaaaaaaaaggggggcggcgagtcaccaagatgagcggggtggggagcacgggaaatgcgcaagcggctcacggtgggcagatgccgtggccccgacgtatggcagctgcggatcaggggcgcagaagccctatcactgaagggagatgaggatttccagaacggtttggtagttgagatactagaataggacctctgtacgaggttgtatatttaggacctttatgttggagtcctatataaatttgattattgttggaagcgagatgnagagagcaatattatgtcaacgttggagtcgactgtgggttaaccatcgctggtttctactacgtctgcttttcttgtagcgatggctccattaatggattttattatgatcccaaatagcagtccatttcagaagctcgagctgaagtgtaccaatgagaaaaaatccgggttcaccttttcatcctacgagctgcagtgacaggacagatgccctcgacagacaactttctgttagcatatagtgtgtgtactgaactcgtactccctaatgaaaggaatgagtggtcgtttacgtaacagtttgttttctagcaagactaagcaaactgtcactttgtaatctgcagaagcatcctgtcctttctaaaatctaccttttgtattacgttcctattccacaattgttatctgcaaccggggatatacacattgtgcgtggttcctgactaaaaaaaaaaaaaaaaaaggccccta

SEQ ID NO: 102883 - DNA, 397 bp, Zea mays
  Clone ID: MRT4577_25336C.1
gttctagatcgcggcggccgctcgcgatctagcatctctctcctcctcctgaaaaaaaaaagaacagcttgagcagagagccggatgtgctcccgtcccgtctgtgcaggtgataagcgaaacgctgcgcgtggccaacctgatcagcggggtgttcaggcgtgcgaacaccgacatccacttcaaaggctacgtgatcccaaagggctgcaagatcttcgcgtcgttccgagccgtgcaccttagcctggaccactacgagaacgcccggaccttcgacccttggagatggcagcaggtgcactcgttagaaaacacaatttgctatgttgtggcatgctcatgctcttcttttttatgagaagatagatatttatatatgatcgacaagagaatc

SEQ ID NO: 102884 - DNA, 1121 bp, Zea mays
  Clone ID: MRT4577_25337C.1
ccataaaacaaagtgcctttctttattccttctcacccccatcaacagcaacatgccaagaacttgctttcgaacatgtggaaaaaaaatatatatttattccagacgtttgctggatacaatgcgtaagcagtctggatggagtccatccccggttttcttcagatcgccttccatctagctagcatctccattcttttgcagtagtagacatctctctcctcctcctgatcagcggggtgttcaggcgtgcgaacaccgacatccacttcaaaggtttgcttctacaacacaaactgttaactgtcgtcttcttcttcttcttcttggagcctcccccaacccgttcgtttacagcagtctcttctcttctcttatcttctgttgatctgttgtctaggctacgtgatcccaaagggctgcaagatcttcgcgtcgttccgagccgtgcaccttagcctggaccactacgagaacgcccggaccttcgacccttggagatggcagcaggtgcactcgttagaaaacacaatttgctatgttgtggcatgctcatgctcttcttttctatgagaagatagatatttatatatgatcgacaagagaatctaggaaggagagagctcatgtggctcccgtcccgtttcgcgtgtgcagggcaagagcaagctgcagagcgcggaaggggccagtctgttcacgccgttcggcggcgggccgcggctgtgcccgggctacgagctcgcccgggtggtggtttctttccccgtcttcctccaccacctcgtcacgcgctttagctgggaggaagccgaggaggacaggattgtcttcttccccaccacgcggaccctcaagggataccccatcatcctacggcggcgaccggattgcgatgatctctgacctcatggctatgttctccccccttatcttcttcggatcaaggccgaaggctaagcattagatagagtaaggtggatgtcgtggctagtaggtgcatggtggtttctgccactcactcactcactcactgagtgtctgtttgttcctgttcctctctgttttctcttgctctgtaacctggacctggtacgagtcagcaaaaaaaaaaagaaaaa

SEQ ID NO: 102885 - DNA, 789 bp, Zea mays
  unsure (1)..(789): unsure at all n locations
  Clone ID: MRT4577_25338C.1
gggctttcaatccacggaagaaaaaaaacactctggaagaaggatggcgacaagaactgtggtcgtcaaactcacggagagaaacaggaaaccgtgaggcgtgtggacgcacgcagacgcgaccccagtttcagcctcggatcccgcggggtcacgtcctcgacccgtcttcaccaccatactgctttgctgtgctgtgctgtgctgcaatttggatttgggcgttggctcagcggcagcgctacgctactgcctactgctcggggcgtcgggtgtttggcctcctggttctctggtctctggctctctgctgcgactgctctgctcgcacaagaccagctgacgtgtctgctcgagttttacgtggtctttggatggcaacggctgttccctgtcgcttgctagatcacgccaccctgacactgatacgcggtagctgtgttacttcaggcatcgccgtctatcgcggacggaactgcgtgcagtgcaagctatccgaggcaggcattcaggagccgttatgctccgcgcccgcctctctgtctattcggcggttgtgataacgcggagcagagcatttacgctcatcattgccgtgtggtgggtggtcaaatcggtcccatgatgatgatctcagcgcaggaactaggcagcgttggggcggcagcacatgggcctggctcagagtcacagctgctgctgctccacggccagctggcgatgcatcagcgtncacgtctcagcgggnggtcagctggccaggtaatagagaaaccgctagccctgccg

SEQ ID NO: 102886 - DNA, 382 bp, Zea mays
  Clone ID: MRT4577_25339C.1
gacaacatgaccaggtgtgtgaaacaaattaagtggtggttccatttctaccttcgtgattcagtattgtgcatattgtcatccatctgttacaaattacaggtcgttttagtttttctagatacatagttttcttatacacctagctacatacatagcaaaagctaaaatgatttgtaggcaccatgtagtcctttcatttggtcggtttgttttgctataaatctgccattattttttctaaccgcatgcaccatgtgttggaaggtgatgtggtggcatgctctgccagtgcaaatttcaccccacctataattgttgtcgctcctgacgaggtatggatctatatgttatctatggtgtgtacagctgttgtttacac

SEQ ID NO: 102887 - DNA, 455 bp, Zea mays
  unsure (1)..(455): unsure at all n locations
  Clone ID: MRT4577_2533C.1
gcagccttcgcttcgctttcctcgcagcgtgaccgactgaccgcgaagccgccgtgaaccctcctcatccccgtcccccctgctccggcttcgccgggctcctctctcccacttgcgccaacattcaagccccgaccccaattcacatccgaggcgctcgcccctttccatctccatcgcccacgcccacgcccgcgcgtctcgtgtccacgcctcgccgcgacttctcccccctaaaccccgcgagaggccgaggtacatgagagagtgatcggcctcgccttcgcgcccacgctcgcgccgagagtgtgatgggcaacacgtgcggcgtcacgcttagatccaagtacttcgccagcttccgcggcagcgcgtcgcagcgccgtgacgcgccggggtactcacctgtcgccacctccnnnnnnnnnnnnnnnnnnnnnnnnnnnnnnnaaaaa

SEQ ID NO: 102888 - DNA, 440 bp, Zea mays
  Clone ID: MRT4577_25340C.1
acgagacggttgggtaaaatagagaaacagaagttagagaatatgcttaacaacaatcttggacgaaaaagaccaagaaactcatggaggaagcttttacatcctacagagttccataacagtgtgggaggaaggatatcccattgggcttactggtttcaaaaggctggcttacggaataggttaggtgcgataccttatgggactcgggataaattaaaagaaagtctctttagatttcctcttagtgaggcgatgacgggaacactgcaggaaattgtgtcacaatcttattttaaaaatcaacatccgccataagaaaagaatggtgaatgtgaacatgctaatcttttacttaacgtatacaaactgtggagccataacaagcttccgttttaaacgaaaatttgccgcactggttaaagtaaggataggggcaa

SEQ ID NO: 102889 - DNA, 1043 bp, Zea mays
  Clone ID: MRT4577_25341C.1
cctcgaggccggccgggaaacctcgaggccgaaaagggccaaacactccggcagctgtggtggagacgcctccgcctcccaaacacccgaatcaaactaacagccaccgatggcgtcgccgtcgcggttgctcccgcccacgcctccttcggccgcccagccccgcggcccgcgggatcgcctcgccttgccgcgcctccggtgcctccgcctcccaaacacccgaatcaaactagcagcctccgcctcgcccactgatggcgctgtgctgctggagcgtggcggttccgcggcggtggccgtgcgggagttcgtcacgcttgacgagctccgcgctgccgtgcgcctccgcgtccgcaccttccacgagtacgcagacgactccgtcggaaccgagttttgttaggatcacagaaaggctcttgcagatagggagtttgaagcattacaggataggatttctgggaagatgataaattttcgaagagtttcttgcataaacgggactgttccactgtccccatcattaatgtcagctgaggaactttgttctatgtgcaagtttgtggaggatggaaaagagagattagtagttggtagtttagaccttaatcagtgtctttggctaccagatgaattgactggaaagaggcctggggtaaatgaagacatccagacaagagcatatctaagcaatgtctgtgttgccaaggagcttcagaaaaaaggcttaggctatacattagttgacaaatccaagaaattagctcttgaatggggcataacagatctgtatgttcatgtcgccatcaacaacgtagcagggcaaaagctgtacaagaagtgtggatttgtttatgaaggcgaagaacctgcatggaagggtaggtttctggggagaccaaggaggctgcttctttggcttgatatgagcaaagtgcttgtgcgatcgtgcatgtaaatacatatttttgctatttgtaattgtattattgcaattgtttggttttaatattcgacccgaaaaaaaaaagacttactac

SEQ ID NO: 102890 - DNA, 270 bp, Zea mays
  Clone ID: MRT4577_25342C.1
cacaggccaagaaagcatcggactgcgtggcaagcctattatttaggtttcttaccatcagaggccatcatcaatcacattccccgtctccttggtcctggtctcaacaaggcatgcaagttcccgaccctggttactcaccaggaatccctctagtccaaggtgaacaagactaaggcaaccttcaagttccagctcaagaaggttctttgcttggatgaagtcttcggcaacttttctatggatgatatttctattcagcttaacttt

SEQ ID NO: 102891 - DNA, 633 bp, Zea mays
  Clone ID: MRT4577_25343C.1
cctacgttggctttttgatttgtgtttggactttgatacatatactcgtagcaatcagcagctcgcgccgggacgtccggcccacgtagacgcactaccgcaaacgatggccaacgcggggctgcgtgcataccgcgaggtgctgcgcctggtgcggcggctgccggcggagacgcagccctactacgccaagtacgcccgccagaacttcgtcaactatcgcgacctcgccgccgacgacgatctcggcgccctcctccgccgcgcctacacccactccacatgggtcctctccaagtactcgatcgacgcggggaaagtggcggtgcggctcaaggacttgacagacggccacgctgagatgtgacgcacgcaaggtgttcgatcatatgccgctcttggcttgaggattgagctcagcttcgatttgtgtttgttttggcacttgcatcactctggttacttggacgctgtatggaacgatgcaagttaacaactcatgctcatttgtcaaaaaaaaaaaaaaaaaactcccttttgtcatgcctgtgtatgccagcccttttcaattcaaatcaactttgtgggagcttcgaattacctgaaattttcaattcaaatcaactttgcgag

SEQ ID NO: 102892 - DNA, 313 bp, Zea mays
  Clone ID: MRT4577_25344C.1
aaaataacaaaaaacctttatcacatactcatggggggcaaaaacaaaaaaatggggaaaagggggaccgacacccttgagttgaccgggaagggtctattcaatctcctggaaagaggccccggtggcggcgcccccagcgggggttggaaggacgtccccggcagaaaacttgcccttagccttggggggggggcggccccgggccttgcggtaaaggaaagccttacgggccttgtccagcttaagattggggaccatcactttggggggggggatgcccacgttaacgggggggccggtccccccccga

SEQ ID NO: 102893 - DNA, 455 bp, Zea mays
  Clone ID: MRT4577_25346C.1
accacaccacactccactgaccgttcctcctgctccgccgccacccaccgcggcggccatggcgacggcagcagcgactcctccccatggcggcctcccggaagagatcgtgatatgggagatcctcgtccgcctccccccaaaatccctcctccgctgccgcgccgtctgccgcgcctggcgcagcgccacctccgcccgcgacttcctcgccgcccaccacgcccgtcagcccaacctccccatcgtcttccaggaataccacggcggccaaagcttactcgccttggacaaccggggcgccgccgccgcccagctccaacccgtcgcccagtttgacgacgactccagtctggaagcttcctgcgacggtctactccgcctcaccgactatggcaggggtgttccaaggttctctgtctgcaacccggtcactcgtcagtttgcttgcttgc

SEQ ID NO: 102894 - DNA, 440 bp, Zea mays
  Clone ID: MRT4577_25347C.1
gccgcaagaaaccggcccatgtaataccccaaaaaaacacaaatccctgcttataaattttaaatccggcacgaaacggacttgaccgcgagcacgttacacagatgaacatgaaccccaggagcgaccttggatcgatattggggggtgcatttgacaggatcttatttaaaccctgcttttaattatatttatacccctgggggggggcgtcctttcaacttttgagccccatcgccgggccgggcgggccggtttatttgcagttgcaacaggaccacccgcagttggggcccaatttgcaggtgttgcaatcccagcccccgccctcgggggccgccttaaaccccccggcgctggccttgggggtcggcccaacaaggaccatggtcttgatgctgttggcgggggcggtctccacgtaaggggacatgcatttg

SEQ ID NO: 102895 - DNA, 621 bp, Zea mays
  unsure (1)..(621): unsure at all n locations
  Clone ID: MRT4577_25348C.1
nnnnnnnnnnnnnnnnnnnnnnnnnnnnnnnnnnnnnnnnnnnctcttggcccaaatcctccattcaaaatgctccaatgtcgcctacagaaacgtgatgcgaaaattctgcacataacggctaccacaccttcacacgttcctctctacatcgacctgatcatagtaagtatcatacaatatgccagtgccactaagaaaaggaaccaggctttcctctcctgaaatacaatctacaatacaacatctaccatcactcggcttcatctgcggcggacggcggcggcggtactggtggtggctgcacagcagcagcagcatcttcggacgttgcttccacagtatctgacgagtcattcgaacctgggatgttcggatcatcactctcgcttacttcctcctcccagtagctctgtagcagcttcatggctagctcgtagatcctgtcgctgtccacgtcctgcagatcctccagtttctccagacctccgcactctagaataaactcggcgtatgggttcgtccctgattcctcgcccttcttccccgcctcacctgcgtggagtatgttctcaagaccttcaagacacgtgtatacaaggtcaggatcgttgtgggtga

SEQ ID NO: 102896 - DNA, 1319 bp, Zea mays
  Clone ID: MRT4577_2534C.1
ggccgcttttttttttttttttaacagacaacatcttttatctattatctatcgtgattttattttttgaggtttgaaacaaacactatgcaatggcatctataaataagtcacgttacaatcgtccggaccaaccccttcatcacaaactacagtctttcggcatcttgtgcatctataccaatcaacctctgtttcatgaacagagtgctatgtttctttttagttcagaatgtaccatatatctaataacagaggcacagggccgaagcagctttagcacactcagtctttatcattgacggcttcttcagagtctctaagccactcacgaagcttcagctcctgctcttctttgaacttgttgtaagcctccactgtttccgagacgccggtagcaggcaggctacggtttgcggccgtaccctctgacaaccgacttgaaatggggagctcatccttctctgtatctggtgtagatgcaccttgcccaccagcttgtggcgattccagggcagaagacgacgccgagttctcgctagtatcatcttttgttgcaaaatcaggctgcggccacctgagacctgatgccttttgcttcgcggtgttgaacattgaagagaggtagttcctgctgctacttccattggtagagcccagtttgtcccaagttcctgagcttttccttgactggaacccccaactggggttttggatcaaccctctctttggctgggtctttgacattatttgcagtgatctatttatgtccttgatcatgtcatcagcaagtggaagtccaaaatcagccatggatctcacagcacaaatagaatcctccatgtcttcagtgtgcaatgtcacctcgcgtgtcttctctacgagtttacccttgacgtcaaggaggaggggcatggaagcccgggcgtgctgctggacgaagtagagcccgacggagggctcgttggcgacgtacttgatcattccgtccacgccgtccttcacgcgcaggaagccgtcggcgggggagagcggcaacgacgacgcagcggcggcggaggaggaggagcggttgtgcatgtccgcgcccgccggccgccgaccatcacggactcgccgccgaccactcagcgaggggttctcagattcgccgccgcgtcggagaacgaacagatgcgaaaaaatatcgatttgggagcctccccgtctagagctccctctttctctctcctgcggggatggaggccgaagaacagacaaattattgtgctcggtctcctaacagctcccggaacccggccggctcgagcgccgcacag

SEQ ID NO: 102897 - DNA, 304 bp, Zea mays
  Clone ID: MRT4577_25350C.1
cccacgcgtccgcccacgcgtccggtcgttgctgctgctcctccgatcttcttccctcttctcctttccttcctcccagccgcgcgcgcggagggaaggagaagaagagattagaagggcgccggaaggagaagaacacagctacattgactagccaataactaggaaaaaaacaaaattagggtcggccgggcaggccgcggcgcgcggtgggcgcggaggggagcaggcttccacgcgctcttctctctgccttcatctgatcgatcggttcaagaacacgccggaattgaagtctcgcatt

SEQ ID NO: 102898 - DNA, 666 bp, Zea mays
  Clone ID: MRT4577_25351C.1
ctgtgcggcgctcgaggcggccgggttccgactgttcccgtttttttttgttaatctctcgcttaacctaaacgccgggagcacaagtgctcggcgaaatgacgagcgccggagcggcgacaggcgccgcgctaggcgcgcggacggcgcggtcctgcgactgttcgccaagaagatccggtacgaggtgcgcaagctcaacgccgagaagcggccgcggatgaagggtcggttcgtgaagcgcgccacgcttccgccgctgccaaggccgccgccgccgcagcagcagcagcagcagaagcagctgccacgcgcaccgccacacgtgggcatggtgctcccaccacctccggtatcgaacgggcgcttgtggttttgagaccatatgcatgcatggaagcatgcatgaagcaacgtatgtgcgtgatgcatcgatgcatctatctcgctcgtagcatgcgcatgttctttctactctacttttaattcgtgcgtgcgaattagggcaccccacaagataatgctccctgcttacgactgaaatatatttgtttgtacatgtgcagaatagttaagaaagtatatttatagcctaggtttgttgtttatcttttctagttgttgtaaagaaggatgcactaaatacaagggaagggtgtagatttc

SEQ ID NO: 102899 - DNA, 437 bp, Zea mays
  Clone ID: MRT4577_25352C.1
agggcgtgcaatcacacaaccctcctggtcaatgtcgccgacctcaactcgtcgccgtagcgggttgtacctgggatgtggggcagcaacaagaaaccgaacctcgacttcaccctaggacggatataatccgcactgtctatctacacctcgaccatcagctgagccaaccgagatcgatcgatcggccggccatggatacgaagctagatacaggctagagctagctgcactgcatacataggttgatctgcttctaagctgccatgtttatgatctgatggagcatgtgcgtgcggtatgcatgcatggtcgtagcgagggaacaatgaagaagaaccaaaacgcttgaagaaatgaaaaaagaaggcgcgctaggagtaaagaataggagatatggcaaccgtggatgggatccaggaacaaattaaagctag

SEQ ID NO: 102900 - DNA, 1642 bp, Zea mays
  Clone ID: MRT4577_25353C.1
ccggccgggggactgttcccgttttttttgttaagctctcgcttaacctaaacgccgggagcacaagtgctcggcgaaatgacgagcgccggggcggcgacaggcgccgcgctaggcgcgcggacggcgcggtcctgcgacggctgcatgaggcggcgggcgcggtggcactgccccgccgacgacgccttcttgtgccagacctgcgacgtctccgtgcactcggcgaacccgctcgcgcgccgccaccaccgcgtccgcctcccctctgcgtcctgctcctccccaccgcgcgacccggacgcgccaacgtggctccacggcctcaagcgacggccacgcacgccgcggtccaagccaggggggagcaagagcaacaagcatgaggcgactcccagctttatcgccgcggctgcgtcgtcggcagcggtccccgacctcgaggcggaggagtccggctccggtatcctgggcggtaacgacgaccaccacgggttcctgcaggatgacgacgaagaccttctgtaccgcgtgccggtgttcgaccctatgctcgccgagttctacaaccccgtggccgacgagggggagcagaagccggcctgcagcctgctgatgccgtctctcgcggaaacatcgccggagttcgcctccggcggctcggcggaggcggacgggctctccgtgtcgttccacgtcccggacatggagctcgctagcttcgccgcggacatggagagcctcctcatgggagtcgacgacgacgggtttgactgtttgggtttcttggacgaagagaaacctcaggtgaacgcggacttggacgccatagtagcgccggcgcctgaaccagaggacaagaaacggaagcggccggagatgatactcaagctcaactacgaaggcgtcatcgcctcatgggtccgtgacggcggctcgccgtggttccacggcgagcgtcctcacctcgactgtcacgagctatggtcggacgacttcacgacgggtagccgggaactcctcggcggagccgtgacaccggtgaccggtggcgagcgtgaggcgcgggtgtcgcgatacagggagaagcggcggacgcgactgttcgccaagaagatccggtacgaggtgcgcaagctcaacgccgagaagcggccgcggatgaagggtcggttcgtgaagcgcgccacgcttccgccgctgccaaggccgccgccgccgcagcagcagcagcagcagaagcagctgccacgcgcaccgccacacgtgggcatggtgctcccaccacctccggtatcgaacgggcgcttgtggttttgagaccatatgcatgcatggaagcatgcatgaagcaacgtatgtgcgtgatgcatcgatgcatctatctcgctcgtagcatgcgcatgttctttctactctacttttaattcgtgcgtgcgaattagggcaccccacaagataatgctccctgcttacgactgaaatatatttgtttgtacatgtgcagaatagttaagaaagtatatttatagcctaggtttgttgtttatcttttctagttgttgtaaagaaggatgcactaaatacaaggggaagggtgtagattttgacaaaaaaaaaaaaaaaaaaggcccctagggcc

SEQ ID NO: 102901 - DNA, 543 bp, Zea mays
  unsure (1)..(543): unsure at all n locations
  Clone ID: MRT4577_25354C.1
cgcttctcggcgttgagcttgcgcacctcgtaccggatcttcttggcgaacagtcgcgtccgccgcttctccctgtatcgcgacacccgcgcctcacgctcgccaccggtcaccggtgtcacggctccgccgaggagttcccggtctcccgtctgcatgcatgcgatccatggcaaaaggaaagccgntcagttatttatcccaagacagtgccagagcatgtgtagatctcatgctcgaaccgtagtgcttaccgtgaagtcgtccgaccatagctcgtgacagtcgaggtgaggacgctcgccgtggaaccacggcgagccgccgtcacggacccatgaggcgatgacgccttcgttgttgagcttgagtatcatctccggccgcttccgtttcttgtcctctggttcaggcgccggcgctactatggcgtccaagtccgcgttcacctgaggtttctcttcgtcccagaaacccaaacagtcaaacccgtcgtcgtcgactcccatgaggaggctctccatgtccgcggtgaagctagcg

SEQ ID NO: 102902 - DNA, 529 bp, Zea mays
  unsure (1)..(529): unsure at all n locations
  Clone ID: MRT4577_25355C.1
actccatctgttccaaattaaaaaaaaaaaaaaaaaaaaaaaaaaaaaaaaaaaaaaaaaaaaaaaaacaaaaaaaaaaaaaaaaaaaaaaaaaaaaaaaaaaaaaaaaaaaaaaaaaaaaaaaaaaaaaaaaaaaaaaaaaaaaaaaaaaaaggggaaaaaaaaaaaaaaaaaaaaaaaaaaaaacctttgccccccaaccccccttaaagggaaaaattttgaaaaattcccaaaaaactggggggccgtttaaaaattccttttaaagggcccaatttccccctttagngggagtggttttaaaaattaaatgggcccggggttttaaaaacgtgggaaccgggaaaaaaccttgctttccccaaattaaaccccttgaaaaaaaacccccttttcccaaggggggtaaaaaaaaaaaagcccccaccctaacccccttccaaaaaatttcccaaccttaaaagggaaatggccccccccttaaaggggccattaaaccccccggttttgggggttacccccaagg

SEQ ID NO: 102903 - DNA, 484 bp, Zea mays
  Clone ID: MRT4577_25356C.1
ggggaaagatgaaaatatatagatctcttttggggtcattcatcccgcccgacggggatgatcccagtggatgaccccgaaaaacagggccccataccgggggagagattttgcaacagaaaaaacacgcggggaccggcccaacccagccaggcacgacgaccccagaatcaccccccctgcatcatcatgccccaaaagtcgtggaaacaaacaaagccgtcgccatcgccgtcgacccggcccatcatgcgggggcagtcctcgacggagcaggcggggtcccccagcgcggggagcacggggcggagctcccccgcggagatcctgccgtcgccgtccccgtcgaacaccccgaacccgtcgggggagctcggcctcgtcctccccctcccgggacccggcctggttgggcccgagcccgggggcctcccccttggccagcaccgggggcagctcgtcctccttggggaccacccggggc

SEQ ID NO: 102904 - DNA, 359 bp, Zea mays
  Clone ID: MRT4577_25357C.1
ggcgcaatcggtctgtacaccaaataattcgacatgcgtgtgatcatctagaccaacctcacgagacccgaggatcttacctgcggccctagacatcaagaacccccagttcaataggaagcttgacagcatgcttgacatcaaccagaagatcattgctgattcatactccgactaaataaccctattgacgaacctgaaaacgattccttttagcccctctatagtgtccaacatcatgatcttctaaatcatgcacaccatccagtctggatcaccataattacccgaatttgagccccggacttgatactgattctgtacaaagatatatcctctagttattcaccctgaatgac

SEQ ID NO: 102905 - DNA, 471 bp, Zea mays
  Clone ID: MRT4577_25358C.1
aaaaaaaaaaaaaaaaaggccccctccaataaacaaaaaaaaggcggggccaaacaccccaaccaaaggggcccccaaaaccaaaacaaaaacccaccggggggcccaaagggaaacccaaccttaaaaaaggaaaaaaggcccccacccttgggggccccccaaatgggaatcctatccaaggttccccggcccaccaaagggggaaaacctggccaaagcaaaaggccccaggcagaaaaggcggccctggggctccccccgggccgggaggcccccaaccccccgggggtccccccccccagcccccaggaccaggggggcgacgcaaacctggaggaagcccaggacctggggggcccccaaaccgatttggggggggccggggccctggaggagcgggccggggaagcggggggcccgaccatcgggggggtcagggggggggaggccttttggcccaaccggaac

SEQ ID NO: 102906 - DNA, 312 bp, Zea mays
  Clone ID: MRT4577_25359C.1
tggctcgcccgcctgcaccggccgggccgtacttgccggaccgacccacgcgtcttttctctgattgggaaccgagcttttgtcgtgtccatcgatgctctatgcgcacgcttggtgagagaaatgtccgtctatgcacgagatcacgaaccgtgcactatatatatgaagactgctgttgccaccgatggccggggagtgaccaagtgaactcgggctgatcctgagacccactggacgttgtgggtactacccaaataattaaaccgttcggatgggcctgctgcggtcatgacacccacggccccacat

SEQ ID NO: 102907 - DNA, 210 bp, Zea mays
  Clone ID: MRT4577_2535C.1
ctcctcaatgacatgggacgtccgtcctgggcggaagtaaaacaagtaacggacaacaaacgaataacctgagagaagtctgtcgaaagaggtaggtgggctagttggaatggttgcgacaaagctgcacgactcctggaaccaccctgctggccccacaaccattcatatcggggagccgacaatcaaaaggcggatcagtattgacaa

SEQ ID NO: 102908 - DNA, 269 bp, Zea mays
  Clone ID: MRT4577_25360C.1
ggggctccattcctggtgcagaggcgagccgagagactgcaactgcccgatggaggcgacatcaacggagctcgctctcgtgcgcgatgtgctgctcctctcctccccgatctatgagtcagaggtcagcgtgaggctttctgaacagcagacccctgtgctccagaagcaaacctcccacccatgtagacaacggcgccgcagcagattgaatccagatcctgcaaagccgaacagtggtacagtctcgacaccagcggccccaaatg

SEQ ID NO: 102909 - DNA, 438 bp, Zea mays
  Clone ID: MRT4577_25361C.1
aacgtacttcgatcctcaagtgatcttaattgttatgaagctaccagctagtggagatcaggggcaatgtcaaacatcgggcaatccttccaggtcgatcaggcgcaggtccagggcgagtgccaggcggagcgctcaatgtatagatatatggacgtgtctcggtccaccgcctgcgccatgaccgacaccgacggagccgaggtcgacagcgcgcagcatgaggagcaccgcgccgcacggcaccgttcagcatgctgatgagcaagtggcgcagacggcggctgacgcgatggcagccgtcaaggacacagtggcagtcgcggccgtggccgtcaaggacacggtggcggacgcggaggcaggcgccaatgacaccgtgaccgacggccactgaccgactcacgcgcgtgaacacgacagcgtaccaacaatgct

SEQ ID NO: 102910 - DNA, 436 bp, Zea mays
  Clone ID: MRT4577_25362C.1
gcgcgcgcgagctggtatcctctacagacggtcgctgttgttttttgttttctcgtttacgaagactaccgatcccgtcgtcgcccgtcctctgtacggaggttctttttagatatcgctagcaattggtgggttgtacggtcaatatcagcttatagctgagctttctggtctttgatcagctgatggcaagggactacacatgtgaaaagtgtattcctttgaagcttacaaccaacgcaatgcatgcatgtcacgacaggaccatataaatgtggaacttatcaattcgctaagaacagacgaatccaacgttacatgtttgtgggaatacattgcttcgtagcattgatgcctacttccatgatatcttggggtgctcaatgtgctgataattcgcacttgctggaagccattgttagcagacctgtttgtt

SEQ ID NO: 102911 - DNA, 1180 bp, Zea mays
  Clone ID: MRT4577_25363C.1
caggccggccgggctggtctcatttgtctgacactaccccctacctccccgtcccaacctcgtctaatcgctgcggcgccagtgcccaaatctaaaccctagcgccgccaccgccatgctgcgccgcatcgccgccgtcgccccgcgggccttcttctcctcgtcacccccgcacgccccgtcgcttccggcgtcgggctacatcccgcgccgcgagtacggcctggtgcccatggtgatcgagcacacctcccgcggggagcgcgcctacgacatcttctcgcgccttctcaaggagcgcatcgtctgcatccatggccccatcaccgacgacacggcctccctcgtcgtcgcccagctgctcttcctcgagtccgagaaccccgccaagcccgttcacctctacattaactccccggggggcgtcgtcacggcgggcctcgccatctacgacacaatgcagtacatccgctcccccgtcaccacgctctgcatcggccaggccgcctccatggcgtcgctactcctcgccgcgggggcgagcggagagaggcgggcgctgccgaacgcgcgggtcatgatccaccagccctccggtggcgcgtcggggcaggcctcggacatcgccatccacgccaaggagatcctcaaggtgcgcgaccggctcaataagatctatgccaagcacacgggccaggccatcgaccgcatcgagcagtgtatggagagggacatgttcatggacccggaggaggcacatgaatgggggctcatcgacgaggtcatcgagcaccgccctgtctctcttgtgtctgatgctgttggcagtgatccgccaaacctcggtggaggcggaactgaggtgaataaagggacggacgagccatctccagcgtgatggcattgggcagtcacaaggtgcaatccttttttgtgttcctgtagctgtcttattggagttataaggtttaattcgtacatgagggtgaataacttaattttatgtctgctgggctaatccactagcaacactgttgttttgctactttattaattgatctgttgctgataatgagtgctctctggtatgagccctcatcagtggtgatatatgcattgttatagatttgttcgtctgaaatcaaacagtgctgtttaaaggataaaggccacagccttg

SEQ ID NO: 102912 - DNA, 372 bp, Zea mays
  Clone ID: MRT4577_25364C.1
atctaaacggagctctaagcgtctcggcaaagaggagcgcaaccgcactggggatgaggacagtaaggctcttgtccatggccatcccaacccaggacgcgaacaaggcggaggagatccaattggggtacacgcgtgcaacgatgatccatagatccaataacgatatgcaggcctctgcgtcccggatcgctcgtggcggacaggacggtgtgctacacgtcggcagactgccatgtgagcctccgagctaacggatgggcgagacacggctatactaaggctggcactcaggctgactgacgccgcagcgtgcaacattcggcaggaactgagagttagacgtcatccattcctgctggtccatgctaa

SEQ ID NO: 102913 - DNA, 1197 bp, Zea mays
  Clone ID: MRT4577_25365C.1
aatcgctgcggtgccacgtgccagtgcccaaatctaaccccctaaaccctagcgccgccaccgccatgcttcgccgcatcgccgccgtcgccccgcgggcattcttctcctcgtaccccccgcacgccccgtcgcttccggcgtcgggctacatcccgcgccgcgagtacggcctggtacccatggtgatcgagcacacctcccgcggggagcgcgcctacgacatcttctcgcgccttctcaaggagcgcatcgtctgcatccatggccccatcaccgacgacacggcctccctcgtcgtcgcccagctgctcttcctcgagtccgagaaccccgccaagcccgttcacctctacattaactccccggggggcgtcgtcacggcgggcctcgccatttacgacacaatgcagtacatccgctcccccgtcaccacgctctgcatcggccaggccgcctccatggcgtcgctactcctcgccgcgggggcgagcggggagagacgggcgctgccgaacgcgcgggtcatgatccaccagccctccggtggcgcgtcggggcaggcgtcggacatcgccatccacgccaaggagatcctcaaggtgcgcgaccggctcaataagatctatgccaagcacacgggccaggccatcgaccgcatcgagcagtgtatggagagggacatgttcatggacccggaggaggcacatgaatgggggctcatcgacgaagtcatcgagcaccgccctgtctctcttgtgtctgacgctgttggcagtgatccgccaaacctcggtggaggcggaactgaggtgaataaagggacggacgagccatcttcagcgtgatggcattggacagtcacaaggtgcaatccttttttttgtgttcctgcagctgtctcattggatttaaggtttaattcgtacatgaggtgaataacttaattttctatcttctgggctagcaacaactactgttgctattgatctgttgctgataacgagtgctctctggtatgagctctcatctgtctgaaatcaaacatcctgtttaaaggataaagcccacagccttgaaacattatgttgtattttgtctcaggctaattcagagtgccatttctgtattcaacaaaattcgaattttctaattatcactgcaggccgtcttggtatttttagcggtgttatgcct

SEQ ID NO: 102914 - DNA, 1272 bp, Zea mays
  Clone ID: MRT4577_25366C.1
ctcgaggccggccgtgacgacccctacctccccttcccaactcccaagctcgtgtaattgctgcggcgacagtgcccaaataaaatcccctaaacctagcgccgccgccgccatgcttcgccgtctcgccgccgtcgcccagcggaccttctcctcctcttccccgcacgccccgccgctggctgcgtcgggctacaccccgcgccgcgagtacggcctggtgcccatggtgatcgagcatacctcccgcggggagcgcgcctacgacatcttctcgcgcttgctcaaggagcgcatcgtatgcatccatggccccatcactgacgatacggcgtccctcgtcgtcgcccagctgctcttccttgaatccgagaaccccgccaagcccgtccacctctacatcaactccccggggggcgtcgtcactgcgggcctcgccatctacgataccatgcagtacatccgctcccccgtcaccacgctctgcatcggtcaggccgcctccatggcgtcgctactcctcgccgctggggcgagcggggagaggcgggcgctgccgaacgcgcgggtcatgatccaccagccctccggtggcgcgtcggggcaggcgtcagacatcgccatccacgccaaggagatccttaaggtgcgggaccggctcaacaaaatctatgccaagcacacgggccaggccatcgaccgcatcgagcagtgtatggagagggacatgttcatggacccggaggaggcacatgattgggggcttatcgacgaggtcatcgagcaccgccctgtctctcttgtgtctgatgctgttggcagtgattcgcaaaacctcggtggaggcggagctggggtgaataaaggagcggatgagccatcctcagcgtgatggcattggacagtcgcaaggtgcaatcgttgtcatgctcctgtagctgtcttatttggatttgaggtttaattcgtacatgaggtgaataacttaattttctggttgctgggctaatccactagcaacgctgttgttttgatactttaattgatctgttgctgataacgaatgctatctggtatgagccctcaacagcgttgttaaagatttgttgtctggaatcaatgagtcctgtttaacccacagccttgcaaaattatgtttatttcatcccggggctaattcagagtgccatttctgtattacacaaaattcgaatttctaattatcattgcaggttacctatcttttcagccgtgttaaaaaaaaaaaaaaaa

SEQ ID NO: 102915 - DNA, 704 bp, Zea mays
  unsure (1)..(704): unsure at all n locations
  Clone ID: MRT4577_25367C.1
cgagctggacgaggagtttgacactttccccccttcccgcccgccagacgtcgtgcggatgcggtacgacaggctgcgcagcgtcgcggggaggatccagacgtggtcggcgaccttgcgacgcagggcgagcggttgcagtcgctgctgagctggagggacccgagggccaccgccctgttcgttgtcttctgcttcgttgccgccatcgtgctgtacgtcacaccgttccgggtcgtggtcttcctcgcgggcctgtacatgctgaggcaccccaggttccgccacaagatgccgtccgtcccgctcaacttcttcaggcgtctgccggcgaggactgacagcatgctgtaggttgtgggcttgtggcagatgcctggctccattgctggttcagtggtttcacccgtcagttgcagctcacagatggtcactctcctaaggtagtgtatccgaaaacaatgaactgccagctatcttcgtgacttttgtagcttctctctgtcgcatggttggttatgtattcagatggttgtgaacctttcctgtagctaggtatgcgtgatgcatgatgcttgaaaactccgggcgttggttaagttattgctttacnnnnnnnnnnnnnnnnnnnnnnnnnnnnnnnnnnnnnnnnnnnnnnnnnnnnnnatcgtgttgtttggtttccagctcaatttgtcagtttg

SEQ ID NO: 102916 - DNA, 294 bp, Zea mays
  Clone ID: MRT4577_25368C.1
gctttctgagcatcatcgcagtagctgttgcggctgcgtgccctacgagtggctattgctaggccggtgcaagaacttcagcgaaggctgttaattctagcaattgggagtctgggaccacaggaaccattttgtgtatgaaactttattatatttagttcaatgctatttggctcgtgtcccaggagcatagtgtttttgttctataatcagattattaacttgaaagaatggcctttcgacgaattgaaagagcccactcaaggaacgattaataattgatgtttcatgtgg

SEQ ID NO: 102917 - DNA, 289 bp, Zea mays
  Clone ID: MRT4577_25369C.1
attgagactaactagcagcatagaaagcacactagtgtaccaacattggcagccaaaatattttgcctcctaatgctcctgggccttccggcaggggctgttacggcgaccattttcctgcatggttagaaggttctaatagcttccttttttccccagaacttctatccatcatagctttagtgttgtgaaacccaaatctttaaacctatcaggttccaccaggcattgacagctggcatataactttataaaccttggttcatccatcgatagtcatatctatgac

SEQ ID NO: 102918 - DNA, 420 bp, Zea mays
  unsure (1)..(420): unsure at all n locations
  Clone ID: MRT4577_2536C.1
ccttcggcacgccacgggccaaggtactnnnttttttttatttttattttattcttttttttagttttttttttttttttttttttttttttttttttttttttttttttttttttttaaaaaccaatcaaaaaaaatattatttaaaattgaagccctaaaggaaactaacacccccaataaaattataaaacaatgccattataggcttaatgccctaaaaacaaacccctaaaagttacggccccaacaaaaaaaatacaaaagcccaacagcgataaccagaaaaaaacccaaaaaaaaacacgaaaagccaacacaatctcacattaaatctcccctcttaagtttccttagggaaccctcctgcaaatttagctgaaggccaccccatttcgctaacttgaacctgggccgaaa

SEQ ID NO: 102919 - DNA, 761 bp, Zea mays
  unsure (1)..(761): unsure at all n locations
  Clone ID: MRT4577_25370C.1
gccggccggggagcaaaacctaacctaaattattctggattgccagcaattaggtatgaacgcaccagctgaagctaatgtcgctcagacacccgcggcctcaaggggccgtgggcgtggacgtggtggtggacctgcccctagagggaaggccacgcaaggtcgcgtgtccgtgcccaaggcacagaacgcgaagatcggtcccaaccgcctcctagaggtggaatgggttaaagacagcattctcaaagggaattgctttgtcttgtttgctggctccgggcaacccggagaccaacaatggacgtttcaccatccaattggtgagacgcctctcgacgcgcgtgattgggtggcaacacccacacgcgatatcagcttcctcctacagaggagggagtctgaagctctggtggcgtggaaacgccaatccgagcttgccaaaaggcacgctgtcttgcgctcccaagttgggcgcaagctagctggagatggccagaccgagatctgggcattccaaggagcgccggctattcagccgacgatccagtcttgcatgactgcggcaaaggccgcaggtgcaaatgagtcggagtggctaagctacgccgaccaggctgttcgcgtcgccgaacagtccttcaaggaagcgctgcgtacgcagcctatccctgcggagtggattagggctaaccctaaaccacaccatgaaacgatgggcgggncctctaggggaacacccacagaaggctatccccctt

SEQ ID NO: 102920 - DNA, 1548 bp, Zea mays
  unsure (1)..(1548): unsure at all n locations
  Clone ID: MRT4577_25371C.1
ccggccaggtttgttagaccaaataaattttcaaagtcgtcaaaagatgaacttaatggttctgaagtgaagcatgaagatgctccagagtatgaggatgttcctctgcagaaagatccaccagaaggttcagaggagttcagtaaacaggttgatgaagcctttcttaagtacacaaagatattaaatgagagtccagctatgcagaagaaataccgggaggcgccaaaaggatctttgccatgctgtgtctgtggcagtgtagcgaggaaatttctggaccttgatgcattgctatcacatgcttatgatacatgcaaggccggtttgaagacaaaacacttggggtttcacaaagcactgtgtgttctgatggggtggaattggcatgttgctccagacacatctaaatcacatcactccattccatctgaggaagtaaatgccatgaggggagacctcatgctgtggcctccagttgttgtgatacataacagctcgactggtcatgaggcaaaggatactgatgcaaagattgtgtccatagaaaaaaaaaccagcagctagctagcgatggctggagcctgggcactgctcatcgtcctcgcggctgccgtcgcggtcctggccgcgcggccggcgtctgcaggcgggggagccgcggcggtggcggagatctgcatgaagactccgtcccccgacctgtgcaccaggacggcggggaagcacgccaacaagtacaaggtggtggacgcggtgacggtgctagagatgcaggtggacgcgttcaagaagcgcgtgaaggcggcgcggaggctcgccaaggaggaggtcaagacggccgcgacgcccgaggcgcggagggcgctgaacctctgcaagacctactacctggacgccgccgacaacctcggcgcctgcaagcgcgccatcggcttccgcgacgccgtcaccatccgcgccacgatgagcatggtggcgcaggacacgcagaactgcgacgaggagttcaggaaggccgtctccaagaaccccatggaggaccacaacaggtcgctcatcgagatgtccgagatctgccgcacgctctccaacatgatcccttacgaacatgtccattgatttgtttgtttctttttcccgaccccctactacgttcggtaacgtcgtcgtcgtcgtcgtcgtcgtcgtccggcctaaaacatatgtaatttgatgctggtcgcgtgtgtctgtcagtcgatagactggacgcatgccgacttcatgcggacctagcgcgtgtccttcttttcggtgttgcctcttgcggcgtggcacatgtcttgagaccgtgggatgaaacggctcgttgagacttgaggcacgcgtgtagggcagcctatatatatgattctataacatgctaatttgtgcttctttattactatatatatagccattcatcaatcaattcaactagaaacattcctaaaaaaaaaatttgcggccaaaaaaaacaaaaaaaaaantcnaaaaaaaaaaaatacacacaaaaanggggcggcc

SEQ ID NO: 102921 - DNA, 218 bp, Zea mays
  Clone ID: MRT4577_25372C.1
cacgccaaatagctacgctcatatcagaatataaggccactgggcaacagaccatgacgaagaccaaaccaccgtatgcgattctaacaacgctgttctttctcgggctggctggtatcctcactggaggccgacttgtggcactagaaccaggatccggccgacatttatcgccattggagaccgaagcaaaacatgcggaatcacatttagagggc

SEQ ID NO: 102922 - DNA, 487 bp, Zea mays
  Clone ID: MRT4577_25373C.1
ctctgaacggggtgagtacccccgccgcctccgaggacggtacccgcggtggcgccgtcgttagcgccagcggtgtacctcgtcaagaagaagaaaaatcggtttcggcgaggaagccgtggcggcccccgaagtcggcgaagcagtgcttgcactgcgggtcgtcgtggacgccgcagtggcgggaagggccgttgggccgcagcacgctgtgcaacgcgtgcggtgtgcggtacaggcagggtcggttgctgccggagtaccggccgctggcgagccccaccttcgagccgtaggagcacgccaacaagcacagtcaggtgatgcagtttcaccggtagtggaagagccagggtcagtaccaccctgtgtccgtggagcatacgtgagccatggacgtgcttcagttttcccagcggtggcaggtgaaggaggagtaccttgtgagggcgattcaccagactttgccgtatccggtggtggacgg

SEQ ID NO: 102923 - DNA, 1079 bp, Zea mays
  unsure (1)..(1079): unsure at all n locations
  Clone ID: MRT4577_25374C.1
tcagttttaccgttcactcctaccattcactgcctttgaaggcagaaagaatccaatcacataaagctttatccaattatccatgcccttaaaaactttcaaaaactgttacattcctagaaaaattggtaattccgtctgaagttgcgggaatagaaaccacatataccttttgccattagtttcctttttctatagatctgtcacctttaccttgaatttacatgaaacatggtatgtgacgtcagaagcttaaccgtccatttctgtgatgaactgcttagttaaatttcggtgttgtgatcagaatggtgtcaaaccgggaatcggctaggcgatcaagaaagaggaagcaagcacacttgaccgatcttgaatcacaggtttccaggttaacgtctgagaatgcatctttgctgaagcgactggctgatatgactcagaaatacaaggatgcttccgttgacaataaaaatctaacagttgatgttgagactatgaggagaaaggtccgttcgtcttgaatgcatcacagacctttttctttttgttgtatgagaattcttaactgcatccatttatcgttcgtcatatttttactgngatctgcatgtagtcactggatcaacgttttactgggctctgcatgtaaacgtaaacgcaaagggcagtgaaagtagtattggntgttcatagttcttattttagaacctgcaagttcagttttagtttttaagaccattccagttcacttgccggtgttgctggcctgtcgtttgaccaaatgacgatcgtcggggatgcaatgtattccgagaccgggtcaacgccattctcagatcctgaagctcttgccgataggtaaaggttgcccctgttctgtcctgtgatgaccacccgtgtgatgctggtaatggaagttgtagttgtagcccccatgcgcctgggtggggtctccccagtgttttgtcccctattttgaaggttaataataattgttgggaaaaaatctccgctctttaagcccaaaaaaaaacaaaannnaaannnnnttnnnnnaggggattaaacaanggggt

SEQ ID NO: 102924 - DNA, 2360 bp, Zea mays
  Clone ID: MRT4577_25375C.1
caatttggctttttggttctttaacatgtatacaatgctatgttatgttttaggatgtttggcattgtgagatatgcaataggaagccagggcgaggttttggtgggtataattgtcttttaaatatatcctagtagatattttatgtttccatgcgattatgcattattactattcgatgtcatcttaccttttatagaaacaacggttgaggtcttgccacggttgtgccaaatcaaatatgccagtggtacactcgaggagcttctgtatgttgatatgccgagagagtcccagaattcatctggacagattgttttggactataccaaagcaatccaggagagtgtctttgagcaactgcgtgtagtccgtgaggggcatctaagaattgtattcaaccaagacttgaagattgcatcgtgggagttctgtgcccggcgtcacgaggaacttattcctcggagatcaatcataccacaggtcagtcaacttggtgctgtggtgcagaagtaccagtcttctgttcaaagttcagcatcactatcaagtcaggacttgcaaaacaattgtaactcgtttgtcgcatgtgctcgccagttggctaaggcactggaagtgccattggtaaatgatttaggatacacaaaaagatatgttcgctgcctccagattgcagaggtggtcaattgtatgaaagatttgatcgatcatagcaggcagactgggtctggtccaatagagagcttacataagttccctaggagagggaattcaggggttagttctgttcaagcccagcagcagtctgaggggcagaagcctgtcccacagaattctaaccagagtggccaaaattctgctcccgcaactggaatggaagcctctgcctccggcaatggcgatgctacgtcaaacaattcactcaattgtgcaccatctacttccgcaccatcttctcatctgttgttggtctccttcaaggctcagtaagttacagacaagaccatccaacaagcagcggcaatggtctgtataatggcggaaacagtggtccagctgctaaggccaactcaacgaactccatgcaatcaaatgcaccagcatcgtttcccttgccagcaccctcagcatcaaatggcaatatgatgcctgctccccagcactctagccaaatgaattcaccaaccatgtcatcaagcctacctcctatgcaaacacctgcaagtcggcctcaagaacccgagccaaacgagtctcaaagctcggtccagaggatactgcaagacttgatgatgcagtcccatattaacagcgttgggccagtgggaagcaatatgaagacagcaaacacagttactcctggtcttaacggtgccaactccttagctggcaatcccatgacaaataaccctggaatcatcaacggaatgggattcggggctatgggtggccttggtcagcagatgagaacagcaatggggaacaacgcgttggcgatgaatggaaggaccggcaccatgaatcacagcgcgcatgacctggcacagctgagccaccagcagcagcaacagcgcgatttaggaaaccaattgcttgggggccttagagctgcaaacagcttcaataaccttcaatacgactggaagcctgctcagtagagtgagcaggagtcagaaagctcgcacctaatattatacagttatccttgctgggtcggtccatcactgacaacacaaaagttacgcctcaccacaacctgccctccctcagaagcggagtgttcttactgatggtgcatgctacatgttacagcgaatattgaaacatgagcgctgatcggtacatgttacatcaactgtctgtatggctgtctcccattgtgttctgcaaaagtgaggccccgtgaatcagagcctacttcacatgggactcattgtgggtgcaagtgttggcggattccaaactggggcaagatcagggcgtctttctttcccctgtttttccaggttggatgacaacgatttctctcttgcagtctgtactcttgtgtaccatggctctccgtaagttgtgaaagcatgagcacctatttccaacctttgatggccaagaatctcattgtagctttgctgtaccatgtataagctgttattaactagtggaaagcagcaggaaaaaaattctgaagggagtgtgaatcttggtgtgtcatctgtgtacctgtgtttctgataaatgctctcgtttaagcaggttgatctttcacaaaaaaaaaaaaaaaaaaaaaaaaaaaaaaaaaacgaggaggtcgattacccaaattttttatctttatctagtttctttatgttagtata

SEQ ID NO: 102925 - DNA, 355 bp, Zea mays
  Clone ID: MRT4577_25376C.1
tacagctgcaacaagagaccgcacggctttttcataatacgaagacatatgtgacgagctgtgggcacatcaccaagatctctgtggaagtgtacctcaacgcgctaggttatacctactacgtaactctcaccgtgccttaaacctacgggttttactgctagccgcatcatagagccggaatggacagcgagatcaccgtctactaattaggctagctatcgatcgatatccatacatgtattaactgttgctatctgctttgtactccgtcgatctgtacatctctacatgcttccgtctttacacaccatcctctgatccgactacgtatgtatgcatgctactacactga

SEQ ID NO: 102926 - DNA, 327 bp, Zea mays
  Clone ID: MRT4577_25377C.1
tcgacttttttttttttttttttattttttttttttttttagtggttttttttggcagcgaaaaccatactatattgtttgaaaattcaatatattttgaaaaaagacatttcattttcaaatttttataataattccgtggagaaagcagtaaaatttaaacaaatagtttaaagaaatgcatcctccatgatggacttgatgagttaaaaggtttatatttaactatttaagcgtaataacataagtctcttatattgctttattgtaactccatgatccttgggcgcttcgaagccgaccgggatgaatttcgccattttgttg

SEQ ID NO: 102927 - DNA, 306 bp, Zea mays
  Clone ID: MRT4577_25378C.1
gcatcttgttccaatttttttttgatttttatttgtttttttttaataattttataattttttttccggttgattatcacccctaaagcaacccaggtattcaaagttttgggcggggaattttgggaaaagaaaaaggacccccggggaaccaggcccggaacaaccctagggggaaatttggtttatgtccataaaattggcgggccgttcaagcaggccccaaaaggccccagtccgcccaatagggagggggaattacattcaattgcccgccctttaacaccgccgtgacgggaaaaacct

SEQ ID NO: 102928 - DNA, 508 bp, Zea mays
  Clone ID: MRT4577_25379C.1
tctcttttttttttttttttttttttttttttttatttggatagggcatatttgatattggagatgctaattctataaacttggccaaagttagacatatttgacttaggaaaaaaactaaaacgacttacaatttgaaacagagtacaacttaacaacagcatgatgcagcgtgctactgggctctagacaattcatgagttaaaactctatttaaacaagtttctgaccaaaaagggcgcgcgaaatagaaaatataaagctacaactgtagcggaacccctgagtacataaagcattgttccatccaagcatgctgcaaataggacttactattcatcggcagagacctcttgtctacccgccacccactttcaaacacccccagattttcttctctgagtagttgcaaaggtttcctccacccgagatatatgttgatgcaatacttctggtcattctccaagaacccgcagattccagtcttttcgtgcagaacaatttggga

SEQ ID NO: 102929 - DNA, 373 bp, Zea mays
  Clone ID: MRT4577_2537C.1
ggactcgtgagattttgagcatattattcacaccaagcgaaacacactagcggggacttatcaacaatggctgccaatataaaaaaagcactgccgcttattgacctttttgtaaggaaggatgacaaacaacaacaccacgggggggggacttgttaagagagacaaaatttaattgcggggtcgggcaaggtaaaaatttttttttgggggtggagaaaaacaaagaggaggagcgggtgaaacaacaagagcggaggaggaacaagggcgacgaccgcataaaagagggctcgaaagaggatgagcgcgagcgcgagcaggagaaggaggagaagcagaaggaccggcggtcgtacgtgttcgaccggcg

SEQ ID NO: 102930 - DNA, 465 bp, Zea mays
  Clone ID: MRT4577_25380C.1
tttttttttttttttttccttttttttttttttttattttttttttttttttttttttttttttttttttcttttaaattttttaaagctagcaaaaacccctttattccttttctatactccagggctttacaattcgcagtttttcaagcactccgacatggtcggatagccaatgttttggccccagtaaaattcatatttcacgacgcacggacctttgttaagttttccgccgccgccagtcatgttgtagctcgccgacaacaacctcgtaatgttcatgctcgtaacactcgttgcgttgatgtcctttttggtttgcccatttaccgccatgcttgcacagacaagagaggacgacccttgaaaaaccatggaaaggagccaaagtccttggatgctcgcgcgcttttggcacttcgtaataatgggtgaaaagggtaaaagctaatgccgacaatt

SEQ ID NO: 102931 - DNA, 291 bp, Zea mays
  unsure (1)..(291): unsure at all n locations
  Clone ID: MRT4577_25381C.1
aagcgagccagacaccccaaggagcnaccgcnngcgacggnacggcgancccggagacggacnncnccaagccggacggccccgagagggcggagaccanggcggcccncgcngccgggnncgagcacgnggggnncnnccagcnggagaacaccggcancnccgacgaccngcnggagcgggngaagaaggggngcagcgaccccaacaagcngcgggacgaggcgnncaaggaccccaaccccggggngaaagcgcncacagagcncggggacaaggagaacgaggacg

SEQ ID NO: 102932 - DNA, 161 bp, Zea mays
  Clone ID: MRT4577_25382C.1
attctagctttatcaactataaggaagaaaacattagctaattgcatccgtacagggggacattcttgcaagggtgtgtccaagggcaatttatctacacttgaaatgcagacaaacttatgctctactgagaatgataaagattctatatttgtgaaata

SEQ ID NO: 102933 - DNA, 442 bp, Zea mays
  Clone ID: MRT4577_25383C.1
caacagccatcttggaaaataaacaaaaaaggccccgctcttggttggcaatggaccaaaatctaaaggggaaacacaggcatgccgccccaaagaaaaaccccccaaaaacccccccctcccattctttaacttggccctcttccctcgaaaaaacaaaagccggaggctgggcaagaacgtgggccccagttttggccccccctccttggccccataacccaaagggcccaccccaagggggttaacagctcgcccttgacgggctgggtcttctggggggggaaaggggccttccaaaatgccgtccccgtccccggaacggggctgggggcccccttgctcttggggaagaagccaacaatgtcatccgccgccctgccactggcgaaggaggggaccttcccgcggggagccacaaagaacagggtggggaagcctg

SEQ ID NO: 102934 - DNA, 886 bp, Zea mays
  Clone ID: MRT4577_25384C.1
cattgggtacctcgaggccggccgggaggagtttccgggtcaagcaaactctaccaacgacttcagcatcccgctccccgtcaccaatggtgactctgcatatccgcctttccagcaacccccaagcgcgtcatctccaccaccaccaaatgctacgcaaacccagatcccattgtctccgccgcccccgcctcctcgatcgcagcagcagcaacaacagagaccagtagtgcagacaggcatgaagcgcaagctcgattctgagccatcttcagctgtatcgcaaactggcggtacagctgcagagaacccctcgaagcgcataaataagtcgcgtcagtcgtcagatgcgtcggctacgtcgcccgttatacaggtatcagtagacacacatgctggcagcggcgacaacgacgacgcgtagcacagccccttccgtgcccaacgaaactgcatcgcaaccggcgccgcgagaaaacacacaagttgagcggcgcaaggagcagagcaagggcacaggaccgcaaggcagagtcattgacgtttcaacgccgagaaagatacaagatgcgcccgccggaatagacatgttgcccgcaggcaaggtatttcccatacagattggctcggagctattcagattgtctggagcctcgctctcgtcggatgcaccttcatacttttcccattttttcggccagcaactacacgataacggaggtcgcgctggtgacgtgaggaccttgtatatcgaccgtgacccagaaacgttccgtgacattgcgctgcatttacagggctatcacatcactccgaaagacggcgagcattttgtcaagttgtatgctgatgctcaggtttactcattacctcgacttactaaaca

SEQ ID NO: 102935 - DNA, 144 bp, Zea mays
  Clone ID: MRT4577_25385C.1
accgccatcgcgcggtgtccggtgcgcccccggcggcccttgcctacattgttccattggccagaggctgggcaccttggagacctgatgcggttatgagtacgaccgggcgtggacggaattcggatctacggattttcaagg

SEQ ID NO: 102936 - DNA, 270 bp, Zea mays
  Clone ID: MRT4577_25386C.1
ctgccccctgcccccctcccatcgtcgccgccctcctcatccaccgcgcgtcgctccgccggcagcccaatgccatgcatccgccagcctctcgcaccacgcgtatcgcgggcccgcccgaccggctcgtggcgagggcgtaccgggcggtccacgactacgactacctattcaaggttgtgctcatttgggactccggcgtcggcaagtccaacctgctctcgcgcttcacgcgcaacgagttcagcctcgagtccaagtccaccatcg

SEQ ID NO: 102937 - DNA, 452 bp, Zea mays
  unsure (1)..(452): unsure at all n locations
  Clone ID: MRT4577_25387C.1
ctccacacgcccgatttggcaaaacccgagctgagaccgccaccacaacaacagggcgaaacaagagggcacgacggaacatcatttgcagggaccaggaagcggagcggcacacaaacacccagacgggccgggagcagaagacattttagcacgccatgaggacgccgccgggcaccgagccggacagccggccagagcacacgatgaacaactgcaagaaggacaggttcaccacctgcgcggggataccgccgaagacggcgtagaggctaaccgccagcgagacgagctgctccggcagatccacggcggacaggatgaacctgagggcgacgcgcgagaggtccatctgaggcaccagcttcgccaggccgaacaggaccgacncgccaccggcgaaagcgccgagggacaggtcgacctgcacgaaggccaccgcagagaacgca

SEQ ID NO: 102938 - DNA, 321 bp, Zea mays
  Clone ID: MRT4577_25388C.1
caaaagctgctagcctgtatcctgctacctacactgattcacctaaggcattcacagatggagcgtatgatcgacagtttatgactgcctccaccagcatctgaaatccacactgatgaactgcgctaatatacatgaacaggactgcaagtctatgttatgcataggatagcacctacacatatgatgaacagtcaccgtcagacaggccatacaccatcacactggaagccaacagatccagacgaggctctcggacacggcccacatgcactggcacatactgcagtcaggctacgttcacccgatcacaaaacgtac

SEQ ID NO: 102939 - DNA, 156 bp, Zea mays
  unsure (1)..(156): unsure at all n locations
  Clone ID: MRT4577_25389C.1
tcgcccacgcgttcagtggtacgcgttgtgcatactacaacatactttgagctagcaggaggggtgttttctacttgtgagggatcagcantcttcttctcattcaactcaactaggctgtgattgagactcttgcttggttattttgcatacaac

SEQ ID NO: 102940 - DNA, 589 bp, Zea mays
  Clone ID: MRT4577_2538C.1
aggataaactcattgataaacctcagatacattccacatttaccgtgccctctccacgctcgttcgcgatccagcgtcgtctgctgcccgtctgcctgtctccctctcccctcgcgggtgaccgagataggcctacatcgcacggatctgcgctcctctccttccacagggccggcgaggcaacttggacagagtatctatgttatctcaccggatgaggaaggtctagatacttctcggcctgctcttctgcctcatgagatctgccgcgtgccctggcattatcgtgaccacacacttccatagtgacaatgcgaagaatatgcgtgtgcttccatgaccatactgacaattgcgacgaatttgatttcgctgaactcttatatattctgtggacacatatgatattgagaatagtcaccaacaacaattagatattagcgattaagatactaccctacaaacgatctccacaatagaggacctctgtaagctcatgtacactcttcccgctcgcaaatacccagtctacacctcctatatcgatgatctaccaatctatgcctatgccatgatctacgctgctatg

SEQ ID NO: 102941 - DNA, 344 bp, Zea mays
  Clone ID: MRT4577_25390C.1
gaaccgcgccggaacggccgggacgacccaggcggacccacgcatccgcaaaaacagaggaagcacagagcagcacagccagaggagggagcacacgcaaacaggtagggagacagcgggagatgaaaccaggaacagacaagcgccagaggcataccctagggaaagaaaacgccggacgaacggtgaaggcaggctgccaccagggaaaccgtgacgagtgcaacccaagaggaggaccagcacagaggacaggctacagcagcacgaacagaagggaacccgacaacacagagtcagcgcaccgaggcgccagccataacggaaaggaccaaaggagccac

SEQ ID NO: 102942 - DNA, 605 bp, Zea mays
  Clone ID: MRT4577_25391C.1
ccggccgggatcccctacaaacaccttgaggactattacctttccaaaagcattctagtctcgctactttaaatcttcaattgaatcggccatcgacacaatgcctcttaccggcagctgcatgtgtggcgccatcgcttacaagagcaccactgaccccgatgttactgctctatgccattgcaccgactgtcaaaaatggactggcggtgcctttacttccaacgctgtagtccctgaggaatccttcagcattaccaagggtacccccaagcaatacgacgtcacaggcgcttctggcaagattaatcatcacttcttctgtggtgattgcggttcaagcctgtacactcgccttgacattatggagggcaagatcattatcaaggccggtggtcttgacgagggcaaggctaacctggacaacaagattggtgtcgagttttacacccgtgatcgtgttccgtacattcagcctgctcagggagcaaagcaagaacagatgtttggttaagccgcgagtcttcgcttactagattagtagatagatagttggtataaataaatagcatacttccaaaaaaaaaaaaaaaaaacccgcggcc

SEQ ID NO: 102943 - DNA, 1405 bp, Zea mays
  Clone ID: MRT4577_25392C.1
gaaaaagggaaaaaagtcaggcgtcgggtcctcagtcgtagcggcggcgatggcgcgcggcggcggggggcggtcgaagaaggaggatgaggaggagctgcggggggcgaagcgcggttacaaggaggcgtcggcggagggtaatcgggaggaggaggcgcgctgggctaacgtcatcggcgacatctacaagcgccgctgcgagtacgtcgaggccctccggtggcttcgggcggactacgaggtctccgtaaagcacctcccgcagcggcacctcctcccctcctgtcagtcgctcggcgaggtctacctccgcctcggccgcttctcggaggcgctcacctaccagaagaagcatctacagctcgcaaaggagtctgatgaccttgttgagcagcagcgagctaccacacagcttgggagaacataccatgaaatccttctaagatctgaaaatgaccatagtgccataaggaatgcaaaaaagtactttaaatcttcgatgaagctggcaaggattctaaaggagagatccccttcccaaaagtcggactttctaaaagaacttattgatgcgtacaataatatgggcatgcttgagctggaacttgataattttgaagaagctgagaaactacttatccagggcctgaagatatgcgacgacgaagaggtagattcgtatgatgatgctcgcactaggctccatcataatctcggaaatgtttatactgaactacagaattggaaaaaagccagggggcacattgagaaggacatagagatatgtagaaaaatacgccatcttcaaggtgaggcaaaaggattcataaatctgggggagttacattatcgagttcagaagtatgacaatgcaaaactttgttacaataaagctcttgaagtagcaagatccttggaagatgaggatgctctaattgaacaaattcaccagaatattgaaactgttacgaaagcagttgaagtatttgagcagttgaaggaggatgaactgaagctaaaaaaacttatccgggacacttctaatgctcgtggaacatctaaagagagaaaactcctacttgatcagcatgcatggctggatagtcttattgagaaggccaggatgatatgtgcatggcaaaaacacaaggaattctcgaaagtgaacattggcaatgttcttgattcttgtggcgactgggctggtgcattgcaagcttacgaagaaggctaccggattgctgtggaagcagacctacctaatgtgcaactttctgccctcgagaacatgcattacagtcatatggtcagatttgataatatcgaagaagccaagaaaatgcaggaaaaaatagacaatctgaagcaaacactgaatcaatgtgaagcagcgacagcaacg

SEQ ID NO: 102944 - DNA, 300 bp, Zea mays
  Clone ID: MRT4577_25393C.1
gtggaccacatccttgatcgcgctactatctaccatgacttcacaaacatccttccgaagaattactgacgattcgcgatctatcatatctactctgttactgcaaatgatgtccaaacaaccactatcttctatatcctatggtccccatcctccaccaaggtgaacagcaacatgctttatgcaagctcaaaccataaattcaatattgtcctcaatggcattcaccttgaactccaatccacatatgctagtgaaatcagcctcgatgagatcaaagatcttgcacactatgcacac

SEQ ID NO: 102945 - DNA, 468 bp, Zea mays
  Clone ID: MRT4577_25394C.1
gggaaggggggattaaatttttttttttaaaacattgggggggcgaaacagtccaaggggggggactggcccaaaattccctttaccctaggttactggttcttttgttttgaccaaagagagggaaaacttggggggatcaaaatttccccccaaaaaatgcccgtttaagctttaaaaatcccccagtttttggggcaaaacccgaaagggtttttggccccaaccttgtccggggggttcctgggggcctccccgttggccccccttttaggggaaaacttttttttgtgggaacacggggggtccccccccccgtggggggggtttttgaacaacctggcggggatcctttttgggggggacctttttttgcccttgttccccgggcggctcccggggaaattgcctttttcggttggggggttgccgggggggtttaaaaaaagaagggggggttcctttttt

SEQ ID NO: 102946 - DNA, 297 bp, Zea mays
  Clone ID: MRT4577_25395C.1
accgattttgagcattcaaaaacactccttgttaagcgcactagcaacaacctagcgggagatgtttaccaatatattagccctccttgcgcttcttgccttatttgtgagcgcaacatatgcgatcataatatccacattgctcacttgcttctagtgccaaaaaatcacattatcttccaccatttttttcaaagatgattttaacacccaactgtttataaacaaaatactataactagcgcattgtgtaagcgttttacaacaaccaatttcccaatttgcatcaacaatcct

SEQ ID NO: 102947 - DNA, 386 bp, Zea mays
  Clone ID: MRT4577_25396C.1
gggaacaaaaaaaagggggcccacccccgggccccgggtaaaaagaaaaccccgggggggcgggggggggggcaaaaagggcgtcgccaaaacgaaagcgggctatgaaaaaacaaaaccaaaggggggggagaaaccatttttttccgggggcaaaggggaaagggtaattaagggggtccaagagataacccccccgggcgcctggacagggggcaaaagggtgggtccgggagcaaccttggggagaggcccaggtttaaggggagaaatgcggaaaaggagaaacccgcaagaggccgcggggggccgcccgctctcttttaaggaagaaggggaggggggggggggtatagaggcaaaaagaaaaaccctgcggggggggg

SEQ ID NO: 102948 - DNA, 3854 bp, Zea mays
  Clone ID: MRT4577_25397C.1
gtcgacccacgcgtccgctaggatcaaaaccgtctcgccgctgcaataatcttttgtcaattcttaatccctcgcgtcgacagcgacagcggaaccaactcacgttgccgcggcttcctccatcggtgcggtgccctgtccttttctctcgtccctcctccccccgtatagttaagccccgccccgctactactactactagcagcagcagcgctctcgcagcgggagatgcggtgttgatccgtgccccgctcggatctcgggactggtgccggctctgcccaggccccaggctccaggccagctccctcgacgtttctcggcgagctcgcttgccatggagggcgacgcggacggcgtgaagtcggggaggcgcggtggcggacaggtgtgccagatctgcggcgacggcgtgggcaccacggcggagggggacgtcttcgccgcctgcgacgtctgcgggtttccggtgtgccgcccctgctacgagtacgagcgcaaggacggcacgcaggcgtgcccccagtgcaagaccaagtacaagcgccacaaggggagcccggcgatccgtggggaggaaggagacgacactgatgccgatagcgacttcaactaccctgcatctggcaatgaagaccagaagcagaagattgccgacagaatgcgcagctggcgcatgaacgctgggggcagcggggatgttggtcgccccaagtatgacagtggcgagatcgggcttaccaagtatgacagtggcgagattcctcggggatacatcccatcagtcactaacagccagatctcaggagaaatccctggtgcttcccctgaccatcatatgatgtccccaactgggaacattggcaagcgtgctccatttccctatgtgaaccattcgccaaatccgtcaagggagttctctggtagcattgggaatgttgcctggaaagagagggttgatggctggaaaatgaagcaggacaaggggacgattcccatgacgaatggcacaagcattgctccctctgagggtcggggtgttggtgatattgatgcatcaactgattacaacatggaagatgccttattgaacgacgaaactcgacagcctctatctaggaaagttccacttccttcctccaggataaatccatacaggatggtcattgtgctgcgattgattgttctaagcatcttcttgcactaccgtatcacaaatcctgtgcgcaatgcatacccattatggcttctatctgttatatgtgagatctggtttgctctttcgtggatattggatcagttccctaagtggtttccaatcaaccgggagacgtaccttgataggctggcattaaggtatgaccgggaaggtgagccatctcagttggctgctgttgacattttcgtcagtacagtcgacccaatgaaggagcctcctcttgtcactgccaataccgtgctatccattcttgctgtggattaccctgtggataaggtctcttgctatgtatctgatgatggagctgcgatgctgacatttgatgcactagctgagacttcagagtttgctagaaaatgggtaccatttgttaagaagtacaacattgaacctagagctcctgaatggtacttctcccagaaaattgattacttgaaggacaaagtgcacccttcatttgttaaagaccgccgggccatgaagagagaatatgaagaattcaaagttagggtaaatggccttgttgctaaggcacagaaagttcctgaggaaggatggatcatgcaagatggcacaccatggccaggaaacaataccagggaccatcctggaatgattcaggttttccttggtcacagtggtggccttgatactgagggcaatgagctaccccgtttggtctatgtttctcgtgaaaagcgtccgtggattccagcatcacaagaaagctggtgccatgaatgctcttgttcgtgtctcagctgtgcttaccaatggacaatacatgttgaatcttgattgtgatcactacattaacaacagtaaggctctcagggaagctatgtgcttccttatggatcctaacctaggaaggagtgtctgctacgtccagtttccccagagattcgatggcattgacaggaatgatcgatatgccaacaggaacaccgtgtttttcgatattaacttgagaggtcttgatggtatccaaggaccagtttatgtcggaactggctgtgttttcaaccgaacagctctatatggttatgagcccccaattaagcagaagaagggtggtttcttgtcatcactatgtggcggtaggaagaaggcaagcaaatcaaagaagaagggctcggacaagaagaagtcgcagaagcatgtggacagttctgtgccagtattcaaccttgaagatatagaggagggagttgaaggcgctggatttgacgacgagaaatcacttcttatgtctcaaatgagcctggagaagagatttggccagtccgcagcgtttgttgcctccactctgatggagtatggtggtgttcctcagtccgcaactccggagtctcttctgaaagaagctatccatgttataagctgtggctatgaggacaagactgaatggggaactgagatcgggtggatctacggttctgtgacagaagacattctcaccggattcaagatgcacgcgcgaggctggcggtcgatctactgcatgcccaagcggccagctttcaaggggtctgcccccatcaatctttcggaccgtctgaaccaggtgctccggtgggctcttgggtccgtggagatcctcttcagccggcactgccccctgtggtacggctacggagggcggctcaagttcctggagagattcgcgtacatcaacaccaccatctacccgctcacgtccatcccgcttctcatctactgcatcctgcccgccatctgtctgctcaccggaaagttcatcattccagagatcagcaacttcgccagcatctggttcatctccctcttcatctcgatcttcgccacgggcatcctggagatgaggtggagcggggtgggcatcgacgagtggtggaggaacgagcagttctgggtgatcgggggcatctccgcgcacctcttcgccgtgttccagggcctgctcaaggtgctggccggcatcgacaccaacttcaccgtcacctccaaggcctcggacgaggacggcgacttcgcggagctgtacatgttcaagtggacgacgctcctgatcccgcccaccaccatcctgatcatcaacctggtcggcgtcgtcgccggcatctcctacgccatcaacagcgggtaccagtcgtggggcccgctcttcggcaagctcttcttcgccttctgggtcatcgtccacctgtacccgttcctcaagggcctcatgggcaggcagaaccgcaccccgaccatcgtcgtcgtctgggccatcctgctggcgtccatcttctccttgctgtgggttcgcatcgaccccttcaccacccgcgtcactggcccggatacccagacgtgtggcatcaactgctagggaagtggaaggtttgtactttgtagaaacggaggaataccacgtgccatctgttgactgttaagttatatatatataagcagcaagtggcgttatttacagctacgtacagaccagtggatattgtttaccacaaagttttacttgtgttaatatgcattcttttgttgatataatttatactttgtggagagttgctgacagacgagttttgtatgctacgaaaaacaaagaaattagtttgcattctttcactttggtgcatctccatgagaaatt

SEQ ID NO: 102949 - DNA, 116 bp, Zea mays
  Clone ID: MRT4577_25398C.1
aatgacgcacggtatcgccgatactttcgattgcactgtgaccaaagttccagggaggaaactgaccaacttgatagagacctagtggatgcgatgcttgaggaatgagctggaca

SEQ ID NO: 102950 - DNA, 398 bp, Zea mays
  Clone ID: MRT4577_25399C.1
gcacggagccccacgggggattcttttaaaagggaatggggcaaaccggggcccaaaaggacaggggaaaaggtttgggggccaccaaaaaaaaacccgggtttgggaaaaaaaaaaaagggggggccggaaaaccggaaaaaaactttggcctggccaagggaaaacccccccccaaggggaaaaaaacccggggggggggggggcaaaaaggggccccttggggggggacttttggggcccaaaaaataaaaagaattccctgggcccgaagggggggccaaaattgcagaaataaacctgggaaaaccaaaatggttggaaaggggctgaggaacccccgggggggacccccaaaacaaaaaaagggatttttttttggggggagaaaccccctg

SEQ ID NO: 102951 - DNA, 1384 bp, Zea mays
  Clone ID: MRT4577_2539C.1
gtcgcgtcgcagacctgggagaggagcaggagcggccagtcagcggagcggataggaggcaggaggagtcgcgccggagatggacacgcccgaccgcgccgccgcgcagtccgcggccacgcgcaccgaggactcgccggtgttcagcttcctcaacaacctgtcgcccatcgagcctctcaggtcgtcggcctacagcaccaacagcctccaggggttccagtccatcaacatcacgtccatctcctccatcttcacctccccgcacgacaacgtgagcaaggaaccgaggttcccaaagagcccgcttggtgaaatttctgacaaggaggttcgtgccgacgccgccggtacgaacgagccacccgagccttcgaacgcggccaggttgtttgcctgcactagcaccgtgactcgagaaacgcgcacgggtacatgtacgggcgtggctggtcctcctcccaccaccggggggccatgtgatctggccctgcctcgtcagttcgacaataacggcagtccagaccacaacacgacgccctgccacggtgtcaggtcagaccttaaacaggacaaggctaggaagctgctacaagctgcacagaacgctcacgatggagcgccatcacagaggaagtgcttgttttccaccgaagtccggctcctggatggcggcggcggcggaggcgagcccgggagtgacagcgatggagtcttgggatgcgagtggtccgacttagtctccccgacctcagcgaagcttttggccttcgacgccacgatggacgagcatcacagaggagtgcatttggcggctcagaacgcagagtcgtgtgggtatttgctgtcgaaacttgccggagacggtggcgtatcggacggagcatatcctactgcgtctgcccaggtatactatcaggaacttgtgatgggagacgatcagtcagagaacgccgctcctcaaatggatgctcaggaaaccatctcagccgaagaaatccaggataatatctatgaagcggatgtgtgtgttccattagagtacaaggtagtggagagccaacagcagcgtggcatacggagacgctgcctggtcttcgaggcagctggtttgggttttctaatagcgctgtgaaaagggggactattgaagatcgctcggtctcaacatgtagtaagggcaaaagccctgcgcaaagccagccgcgcggactgcgaggcatcgggcttcatctgaatgcgcttgcgttaacaccaaaggggaaaatggcctgtcaggatcctcctcctacggcttctgctctccttccatcgtcagcgtcgggaaaggatgcgcggggcgagctgctttggcaggagagaattcgcacactgggcgggagct

SEQ ID NO: 102952 - DNA, 670 bp, Zea mays
  unsure (1)..(670): unsure at all n locations
  Clone ID: MRT4577_253C.1
cattgggtacctcgaggccggccggngacctcgagacacgcacgagactagagcgtctgtcgaactcgggctagtctaccgcgacccgcagcgatcccgcttctcccattcttctctcattgctcaccagccgacaccgctaccccctttgaagaagaccatgagggagtgcatctcgataccagatgcgtgcaaaccagcgtatccacgtgctgaaacgcgtgctgggagctgcactgcctccagcatggcattcagggtgatggacagatgcccggtgacaagaccattgggggaggtgatgatgctttcaacaccttcttcagtgagactggcgctggaaagcacggcccccgagatggttttgctgagcttgagcccactgtcatcgatgaggtgaggactggcagctatcgacagctcttccatcctgagcagctcatcagtgggaaggaggatgcagccaacaacttcgctcgcggtcactacaccattgggaaggagattgttgacctgtgccttgaccgcatcaggaagcttgcagataattgcactggtctccagggcttcctcgtcttcaacgctgttggtggaggaacgcgctctggacttggttctctcctcctggagcgcctgtctgttgactatggcaagaagcccaagctcggtt

SEQ ID NO: 102953 - DNA, 174 bp, Zea mays
  Clone ID: MRT4577_25400C.1
aagcagggtcggggtggccccacattacccacaaaccggcataatggtgacccacgttatcaggatgtcatccttaacgccacaccgtatgtcaatactgccgttgggtttaaacgacctggtcttgcctaactatcactgtcagatttatgccattacagatctatgtcagca

SEQ ID NO: 102954 - DNA, 978 bp, Zea mays
  Clone ID: MRT4577_25401C.1
ctcgaggccggccgggccgggagccaggagccagctactccatccatcacccccttggcaacaggcattgccacccccacagccacaagacagacagccacgcgcgcgaggcgctccactcaagctcagaccactctacctcgctctcggccatggcgtcaggggaagcagagccgctgcagtacacgaccaccgcgctgcgggtgtccatccactgcgagggctgcaggaagaaggtcaagaaggtgctccacagcatcgaaggcgtgtacaaggtgacggtggacgcggcgcagcacaaggtgaccgtcacaggcagcgtggaagcggccgcgctcgtccggcggctgcacaaggccggcaagcaggcggcgccgtggccttcgccggcgccggcgccggcaaacgtcgagaccaacaagtccgcgcctgctgcgctgccagcccgcgccgcgggagggcggcgccaaggacaaggacgccgcggacaccaagcccaaggacaaggcgtttgaggccgacgccaaggagaagaaaccggccaaggacaagggctcgggcaagaatgccggaccggccgaggccgcgcacgcgaaacccggcaaggacgtggccagcagcgacgccgccgaggtgatcgcggggcctaaggagacggaaaagtcctcccctgagcctggggcggcgaagccagacgccgccgaggagcccaaggacggcggcgagggcaggaagaagggcaagaagagtaagaagaacaagcccaaggacggcggcgagggggaggccccggccccggccccggccgcagcttccgagaagaaggcgccgcagcagccgtcggctgcgccagcaccggagcctggtcccgaccgcccgcacggcggcgccccgttcccgtgctacgctgcgcagccggtgcttagctacaacgtggcgcacccgagctccagcgtgtcgtactgcgcgcccacggca

SEQ ID NO: 102955 - DNA, 415 bp, Zea mays
  Clone ID: MRT4577_25402C.1
ggggccaaagaaaaggaggcctttccccaaattaaatcctaggaaaaaaggtttttaaagaactcgggggggggggggggtgccgggggcgaaaacccggccaggcccgaaacgcggggaaaggggaagggggttttgggggtggccattcggaagggaaacgggtcaaggggggtaaaaaccaaaccaaaaccaggggggggaaagggtccatttgggcgagggggcaaaaacgaaaagaaggcgctcttatttaaggtttggtcgaacaagcgggcttaaaggggaaaaaaaagctttctcgtgggggttgccccaaaaaggttaacaacccggggaacacaaaagatccaatggagaaagggggttcccaaaataattttgggcgaaaaaaaaaggctagatctgcgttggg

SEQ ID NO: 102956 - DNA, 882 bp, Zea mays
  unsure (1)..(882): unsure at all n locations
  Clone ID: MRT4577_25403C.1
gatccaataaaaggcgagaggttattctacgcaattcaggtatgatggtgaattacatacntcttacgtactactatgctgatcatactactggtagtacaagttggtatgacctagggcctgattaaaaagggtgtatatatagttgtctanactgatggtttaattcctcagagtttaccgtgaacaaatttaccgcgagggagagaaataagntctgcatgggctctgtngtngctgtgtacnatttaggatcgtaaanaatgcgcgcgccgccaccgatccaccccccggcccgtgtgcgaagctgcggcgtgcatgcggccggcngctctcattagcgctcacttagccgtcacttgaatccgccggcggcgctgccgtagtctctagccgccgcgtcggggccgaccgggttccagtcccagatcttgtcagatatggcggccagggacaggggtagcgtcccgagcgccgccattggctgctgcgacgacggtgtcgtcggcagggggaggacgaagccgtggccgtggccagcggcggcggcggcctggtggttgaagtacggcggcgcgccgtggacgtgcccgaccagcgcgctgagctcgtcgatggccgcggcggacccggacccgcccatggaggcggcgttcaccaggctgagcagcgagtacgtggacgcggtggccagcgcgtagctcgcgtttctggacgacgacgacgacgtcgacaccgccgcggctcccgttcccgcctgctgctgctgctgctggtgatggtggtggtcgacggccgcccccacggcagagccagcagagctcgctgtggacagctgctggtagccgctgcagtacggcttcgtggggaggaactgagact

SEQ ID NO: 102957 - DNA, 552 bp, Zea mays
  Clone ID: MRT4577_25404C.1
tatacatttcatttaggtacgataattaattacgtgatgcggaggacaagagccaagtcgaccccaagcgcgggctactttgcatggtgatgctaatggacaagcctgcctgatcaagtgctaggacaaggacgatcgtcaagtggtcgccacctaacaaacactaacatagtgtttattccaggttatagctttgtgttgctgttgatggttttaagtgccggtgggctcggccttcttataagtctaagtaactcttctatacttcttattgaggatggtcacttgagctagcatatatttcaaacttataaataatttataacatttcaaagtttatttctttgaatcactattgtaatcactccgataaacataaagtaaacttgatgtaacttgtagaatttggtaataagatttccgctgcaaaaagtttgtgtgaaaaaaaaaaaaaaaaaaaaaaaaaaaaaaaaaaaaaaaaaaaaaaaaaaaaaaaaaaaaaaaaaaaaaaaaaaaaaaaaaaaaaaaaaaaaaaaagggcggccgttttaa

SEQ ID NO: 102958 - DNA, 739 bp, Zea mays
  unsure (1)..(739): unsure at all n locations
  Clone ID: MRT4577_25405C.1
agtttcactcccgcactcacacttccgccaccttggcctcctcctccatagctagctagcaaagctgagctagtagaaggtagcagccacccacagccacagggccacgatggcgtcgaccgcctccttcctcccgctgctggcgctcctgctggtggcgacggcgcattgctcgccgctgccccagcggtgcccgcaggcggaccggcaggcgctgctccgggtgaagcaggcgctgggcagcccggcgacgctgaagacgtggtcgccggcgtcggcggactgctgcgcgtgggaccacctcacgtgcaacgaggccggccgcgtgaacaacgtcttcatcgacggcgccgacgacgtgcgcggccagatcccgtccgcgctggcggggctgacggcgctcatgtcgctctcgctcttccgcctcccgggcctccagggctccatcccggcctgcctcacctccctctccaagctcgagttcctcaccgtctcccacaccaacgtctccggctccatcccggagtccctggcgcgcctccacagcctcgactccgtggacctctccaacaacaagctcacggngtccatccccaactccttcgccgacatgcccaacctccggtcgctggacctccgccggaaccagctcaccgggcgcatcccggccagcctcgtgcaggggcagttccggtcgctggtgctgtcctacaaacagctgacgggcccgatcccgcgc

SEQ ID NO: 102959 - DNA, 532 bp, Zea mays
  unsure (1)..(532): unsure at all n locations
  Clone ID: MRT4577_25406C.1
cttaatccacaanattttgtgcaagcattaaggaagcagtatactggacacatcacacgaggcatcaatttaacaagattagactctatcacattactacatgacatacaagagaatcattgcgaatattatatcatccaatccattagattaattaataggagtagcgagcacattattaccaatcgttccaaaaacgacgatgccttcgtgggtgaggcgttttgtcgagcaccaggtgagcttcacacaaacttcattttctgcttctatcaaactccactcgtaaccaaaccaccacccatgcagaccaacagaccatcgagaccaagcgatgctgaacagtcttcacggtgacgagagcgagtgggacgatggcgaggtccgatgttatagcagagaccaacggcgaaccccgtgttgagtacaaggaatgacgacatcgagctaagattagagacgacagcggggtgaggcgagcccgcggcagctgacatgcttaacgaccacagacgcggctggagagggagcc

SEQ ID NO: 102960 - DNA, 319 bp, Zea mays
  Clone ID: MRT4577_25407C.1
cgtccgcttcggcctaagctgccaatcagctgatcaattctaccaaggaatcatccaacacatgcgggctcaagataactggggaaggggagcgttttaccaagaccaacccttatactgcccttgtatactgctgcactcctcactaaaaacctttacctccataacagatatatatatctatcgtgtactaacttctaacatttttttagctttggaactaacagacacttgtattatagtgcataaaatacctatccccctccgtggccatataacccttaagtcgatctatcttttaatgaggcgtttgacgtaa

SEQ ID NO: 102961 - DNA, 240 bp, Zea mays
  Clone ID: MRT4577_25408C.1
cccacacgtccgaacacttccaatctaacattaccttatacaaccacaaaaagggggacctgagttcatttccatctacccgatcctttaatcaaccaaaaaaagaggcattcttcatatttcccttcgctctacatatttcatgcttactatacctttcatactatctgctacttcttatataatctcacctaaattcactttacctgcccttctttaatatctttctgactggcaaaa

SEQ ID NO: 102962 - DNA, 517 bp, Zea mays
  Clone ID: MRT4577_25409C.1
aattcggcacgaggctatattcatctgttccctttggtttatgaggacaatttctctttattgtggatggatgagagagaactatgttcctactttttgggatgcaattgctccacagctcatgacacatttgggctgctattttaccccgtgaagtgtgaactccaaccaggcctcttaagttagagttagctaatatcccgaattacagaaaagcaggtggttacaccaacagataatgaactgatagttgttggagatggtcattcaggtaccatatctgttcgtgcagctggtaacgaccttataagaccatttgatgttgctgttgttgtacccacttgagctagacccttttccatcgtacgcaacaaattgattatatgacatactgatatttcatgtcagaggatcaatctctttcagttaggaatcgacagatccaagatgtagaaaactctactttttgtagcactactcattctctttttattaactactctctttttatacatgc

SEQ ID NO: 102963 - DNA, 168 bp, Zea mays
  Clone ID: MRT4577_2540C.1
tttatagggaaacaaaaggtaaaaaacattgggttggcgtaaaaaaaacatggtgacttgaaaaaccattgttttacctaaaattaagaggccagaagaaaataaacccttcttgccagctcactctttttcaaaaatgccccccccaattagaccttcccaaaaatt

SEQ ID NO: 102964 - DNA, 494 bp, Zea mays
  Clone ID: MRT4577_25410C.1
tttctcgttattgtggatggatgagagagaactatgttcctactttttgggatgcaattgctttacagctcatgacacatttgggctgctattttaccccgtgaagtgtgaactccaaccaggcctcttaagttagaattagctaatatcccgaattacagtgatggatatgttcacgcatttgctgtttacagaaaagcaggtggttacaccaacagataatgaactgatagttgttggagatggtcattcaggtaccatatctgttcgtgcagctggtaacgaccttataagaccatttgatgttgctgttgttgtacccacttgagctagacccttttccatcgtacgcaacaaattgattatatgacatactgatatttcatgtcagaggatcaatctcttttagttaggaatcgacagatccaagatgtagaaaactctactttttgtagcactactcattctctttttattaactactctctttttat

SEQ ID NO: 102965 - DNA, 357 bp, Zea mays
  Clone ID: MRT4577_25411C.1
tcccctacacattttttggctaccggagcccaatccagtaccttaagtatgcgccatgcctcgccggttaattaggcggctgcgtctgcctatatgtgcaggctgcaggatgccatgctatgggcctgcgcgcgcgttgtcggtgctccgaagatcacctgacacaggaacgctggtgggatgcgctctgttagcatgctggtcaactgacttccgacgccaccgtggcagggacctggaccaactctgcttgcatgttgcgccacgataagacgaggtatacgacaacaagcctgatgacgggactgaaataggggacaagaacaaggacctggtacaacacgagcatgacccaac

SEQ ID NO: 102966 - DNA, 439 bp, Zea mays
  Clone ID: MRT4577_25412C.1
cactacaaatattaactatataataattgaaaaacaaagcagaactcattaaaaccttaagatcctatcagtacatgtaatttgggctgctattttaccccgtgaagtgtgaactccaaccaggcctcttaagttagagttagctaatatcccgaattacatgtactcattaaaaccttaagttcctatgagttctgctttgtttttcaattattatatagttaatatttgtagtgatggatatgttcacgcatttgctgtttacagaaaagcaggtggttacaccaacagataatgaactgatagttgttggagatggtcattcaggtaccatatctgttcgtgcatctggtaacgaccttataagaccatttgatgttgctgttgttgtacccacttgagcttgaccccttttcatggttcacaacaaaatgattat

SEQ ID NO: 102967 - DNA, 389 bp, Zea mays
  Clone ID: MRT4577_25413C.1
cggtctgagccaatggcacggtcctttgtggctcgaacgccctaacgtgggttgtttcggtcgtgtagcataggcaccggttgctttcttggattctgacttatatgcgttcagttataatccggtacacggttgctttgctccactgttttttcaactatgctctatgaccaattgtgttaatcaacgtatcctctcgtactatgttgaattactatcgcttctcggtcattatttgggtaaatctaacctgttttacgactgtctaaactcttctcacgtttcttattgttgtgtgaacaatccatcacttggtgtatttatttttaatattattcttaaattttcgtctttttattatctttaattattgtctttattaaaatttt

SEQ ID NO: 102968 - DNA, 1620 bp, Zea mays
  Clone ID: MRT4577_25414C.1
cattgggtacctcgaggccggccggggttccaattccacagatttccgctccccactccgcactcccagtacttaaaccacctaaaaaccaagcaaaatcccacctcccgaaccctggactcatagacaaggaattgggagattcgatttctgctattcagcccacgcccactggttcaaccggtttcttcaaatctcaggcttcaaggccgcaacttttcccccgttggggttggacttggacagctgccgtgcttgggaggcattgccggcaacgggaggtccaatcatcgatccttcggtagattggcgttttttttacttaaataccatgtttcatccattgcaaaaggcactgggaaaaaatgtcgggtattacttgggagggactagagagggaggagcatcccattgcaaagttaatttctgagtgcaccttccatgcctatgatatatgagctcagatagattgtatataaggaccacggttcagattactgtcaagcatgtctctactttcaaagttgcgcttgatcaccgtggatgttactggtacactgattgcttacaaaggacaccttggggattactactgtatggcagcaaagtctgctgggatgccatgtcctgactataaccgcatgcatgagggcttcaagcttgcatacactgagatggcaagacagtacccttgctttggatttgcagctaagatgccgaacatcgaatggtggaggacatgtgttaagaattcattcgttaaggctggctatgattatgatgaagagacatttgagaaagtcttcaggcgcatttattctgcatttggctcctctgcgccatactcggcgtttcctgattcgcagcccttcctaaggtgggcacgcgaaaagggactcactgttggcatcgtcagcaatgcagaataccgctacaaagatgtaatcctgccagctttaggattgaatcagagctccgaatgggactttggggtgttctcaggtgtcgttggcgttgagaagccagacccaagaatttacaagatagcgctggagatggcaggaaacgtcgctccggaagaagcgctccacataggtgacagcatgcggaaggactacaccccagctaggagcatcgggatgcatgcgctgctcctggaccggttcaagactgccgacgctgagagctggaggcagtcaggcgccacggtgctcccggaccttgtcgccactcaagagtggctcaccaaggatcagaatgacgaacaggaggaaacagtggcagcacgagtgctgaagagaatgtccgaaaagctatagatgggggctttaaccatgcattaattctacgagtgttcctttatattatctagctatggactgaaggtccaaaagcaacttatgctgatgagaggttggtgacgattcttggctactggctactgtaattagcttgagctactattctggttgcagcatctgtggctgaacacgagtaccatatctgagtgtcataagtcatgttgcgaagaacatgagtagcatatttcaggtgccgtttggttcatatatttgtaatgtaatgggtaacggataacgttaaatcggaagggtccgcgat

SEQ ID NO: 102969 - DNA, 327 bp, Zea mays
  Clone ID: MRT4577_25415C.1
tgagcacacaaaccgagaggtacttctatggctaaaacaatgggactccattgtttttggatcccatattcgggctacaggtgatgatgtcttgtctgccttacgtcgacactcttcaaccatccaaaagaatgcaagtaacagaaatttcttttccaagagtaaggggggtcctgttgcaagtcaaactggcacacctctgaatgcacaaagcagcaatccagaaggtttaggtggctccttcagcaaaaagtcatcagttgataatgcaccagaacaaaaggtgttgctattatgcggtccacctgggctcggaaagaccacact

SEQ ID NO: 102970 - DNA, 563 bp, Zea mays
  Clone ID: MRT4577_25416C.1
actacccattcgactgtggcattggctgatggtagacatgctgtcctacattctgaccatgattacatacaccaacacataggaccacgtcttgcggggctgctaatcactctggcaaacactgctggagttctggcaacagttgtcggtgcttatatcactgactacattcttcagaatggtgcttggaatagggtggttaaggtgtccatagtgtgaaccatagtatgaactgtggtttgaaatgtatataaaactgtagagaaaactgtcgacatacctatgtacatttctatataccactatactgaactggatgatattgatgatgacattttggctaacaaaataaattcttgtaagaaaaacatttcataataataactacatgttatccaaaatgtgtacctgaatctgatgttagaactatatcaagaaccagatcaaattaaggtactgagtgagcacatagaaactacactaagaacttgtgcaacaaacttgcccacacagcaaccgcaccaatggcaccacatatttctgcagaagttcattgagaagtc

SEQ ID NO: 102971 - DNA, 288 bp, Zea mays
  Clone ID: MRT4577_25417C.1
tcttttacaccttgcgtgtacttctccagatgggcgtatgtgctcatgtttcggcggccagatgccggccgacaaggagcagaggattgttgaccacctcgccaagccatgggccgagccgtaccaggagaaggactgcattcagctgccaagctacaggaaccactacgtaaacggggacaacttcaccccgaagagccaccagcaggatccgcagaggatgacccgtgcatacacacagacgggggccacacttaacctgctccgcgcgttcaccagcggggggaa

SEQ ID NO: 102972 - DNA, 344 bp, Zea mays
  Clone ID: MRT4577_25418C.1
ggccgccttcgaaacccgctggaccacctggcggtttttccctactttaccaactaccttctggtgagccaactggagcacgggctggtggggcgccaagttccggggcccgcccccttcccgggtggctttgttgggttccggcccgttccggttaagttccttcgggttggcttggggcaacttcccggcggcggctttgaaaaattacaaaatttggggggacgccaacaaccgggcgcgccgcttttggcgcgccaacgccgggttggccgggggcatggggttccgaacctccgacgtggcccacgtaacccgggaactggccgcctacaacgtcgttt

SEQ ID NO: 102973 - DNA, 496 bp, Zea mays
  Clone ID: MRT4577_25419C.1
gggaaaaaccggggtggggaattttcgattttctttttttcgggcttttttcacccctgggccggggttgggtttccaaccctgggccaatccggcccccttctaatcccccccttatgggggccaaccccccaaaggggttccaaagggatcacctctccccgcttccataaaacaaaggggggtgggcccgcccctgccataattgcaacaaaataccccccccaatatccaatagggggcagggggcccaaaacctggtttccacgatttttgggaatcgggcccctttttggggggggggggttgcttccccccccccccccaaaaaaaaaatttttttcttgggacggattttgggtttttttaaacatccgaagctggtctgcaacatttttcattttggggcgtttctttatttccattggtaagcatttggcgggtagttccccaattccatcaaaaatccccaaactggtctcatttgcaactttta

SEQ ID NO: 102974 - DNA, 606 bp, Zea mays
  Clone ID: MRT4577_2541C.1
ttgggccgatgacacaaaagcgaggaaggaagaactgcacaatgaggacagaatgggagactagccttgcctattgccatcgttccactccatcttctgcttgactgcgctgcacttctacctcctatctgccgactgctaaacgacaaatatatccggttggcgcgcccactgcgatccctgccgtcactgccaccttcttcacttcgtgaatcaaagcaatgagctgtctagacgaaaggactactatggctcctactgcctacaattcttgctgctcgtcttgagacaccacacattacataaccaccaataaacatgacgacgtgtaagttatctccaacaatcagatggacaatcggagtacgaacaccgtcatctgtgtatgaaaaaagacggatcaaagaaaagacgcaatgagcctgacgctgctcaaacatctactactgaccgcacctaccgccgcaggcgatcgagaactgtgggagccaccggagtgcgggtatgctcattaaccctcgccaatgacatataacttcctaacacttgacaaaccactttccctactatagtaagacggattattttatcatacagcgcaataac

SEQ ID NO: 102975 - DNA, 594 bp, Zea mays
  Clone ID: MRT4577_25420C.1
ccccctctcgagttttttttttttttttttttttttttttttttttttttttttttttttttttttttttttttttttttttttttactcttcaaaagcagatgattcagccaagcaaatggggggatcaagcctacttaccaaacgacacatttaaaacctagcaacatcagctttggtctcccacaacctagcactaccattaggattaaacgggggcagggactgggcaaaggcttttttgccatgcttaagtttacatgcagttttttgcctattaaaaagaccagggcccccaaaagatttagcaaacaaaacacacttgcaaactttgcacttagcctgacacctaacccttacaccatttccgccgccgttgaaggaacaacaacctcactgccaccagtttgggcaggcacggggttgtcgtcggccattaagcacagatcacagagcacaggccccccgattaaaaacttaccaaagccggagcaccaaatcagtcccttaagggagagccgaagcaccaaattggtccctcacgggcggttcaactcacaaaacacaaggtaaagtagagtagattagggtttg

SEQ ID NO: 102976 - DNA, 267 bp, Zea mays
  Clone ID: MRT4577_25421C.1
aaccaaacgagcccaaggcaggggggcatctaaaaaaaaaaaggaaggggagcaaagggccatttagggagcagaaaacccggccccccccaaccgttcgggcgaagggcgggttggaccggcccacaaaaatttcaaaggcaggggcctggattggccggggcataggaggcaaaaaaagaaacggggggccgtttcagcaggaacagaagggaaaacccctgggacaggatcccaggcggggcgggaaaacattggccgaacccg

SEQ ID NO: 102977 - DNA, 291 bp, Zea mays
  Clone ID: MRT4577_25422C.1
cggacgcgtggggtttcatcctttgctgggcacgaagaaggtgactacgaacagcttgtgtcataagctcccgctgcgaaaccactgctggagatctgacctagaaatggcagcatcagtagagagccaagtgtcctaggcaaacgcccgtataagacctcaaacggcgacttgcccaacgacgagtggagagatgtattaaaccagagttcagccaggggcagccaacgggtccagtgacacgggtgggaacttacagagcatcgcgggaatgtttcgaggcactggttg

SEQ ID NO: 102978 - DNA, 217 bp, Zea mays
  unsure (1)..(217): unsure at all n locations
  Clone ID: MRT4577_25423C.1
cggacgcgtgggctccgacgtaactaggatacctgtttgttgatagtttgcatcaattacgtcggaggacatcaagaaacaagtgtccagttggaactccctttgccccannnnattgggggaaaagaaaggtgaaaatgtacctaaaattggtttgtaagacctgtaaagattttttttatgatttttatagaaaatttaaaaggggggccttttt

SEQ ID NO: 102979 - DNA, 743 bp, Zea mays
  Clone ID: MRT4577_25424C.1
ccacgccgtccgggggaagcagcagcagagagcaggccaggaacaagaacagcaatgaactcgccgccgggcgacgacggcggcggcagcgcgcacggtttattcgggtcgggcggcatccgcgggttcggctacggcgtcggcgtgtccatcggcatcctactcgtggcctccaccatcgcgctcgccatctacttctgcacgcgcacctccatgcccgagtccgccgccgcgctcgcgccgccgcggcagggcggcgacgccgggcggggcatcgacgaggccacgctcgaggcgttcccggcggtggcctacgcggaggcgaggaaggcggcggcgaaccaggcgtgctgctgccccgtctgcctcgactgctacggcgacggcgacgtggtccgggtgctccccgactgcggccacctgttccaccgcgcctgcgtcgacccctggctccggcagcgccccacgtgcccggtctgccgcacgtcgccgctgcccagccccatgcccacgccgctcgccgaggtcacgccgctggcgtccgcgcggccgtcgtgagggctgtttcttttttctctctcgcgcgttcgtgtgtctggcctctgctgctgcactctgattgcttcgtgccttcgtcccttgtgccgtttcatttctacgtacacagcacggtgtgtgatcagcgcgcgaatcagcaagatgttattttgtctctcaagattatgaaattcgatcactttggc

SEQ ID NO: 102980 - DNA, 442 bp, Zea mays
  unsure (1)..(442): unsure at all n locations
  Clone ID: MRT4577_25425C.1
gncncccgcacccgnaccgttcgtttnaatattaaatcccctttcggttcgaatnnnaaaccctttttaaaacgacccaactttttnnnncaaanccctttttgattttgcccaattggacccaaaaaaaaaaaaaaggtttttttaaaaaaaagaagggggttttttttttttcccacaaccggggggggggggttttgaaaaaaaaaaacccnaacttttttcttttctttgtggaatttggggccgnnnaaaaggggttaaaaccggaacaaaatgggttgccccttgggaccaaggggtttccaaaattttaattccggggaaaaggtctttccccaatacaattgccgcgaaaaaaattttttgaaaatttttctaaatgggaatttcttgggtttgcccccttccccggttttttttgggtcaagggttgtttttt

SEQ ID NO: 102981 - DNA, 472 bp, Zea mays
  Clone ID: MRT4577_25426C.1
ggactgaggtcttaccaaccttgaggggctgtgtaactgcacagctcagttgctatgagacgtgccaaagggctcaatgttgatatacttaagaagagtcagagggacatattgatcatctagacagaatacacataaactgtggagaaacatcagcttctggaagacgacaagttatctgcaaatcacgagaatattacagctacaaactcatgtacaagaccttgaagttcatctccagctagcatagcagaagcttaaagttactgaggcacaaagcatctgcaaagaagagagatctgagccgtctgtggaagcactgaggtcagagatctgtcatcttgaacaattactacagctattctcaaggagagtcaccttgctggaaggaactctcatgcacgttacaggacatgctgagtcaaggttctgtagatggtctgacaaattggatgaactataaacaatctgc

SEQ ID NO: 102982 - DNA, 647 bp, Zea mays
  Clone ID: MRT4577_25427C.1
aaaacacagattttcgacgaattgcacacgtatcaaacgtcacccacaatccttgtacaatggatgtagcgcaggatctgttgccaacctgtcgcacgcatgacgatgcgctgtatggcggacgcccacgaccgaattgtccatgacaacacatccgtctacaacatatatgtcatctccacaaaaaggatcagggctcctctcgacacgcctcacgaccgtcagcgctctgcacatgcccatgaccgccgacaaagatctgaaaccccgaccatcaggaataaatcgtacgcccggcgtcatcttctctgccatgcgcaacgacgtggatcgcgctacgacaaccgtctatttgcacttcataaccgatgctgagagtcgatcgagaatcgcaacttcgacatgtaacataccgccatcaatgaaaccaactccaagaagtatgctgagctgcgcgatacttacatcagcgaacacaatgacaacgaccgacagctccgcgccatgtacacagagtccacgatgatcctctaaattgactgttgcatgcgctgaatcgacgctattggactgcatggctgattgtatcgttgcctactccagtctggagtgaatataaatctctgggtgcctcagcgtcatcgtct

SEQ ID NO: 102983 - DNA, 574 bp, Zea mays
  unsure (1)..(574): unsure at all n locations
  Clone ID: MRT4577_25428C.1
cttatattggncatgtgtgcaatgtgtcatatgctcttattgctatcttattataataagggtataaatctgtaagttaatacatatttggttatttaatttaatattaaaagtaagaacctagaacgatgatatgataataatattataaaggttttgggtgtgtagtgttaaacacttaaaatatgatttttcagttatatatatttatgtacatagatcttttatttagttgtgtagctcgcgagcctaacgagctgactcgagcttcctaacgagccgagtcgagccagatgtttagctcgttagtataacgagtcaagccgagctagcttattacagtaacgagacataagcctagccgcactcttcttctaatcaatcacaacacgacatatgcgtatgggcacaagcaagcaaatggcaaatccaatcattctattgtgatgggttgccagttgtcacgctatctctattatattactgcttggtccccgcggcaacggctccaacaactagggaaatcgacggtgaggatcgttccaccgcacatccaagccgacaacggcaacgc

SEQ ID NO: 102984 - DNA, 486 bp, Zea mays
  Clone ID: MRT4577_25429C.1
ggggggccaaaacaaaattaaaaccgaaatagtttggcccgaacacggggggcagggactgggaaaggttggggtacacaggaatacatggggcgggtaccgagaactactttattgggggaccctggtttcttgggaaatatgaaagcaacgatgcctgcccatccgaaggtggttttacaggtttttccttcctgggaagctgagaggggttcatgctaacttcaacttgaggggcctcgatcttttttttgaatcccaaataacgttgggtttccaaaggggggccagccagaggcataggattttcatgctcgaggctccacggggggtcaaaaacttggggggccaaggggacaggtgcatcctttataggacaattaggaggttggttctttcgggacggggggggggggccggcccctccttgattttctactgagccatcggattccactttcgctggtttggaaacatgagcaaact

SEQ ID NO: 102985 - DNA, 1241 bp, Zea mays
  Clone ID: MRT4577_2542C.1
gtctcgaggccggccggggaagaaaaaaaatctcacgccatctgcacctccctcctatcggtcgccctctcgccgacgccacccatggaggccgccgcgatcgccaccacctcccggtctctcccgctccccttctcatctacccagctccagcgccggcgccgtgccgccttcctacccatcgccgcctccaagcgtcacgaagacgacaaggagaccgctaaaggttccggctcggaaccccggcgcgagcccactagcctggcgccgtacggcatctccatctcgccgctctccaaggacgcggctatggggctggtggtgagcgccgccacggggagcggctggaccacgggatcgggaatggagggcccgccgacggcgagcaaagccggtggggcgggcaggccggaggtgtcgacgctgccttggtccctcttcacgaaatcaccacggcggcgcatgcgggtggccttcacctgcaacgtgtgcgggcagcgtacgaccagggccatcaatcctcatgcctacactgatggaactgtgtttgttcagtgctgcggttgcaatgtgttccataagttggtcgacaacctgaacctgtttcatgagatgaagtgctacgtcggtccagacttccgctaccaaggggatgctccattcaactaccttgacccaaacgaggataacgacactaccttccctctctgaagcctaaagcctcctttatgttgccagtacaaaattggtcggtgtcgttctaatttgctcgtatagatgtacttaataagcaggtgtacgtaccttcatgaacctgtaagattgttcagatgtatataattctacttagtgcacacaggtagtggataataatggatagacgaggaagtttatgcattcggctttgtgctccaggagcctgtagtgtgtgaacatgatatgtatgaatgtattatatatctcaagtgtgtttatggagtaaaaaaaagtattaatggttagacgaggaagtttatgcattcggctttgtgctccaggagcctgtagtgtgtgaacatgatattatgaatgtattatatatctcaagtgtgtttatggagtatatttgtgtaaagtgaacttttggaataaaaaaaaaaaaaaaaaaaaaaaaaactctctaaaagagggggggggggagtaaatttttggggggaggaggggttttttttttggtgaggagtggtgggggaagatttttt

SEQ ID NO: 102986 - DNA, 291 bp, Zea mays
  Clone ID: MRT4577_25430C.1
cggccgcccttttttttttttttttaaaaccaaaactttattatgatgcatatattattggtcataccacacatgataatgtgtgtcgtcttactgcataagtacatatatagatagagagggatggatagaggaaatttcccaaacatcatgaatcagtagtacggcggaatggctgtggagacaccacatgggttgaaacggaagctgggcaggtggtactggtactggtagagttcacctatggcccgcatgttctgcgccatcatcatgggcatggggatgagaccc

SEQ ID NO: 102987 - DNA, 418 bp, Zea mays
  Clone ID: MRT4577_25431C.1
accaccacatttcagcatataatacatcacaaataacacagaatatcacaaagcccacataacatagcccttaatacaggggccacaaaacatagcccacaatacatagcccacatcacaaaggggacatcacaggggccacattacaaagttttcatcaaaagggccgaaaaaccatgggggatgggctccttttcctaaaaccacatttgccccagggaggcgcgggatcaaaaatgtatatcggaccggggtacgtgggccactgggactcggaaaaaaagggctcaaaacgagggctccaaggacgaactaagctctccacactgaactctgaagggatcatgctctcaaaggcaaagttacgaagacgggcgggggcaacataatgagaacagggaaaggggtactggctagg

SEQ ID NO: 102988 - DNA, 326 bp, Zea mays
  Clone ID: MRT4577_25432C.1
gaccgccccggcataattaccggggcgacgagctgcctagttggcggccgccccccctttttttttggggggaactcataaatcccgcgcagcggccaacgcccccttagcgtatgaaccagaccaacagcccacagaagtttggacaatcagtgtgcatgacaaactaacttatttcgaacgaccctagactactcggataccctcaatgaggccggggcttcaacaaaagaagcgaatgcctgcacaacataaaccggatcgccaaccctgatgacctgtccttcccctgatagaagattcttgcaaactcaatcttgcccaaa

SEQ ID NO: 102989 - DNA, 1250 bp, Zea mays
  Clone ID: MRT4577_25433C.1
ctcaaacctaaataatacttatacgacagcgaaataaacaccaaacctagaataagctgactaattaagtagggcatcgacttcatccattaaccaaaataacataataacactagaaaatctatttttattcctagcttgttattaactctttaaactgtgtaacttaattacttgatttaccgatttatctaaatcgatcatcacaaaatatgtatgctaaattaataacatttattgagactaataattctatttactctatttatagacctagttaacgggaatacagatcaacttaccctgactaattcgacgcgatagtcgcaagcacgactacgggttccggttgatgtcatccaggagccttcttttcttcggtaattaattgctgaagatcttttcttcgattgaataatttcgacgaattgaacttgagtcgcgcaggatgtccgagctttttgtcgcgcacttggtgaacaccatgctgctggctccatcttcactcgactcttggaatttcttggcgacacgtggaacgacgacgacacaggagggtgacgtatatagagctgcacacgcgacgcgacgacgaacgacgctaacaggtggaatcgacgacacgattgggaattaaagccgagcgagccgagagggcgcgctggcgagcaggaaacaggacgcacggtaagactgagcatctataagaaaaaacgcgatggccagggaactcagcacgggcgcgatgatttaaacaaccgacaacggatgtcgcgggttcgaggcggtattgtgcacgacaagatgtttacggtgatctaacggtctggagcatgacacagcaggacgacgaatcgatgtgacgaggaggatgaaaaccatgtactgctcgccgtgaattgtacgcgagctggaacctgagcacgcgcgtacagggagggagctcgagcagggaccggcgccggggctgggaagaagacgctcggcgctggaatctccaagcagaggagacgtgagagggagagctgggatttgggaggtcgcgcgcggagttccggccggcagggcagaagacgaccacgcagaggaggagtgcgcgtggaagagccgttcggccaggcgcacggcagattgggcgcgactacggaggagcaaagggaccgggcacgcagggacgaagaccgagctggaggagccaggggcggcgccagcagaggaagaagacgagggagagggagagctcggcgtgt

SEQ ID NO: 102990 - DNA, 274 bp, Zea mays
  Clone ID: MRT4577_25434C.1
cattattggtttattttttcaattttacattttttacatctccctaacatcaaaactaaaattccacatacccctccaagaccaattgatgacacaaccaacaaagaatcccggcaacaccattccaaatgctcctaaacgatgacacagtaaagactgatcccacatgaaaaacaaccaacacaggctttatcaaaccccatatcacatcacgtgactcgaatgaacttacaaacgaaacacacacatccattagctctttgaaacggtcaca

SEQ ID NO: 102991 - DNA, 318 bp, Zea mays
  Clone ID: MRT4577_25435C.1
atattatatgtacaaataaccggccgacatctaatgctatctgccctgctcacataactacaacataactcccccctccagaaacatgcccatagactgatcaaatatccaataacctatcttctcttcatgcccactacagatgaacctactttatctaacaaacctactcttctacacattttagattaccaagatgtcctttgcaacatctccttataccattttatttacgcttccattttacaaaacttctaaatctcaccccatttcccctaacaaatttgtagaacacaactctcccacaaaaaaagcaat

SEQ ID NO: 102992 - DNA, 224 bp, Zea mays
  unsure (1)..(224): unsure at all n locations
  Clone ID: MRT4577_25436C.1
agactcgacgacggcctggctaggtgtgtgcacatacttacagtaatggccgataaggttacttctggcccagccacaccagccctgcagcccatcttagatgtgcgctgtggctccaactgcgagcccttttatcccttatccaacctgatccaccacaccaccattcccgagcacactagtntctcttccctgcgcttgctcgctccttcttgcccccatgg

SEQ ID NO: 102993 - DNA, 951 bp, Zea mays
  Clone ID: MRT4577_25437C.1
ctggattacaagctaggagttgagaccactttttttatgaaaagttacactgtgagccttcttcacatattgagcaacagtaatcatcttcgtggtcatggtggtgatgaccatgatgcgcctagaaatcccacgcgtccgcggacgcgtggccatgatggcggaggttctaataagtaaccttatgattggaaattgcagtgataggttgtgtgtacgtgtctcccgtctgtgaaaattttatgatcccgaggatgagtataagcttttccatgctcatatggtcctcatcgacgaggaggtacgcgacctgcttactacatgaagcaagctgcataccagatcaaagaaattttaatatggggctggcagtgctcatgctcaaatataccctccactcactgacgttttcaaacctctgataaaggagggcaatgtctacaatgtctcctacattcagatcaagaaagctaatgggatgtacaagcctgttgacaacgatatcatgatcggtttcacaaaatggatcctatgctgcctcgacaaacccgcggtttgaacacgtgacagatgacggcttagcttctgtggatggacatcttggtcgcttttgtagatggaatgtttggttggcttttgtagacagaattaggttgcacttgtgcttgtgtaacgcttatgagcatggttgtgtggactgtgtcggccaaagtatggctcccagtgccttgtatatatcacatgcttagttgtctatccccaactaggtcgcctgataatagacttcgatcatgtcatgctattctataacaatttcccccgtaacttgcctaatcgtcatactaaggtacacgcttaaatttggtgctgcaactttaatgtggattatgttcagtcaaaaaaaaaaaaaaaaaaaaaaaaaaaaaaaaaaaaaaaaaaactccaaaaggg

SEQ ID NO: 102994 - DNA, 1479 bp, Zea mays
  Clone ID: MRT4577_25438C.1
attcaaccaatttggctgcctcatgcttttactatgcaagaaagatgtcaactttataataaaatccaactttacgttagctgacgaattatgacttgttaagtactcttcatctagagccttcatctaaaatcttattgcacatttcataatattcttcattgtttgtgagattcctaccatccgtgatccttttatctatatgctatttctagaagatgatttttttcgtgatcccatagtaccagaagttcatctgactttagttgttttattcaatgtatactttcaagagctcatgcaaggtgtaaatcttactgcgagaatggtagccaagcttgaggagatcctgtggaggatgatggggttcatcgggtctgccagaggcctgacctgagctagaccatcgtgtattatttggttttatacaatgtttgcatcctctgcatctcatgctcttttctgttttcagcatgccttttgacattttttacattatttgctttaaaaaactatagccataccatgaataaatctgctgactttgtgactgtcagagaaataaaagagaagctatgctatataggctaggagttgagaccacaatccttatgaaaagttacactgtgagccttcttcacatattgagcaacagtaatcatcttcgtggtcatggtggtgatgaccatgatgcgcctagaaatgcatgtgtgaaatattcaatatatgtcaccatttctattttcagtaatacaagattagctcatccatgatggcggaggttctaataagtaaccttatgattggaaattgcagtgataggttgtgtgtacgtgtctcccgtctgttaaaattttatgatcccgaggatgagtataagcttttccatgctcatatggtcctcatcgatgaggaggctggcagtgctcatgctcaaatataccctccactcactgacgttttcaaacctctgataaaggagagcaatgtctacaatgtatcctacattcagatcaagaaagctaataggatgtacaagcctgttgacaacgatatcatgatcggtttcacaaaatggatcctatgctgcctcgacaaatccgtggtttgaacacgtgacagatgatggcttagcttctgtggatggacatcttggtcgcttttgtagatggaatgtttggttggcttttgtagacagaatcatgctgcacttgtgcttgtgtaacgtttatgtgcatggttgtgtggactgtgtcggccaaagtatgcctcccagtgccttgtatatatcacctgcttagctgtctatccccaactaggtcgcctgataatagacttcgatcatgtcatgctattctataactggttctactgtaacttgcctaatcgtcatacggtacacgctttaatttggtgctgcaactttaaatggggattatggtttagtcaaaaaaaaaaaaaaaaaggcccctaaggccg

SEQ ID NO: 102995 - DNA, 3281 bp, Zea mays
  Clone ID: MRT4577_25439C.1
cttctactttgcgcttgtggttctcttgttatgtatggcggaggttctaatcagtaaccttttgggccgtgtgcctagtgcctggcctattaactggcttgttcgctgcggctttaatccgactgcgactgcggcttctacagtattttgtctctaggaattgcagctgcaatagtattttgcagctgcaacagtgctcccgcatgggcagccgaacaagctaaacatgtacatatatacttattataccagtgaggtgtgtgtagagtagtgtactctgtactcttccagaaaactttacatggtaccggaaccgggaccagcggcgacggtgtagtggtgaggaggcagaggagtgccttcggcctcgacggaagaaggccgccgatggagaagaagaccagctgggagcgtggcgcggcgtcgcggtcgtgcacgaggaggaggagcctgcacttgccggagggagaagaagcatgtagcacggtgcggtgctgcagtcgtgcgtgagtaggttcttattattgttttctatcctgctggatatgtagtcatgacagttaaattatgtacaactatgattacaaacgggaatacaagctaggagttgagaccacaatccttatgaaaagttacactgtaagtatgtcgtcctgcttgcatttcttccatgttccttttctcactgtaagcttagtttttgtgatcagcttccagatagaagagttattaaagtagacactaaacgattccaacctcctgaatctctttttactcctgtaacacttccatttatatttatacataatggtattgtcaacagtacacatagtttccatcagtttgttaatagtgcacctttagattgaatgagcttcttgcagagcaccaaggattaggcattgaaatgtgtggataaaaatattagaggaccacacatcattattatgcaacattgtctatgcacatgaacataattgtatcggtagtaagccgccagcatgtttgaaagttaaaaatgtgaattaagaacgaattatcgtatcctgctatacttatgcaacctaccaagaattagggcattgtagaaaccatataaagtattgagatcaatttgaatttgtctgcctcatgattttttgatacctgacctttatgaaggtagaggacaacattaaggatgatcatagactaccaacattcttcttcagattaaatgttaaattcagtaatttaatttgtttcaggtgagccttcttcacatattgagcaacaataatcatcttcgtggtcatggtggtgatgaccatgatgcgcctagaaatgcatgtgtgaaatattcaatatatgtcaccatttctattttcagtaatacaagattagaccatccctgcacatctgcctatctgcctggcaaaatattatcgtcgcttccaagattgagaatatggctgcgtttggaaagccttagattctagcattgggtaacatgtctattatcccacattatctaagtttaactagatactcatattttatgaaaaaaactgcactgaaaaatcacgaggtgctagatgttgcgctagcagcagcatcatagcacatcttgtctattccagttacaaatgtgcatattgtagaatatttttgtaacatactgctgctcccttccattcgttttggttttggcaattttctatgcacgtgtcgctcatccatggtacctcttttgtactaagatcattgtgacatttaacatgtttacatcatctcttactcgacacatactcactggactaatgttcttgtccctccttttgctttccttagcagatggcggaggttctaataagtaaccttatgattggaaattgcagtgatcggttgtgtgtacgtgtctcccgtctgtgaaaaatttatgatcccgaggatgagtataagcttttccatgctcatatggtcctcatcgacgaggaggctggcagtgctcatgctcaaatataccctccactcactgacgttttcaaacctctgataaaggagggcaatgtctacaatgtctcctacattcagatcaagaaagctaataggatgtacaagcatgttgacaacgatatcatgatcggtttcacaaaatggatcctatgctgcctcaacaaacccgcggtttgaacacgtgacagatgacggcttagcttctgtggatggacatcttggtcgcttttgtagatggaatgtttggttggcttttgtagacagaattaggctgcacttgtgattgtgtaacgcttatgagcatggttgtgtggactgtgtcggccaaagtatacctcccaatgccttgtatatatcacatgcttagctgtctatccccaactaggtcgcctgataatagacttcgatcatgtcatgctattctataacaattttcgctgtaacttgcctaatcgtcatactatggtacacgcttaaatttggtgctgcaaaaaaatagaaaaaaaaacatggtggtgatgaccatgatgcgcctagaaatgcatgtgtgaaatattcaatatatgtcaccatttctattttcagtaatacaagattagctcatccatgatggcggaggttctaataagtaaccttatgattggaaattgcagtgataggttgtgtgtacgtgtctcccgtctgtgaaaattttatgatcccgaggatgagtataagcttttccatgctcatatggtcctcatcgacgaggaggctggcagtgctcatgctcaaatataccctccactcactgacgttttcaaacctctgataaaggagggcaatgtctacaatgtctcctacattcagatcaagaaagctaatgggatgtacaagcctgttgacaacgatatcatgatcggtttcacaaaatggatcctatgctgcctcgacaaacccgcggtttgaacacgtgacagatgacggcttagcttctgtggatggacatcttggtcgcttttgtagatggaatgtttggttggcttttgtagacagaattaggttgcacttgtgcttgtgtaacgcttatgagcatggttgtgtggactgtgtcggccaaagtatggctcccagtgccttgtatatatcacatgcttagttgtctatccccaactaggtcgcctgataatagacttcgatcatgtcatgctattctataacaatttccactgtaacttgcctaatcgtcatactatggtacacgcttaaatttggtgctgcaactttaatgtggataatgttcagtc

SEQ ID NO: 102996 - DNA, 410 bp, Zea mays
  Clone ID: MRT4577_2543C.1
ctcagaacacacacaccgcgtgtggatgtctaagccatcgctgtccccatctgctagggcgcgggggccggacggggactcgatcatgtacaagcgtcggctccagaagcgctggatgcagtaccggaagtacttgcagcatcccggcgtgcagtactggcactccgagaacgaggtggtctccgaagacgtggtcgtcgaggactagagcgacatcaaggtggacaacgagctcagacgcatgcagcagctcgctcatgtcggaacgatcgacgacgggactttaggactctacgagaagcacgtggccatgattgacctcgatcacgaacacaggcacaatatcacagtagaagatcatagcgctgctgacgtttgtgccggcggttacgtattatagcagcaccatt

SEQ ID NO: 102997 - DNA, 230 bp, Zea mays
  Clone ID: MRT4577_25440C.1
gcacgaggttgcgatgtccttgctgagccgccgatgagctctcgaggacgtacggccgagccatggccgccgccgccaccaccttgcatttgtggcgtggggtgcggggagagaatcaatcattcgagatgcagaacagcagaaggaaggaatccccggtcgcttcgagaaggtaaaaaaaaaggagaggatttctgttagggtttggtgtccgccgcctgccaccttgc

SEQ ID NO: 102998 - DNA, 1123 bp, Zea mays
  Clone ID: MRT4577_25441C.1
atctccctgctcctgcgactacttcttgatccagccaagccagggatcgccatgtcggactcggaggagcaccacttcgaatcgaaggccgacaccagagcgtacaagacctacacgcattgggaccctcgaggccggccggggagagacgggaaaaccatagaagccgccactcacgcctggaagcatctggaggcgtggcacggcagccgtcgcccgccacaccagcagcgaactgcttcccggtgcccgcggcggcgaagcacaggagagaggcggcgagtgaaaccgatgacgccgccgatggatccgcccgacgtcgagatggagatggagcccgcgccccagcctccggctccgacagcggtcggggaggggtggagcatgctgtcgcgcgcccgcgggctgctcgaggagggcaaaccgtccctcgctctgcaggcggttctcttggccataagatctcaaggcggtgaacaagctctcatgcagacattgaaccgtgcacgtgaactctatgcacagagattgcaggccagtcctagtgttgatgagcttgcctctttgcttgcccaatgtgccatagcagaggctcagtcatcaaatactaaccctccacaagggcctgggtcagaccctgtcaatatgctgaattctgatgaggcctgcattcttgctgagagtggaaggaagcagatcatcctggacgcatttgctgatgggagcagcttcatttgcttgaaatgtggggggctctttagcacatctcgcaaggatgagcacttagcctactggtgcgggactgcatgatcctggttacgtcttgctgtggtatatccatggtcacacctagcaatgaaccgatgatcatgatacccgtgagattttgtataaactttgttctgttccaatccgattactgcttctttactgcggggatgccagaggcacgtctgttaagtcgtagtaaatacatttgccgatgacaaactttatgaacgaaagtttccatctctatccgcttgttgtacttgtgctttcggctgatggaatgtgtttaaatgtttggcatggtcccccaattttaaaagttgaatgtgcccaaccaatgtttttgtggttt

SEQ ID NO: 102999 - DNA, 962 bp, Zea mays
  Clone ID: MRT4577_25442C.1
gcggccgcggggttctcgttcctgcgcctgcgcggcctccgcgcgctcctccgcgccctccgctccacctccgacgccgacgccgacgcgggcctcttccgcgactcccagtccatccgagatctccaagtgatcccggtgctgttcgagcacagcctgcgcaaggcgaccggggacgcggtgctgacggtggcgcaggtgctgggcatggagcccgccgccgccaggctcaggaaccccgccacggactccgaggtcgtgcttgcgctcagggtgctcgaaggttgctgcctcctctgcccggcctgcgcagccgcggcgcaccgctacaatgccgtcaaggtggttttgaatatattgatgacacgtggtatcctcgagcaaagagcatgtctcgacactctcttagcgttgctggtgaattgttcaggaaacctgacggatttcaaagaacaagatggactaaataaaattgctgtcattgtaaaagatgcaaatagggatgaccatgtaaggttaaaatgttccgagtttctgcttctttactctggaaacgcaaaagaaaaatgtggcgcagattccgagtctaatatgcgagaagatttggcaaaggttttcggagaaaaatgtgcatcatttatctcctcaatgaacctattcagctcaactctagagtcacaaatgaggcaatctgagctaagctttcttgcagagcatgtgttggattacatgtagagccatactaaagataaccataatcgtgccattttctccacacacaacagagttcagtgctccaaaatgtatgtttcctattaacttgggtaattattgacgatgctactgtatatgaactcaactacgagaatgttactgttcaccgagtttaaaaaaaaaaaaaaacaaaaaaaaaaaaaaaaaaaaggccggccggtcgcgatctagagccccgggaattcagg

SEQ ID NO: 103000 - DNA, 493 bp, Zea mays
  Clone ID: MRT4577_25443C.1
ggggtccgggacaggaaactaggcacgacggtccactgtctatttggagacttccttcggtgcggtgcggggggtccaactcggaacgggcgatgtttgcatggcagaagcaagctgtctccaaggtgcgggcggatcgccggaagcttcgtcagctgcctgctcagccggcaaggccgactcgccgaggagggccgaacacgcctcgccctacgacaggaggggggcaggaccacgtgttcttgtcgtccgcgccgtacgatacgatcggcaaagccgcaagccccgcaagtactgtagcccccaccccaagaccggcgatttcggaccgccggaagggcaccccaagctgctcgctggtggcgcgcacgacgcaggagcaggatgctcacagtgcgctgactgagcacattagccatcgctgcaccgaccctccgaccaagatagaccccgagcagcagaaccaggcgggtgctgccgctagggcagcaca

SEQ ID NO: 103001 - DNA, 387 bp, Zea mays
  unsure (1)..(387): unsure at all n locations
  Clone ID: MRT4577_25444C.1
gcgcgagcgagagagggacggcggccgancnggcggcgcaggcggagggcncggccggggccggcaagncggcgccgaacaaggggaggggccgggncgagcncaagcggancgagaacaagancaaccgccaggncaccggggcgaagcgccgcaacggcccgcacaagaaggcgnacgagcncncggggcncngcgacgccgagggcgcgcccancancnncnccaaccgcggcaagcncaacgagnncnccagcacgcagagcangccaaaaacacnngaaaaggaccaaaaangcagnnnngcagggcccgaaacagcacnccagaacagagagaangagcaacngaaaagcagccgcaaggaggaccncaaacngaaggcac

SEQ ID NO: 103002 - DNA, 242 bp, Zea mays
  Clone ID: MRT4577_25445C.1
attggctacttggttgcacgtcggaggcggcgtgggttcaaggttggtttcattgacaggtggtatcatcaaatctttttctttcctttatttcagcagtatcatgtgtcaatctgtttgcttgactttaatctatatcaatttctattatagtattatttatacagtgttttttgtccatataaattgcagctgcagtcagcccatgtaattctgctattcgaaaacccccattctagcag

SEQ ID NO: 103003 - DNA, 421 bp, Zea mays
  Clone ID: MRT4577_25446C.1
gcggcaggcctgctacgtccgtgcgtgtatgcacctcactcgcatagcagggtcactttgattccgtctgtgcacctggcgctgcggctggcactagcgcgggttaagtgggcactcgttgataaacacgatagatcgttcaccatcacatcggcacttgcggtcacatcttagagggtgagcgcgctctcggaggagcgaatacgacagatgatcttgacgcgcccaacaagctggagagaagactgcttcccggtgtgctttgatccttttataaaccacgaccagtagatggagggagttctgctcatgcttccgtctcacgtcgaggacctactacgatctacgtgtcatgtttgacccggacaccaagtgcctatatatttacaccttactttggagggcagcctacatggcccag

SEQ ID NO: 103004 - DNA, 281 bp, Zea mays
  unsure (1)..(281): unsure at all n locations
  Clone ID: MRT4577_25447C.1
cattgggtacctcgaggccggccgggacgatcttcaatttaggtgcgtaccgatcccgtattcaccctgagctcaagccctcgctcaaatctgcgaagaaaccgaacccgaccgctgaccctcgacttgcacagctctccccacctagtcatccttcttcctcaacaccgcaaatatggatcaagcaaagttggcgcgcatgcaagcgtcagtgcgcattgggtaagcaagcttcttgtcctctatttttgacagccccgcanccacannnaaatatcttg

SEQ ID NO: 103005 - DNA, 862 bp, Zea mays
  Clone ID: MRT4577_25448C.1
caaacctgcagtcatctatctcctccatcaccaccaccaccaccaagctcaacaacagccagctcgcgaaaataatgaagagccgcagcatggcatcatcggccgcgctcttggtgctagccctcgcgctagtggcggccaccgccccacaggtagcggaggcaaagaagaagagagcggcggagagcggcgaggcggcggaggcgaagaagatccaggacgacttctgctcgacgctgtgcgagggcaagaaggggacggacctggtcgtgtgcaaggagtcctgcgcgctctcccagcagtccaacctggtgctgtacggcaggatccagtgcaagggcaagtgcaccgagcagaagggcatcacggcgccggccatgaaggtctgccaggaggagtgcgacaaggcgtacgtggtgaaggcggccgaggtcaccaaggcctgcagcgtcacctgcgccaaggagaagaacccgcgcctcagcgagaactgcaagaggtcctgcacccctcctccttcttgaagcgaagccccttgaaatgaatgaaccatgcatgcatgcatgcatgtatgcatgcgccggggtgacgtggcgttcagctcaggcgctgagcgagtctatacgtacgtcgtcaccggctggccacgcatgcgataaccatctgatatggacggaactatatattgtattcctattaatctggcattttctaagctaattgtttttgttcaaatatatataccgtcgatggaactccaaatgtaatgtcacgcaaatgtgtgtttttcatcgattgaatggataataataaaaaggcatgctggcagttactaccgaaaaaaaaaaaaaaaaaagcggcc

SEQ ID NO: 103006 - DNA, 217 bp, Zea mays
  Clone ID: MRT4577_25449C.1
cacacgcgtggggttgtctccctgtcgctttccgtgcctagatgtagaaccggacccgcagaggcgagggccgcctatattctactcctattagaacgcccgtgaccgggattacgtggagcaagcgcggatgtcaacgctgcactcagagtctaccgtcgaatcccccatcaaggcggccgaatacaaggacaccgtaaaggccgatcaccagctg

SEQ ID NO: 103007 - DNA, 1030 bp, Zea mays
  Clone ID: MRT4577_2544C.1
gggtaccgcggcccttcctcgagttttttttttttttttttttcaaatgacgaaatgcaggtcatattttttattatatgcccaaaagcagacaggcaatagaaaattacactaactggtcaccgacattacaactccagtgtagattctagtgactggtcatctatgcgtatgataaactagtcttacaggttcatgaaggtacatctgcttattaagtacagctacacgaacaaattagaacaggaccgatcattttttttgggtactgcaagtctgcaacataagggaggctttaggctttagcgagggaagatactgtcgccatcctcgtttctgtcaaggtagttgaatggagcatccccttcgtagcggaaatctgggccaacatagcacttcatctcatgaaacaggttcaggttgtcgaccaacttatggaacacgttgcaaccgcagcactgaacaaacacagttccatcggtgtaggcatgaggattgatggccctggtcgtacgctgcccgcacacgttgcaggtgaaggccacccgcatgcgccgccgcggtgatttcgtgaagagggaccaaggcagcgtcgacacctccggcctgccagccccaccggctttgctcgccgtcggcgggctctccatccccgatcccgtcgtccagccgctccccgtggcagcgctcaccaccagccccatggccgcgtccttggagagtggcgagatggagagtccgtacggcgcgaggctggtaggctcgcgccgtggttccgagccggaccctttcgcggcctccttgtcgtcgtcgtgacgcttggaggcggcaacggggaggaaggcggcacggcgccggcggtggaccggggtagaagagaaggggagcgggagagagcgggaggtggtggcgatcgcggcggacgcgacggactccatggggccaacggagcggagagcgaggtgctgcagcaggcgtggcgtgagatgtttttttccggcccggccgaggcagaggttcccaatgaagg

SEQ ID NO: 103008 - DNA, 1242 bp, Zea mays
  Clone ID: MRT4577_25450C.1
gcacgagctagtctcgagttttttttttttttttttttgacaagaaaaaaatccttgtatttatatataaaaaaaccgccgtgcagtgcactttattttcacagtagtatattgcgttacatgcatgtgatagtggtagcctacagctctacgcattccaaatgcttcaccggaatccattattcaacgtagtctcctccgtccacaaggaaatcatcttatagccgagcctgaactttctttgttggtgcactcagaggaatcccttttgcagctctttcagcgaggtaagagcagggcttgaagaagcccccataccgctttgtccactcctccaactttccatggatgtactttgcgccgatggaatctgcccgtcatctcctcctccatcaccaccaagctcaacaacagccagctcgcgaaaataatgaagagccgcagcatggcatcatcggccgcgctcttggtgctagccctcgcgctagtggcggccaccgccccacaggtagcggaggcaaagaagaagagagcggcggagagcggcgaggcggcggaggcgaagaagatccaggacgacttctgctcgacgctgtgcgagggcaagaaggggacggacctggtcgtgtgcaaggagtcctgcgcgctctcccagcagtccaacctggtgctgtacggcaggatccagtgcaagggcaagtgcaccgagcagaagggcatcacggcgccggccatgaaggtctgccaggaggagtgcgacaaggcgtacgtggtgaaggcggccgaggtcaccaaggcctgcagcgtcacctgcgccaaggagaagaacccgcgcctcagcgagaactgcaagaggtcctgcacccctcctccttcttgaagcgaagccccttgaaatgaatgaaccatgcatgcatgcatgtatgcatgcgccggggtgacgtggcgttcagctcaggcgctgagcgagtctatacgtacgtcgtcaccggctggccacgcatgcgataaccatctgatatggacggaactatatattgtattcctattaatctggcattttctaagctaattgttttttttccaaatataccgtcgatggaactccaaatgtaatgtcacgcaaatgtgtgtttttcatcgattgaatgggtaataataaaaaggcatgctggcagttactagtaggagagaggcgaggggggcgggggagggagggagggaggggggggggggaggggg

SEQ ID NO: 103009 - DNA, 813 bp, Zea mays
  Clone ID: MRT4577_25451C.1
ctgtgcggcgctcgagccggccggggtgaacgcgtcgtccctatccccaatcctcgatctatgtaccccctccctcgggagccgccgcgccattcagcccgccggtgccgccgatgcttcactctgttcgccggtcgccgtctcgacttcccttgctgtgtattcgaaccgtagctgtcctgccgtcctcccttcccagcacccgatggaccacgtggggctgctctgcccgttaggcagcggcaacctgcgtctgcagagcaacctcgccgttctggccacaacccatggtgcgcatgtgcagtacgccgtcgggcgcgctaaagctggcgctgctgttggtgtgccgtgccctggcctctccgttattcattacccggtatgacatactcttctcgttcggttaatactggcgcgtgtcctcgatttgccttgctctgcattgtccagcctcgacaaacccacggtttgaacacgtgacagatgatggcttagcttctgtggatggacatcttggtcgcttttgtagaaggaatgtttggttggcttttgtagacaaaatcaggctgcacttgtgcttgtgtaacgtttatgtgcatggttgtgtgggctgtgtcggccaaagtatgcctcccagtgccttgtatatatcacctgcttagctgtctatccccaactaggtcgcgtgataatagacttcgatcatgtcatgctattctataacagtttctgttgtaacttgcctaatcgtcatactatggtacacgcttaaatttggtgctgcaaaaaaaaaaaaaaaaaaaaaaagcggcc

SEQ ID NO: 103010 - DNA, 332 bp, Zea mays
  Clone ID: MRT4577_25452C.1
ccggtcttgaattccgggtctgtcttgatatcatggtaaaacctgtataaaatataacaaactgaattgatggaccaaagatgtttcagttggaatagctcatatgatggttggacatgaacagaccatgaacaggaccatcatgatgaacaaaagaagcatgaacaaaccttcaacgaagaagcacagaaaatgatcaagagtgtcaaacaagcactgggaaatggtgaagggtgtcgagtctatgggacgttggatgtgcagagggtggctggtaacttccatatctcagtgcatgggttgaacatcttttgtgctgaaaggatttttga

SEQ ID NO: 103011 - DNA, 696 bp, Zea mays
  Clone ID: MRT4577_25453C.1
tgtcgagctccacagtctacaacggcggcgccggcgccagtggtgggtaccagggcctcggtggtggcagctctttcctcatgccgtcgagcactgtcgtggcggcggccgaccaggggcacagcagcgcggccaaccaggggagcacgtgcagctacggggacgaccaccaggaggggaagctcatcggttacgacgccgccatggtggcgaccgcagctggtggagacccgtacgctgcggcgaggaacgggtaccagttctcgcagggctcgggatccacggtgagcatcgcgagggcgaacgggtacgctaacaactggagctctcctttcaacaacggcatggggtgacgacgacggtacggtccaacgaacggagagggcagaagctagtggctagtgatagggggttagctagctagaagatcccaagtctaggttagagttatttggtcatcgttgtcgtgtttcgacgtgctcaggttctggttcgattctgcacaattaacccgtgcatgcacgcgtgtgcctttctggaagctggtaatggcaggtcagggtaagtaaagttagtgttgtaagttatcctgatgtgctgttaattttgggtagtttcagaaggtctagccaatctcttcggaggactcaattgtcatcttgcttgcactcgtgcttatgagaataactttatcat

SEQ ID NO: 103012 - DNA, 178 bp, Zea mays
  unsure (1)..(178): unsure at all n locations
  Clone ID: MRT4577_25454C.1
agaagtaatggcgattcaatatagtacattgattgcggggctaattgcaatatgttcccccccataaagcctttttggtgaattaggaccactgggaagaaatgattgattcaaagatgccctaccttaatttattgtttcgaaggcngccaatgaaaaggttattccatctgcggct

SEQ ID NO: 103013 - DNA, 484 bp, Zea mays
  unsure (1)..(484): unsure at all n locations
  Clone ID: MRT4577_25455C.1
aaaacagccgccccgctagcatccgtagttcccccgggcccgtagacgcaaccccgcgcctggagcaagacggtccttttatcaatatcatgggtgtggcatgggaggagaatgtatacttggggaatcagaggacctgggccgggaggcttcaacagatggctgagcttatgctgaaggggagtgataactgtaaattgggaagagcccattgtgggggagcgtgncctctttatggtggcatgcgagaatgtaattggcgttcgtcgtgcttcgtggtgcattgtctcttctattgagacataaggtggagtcccgtgtgaacgatgcagctgtgaatccttatggagaaattccgtgcgaagatcgtggctgagctgggcaattttggtggtggttttctgaagctggttgacttctacttagggccttttttgatgctgctgggtcgttggtttttacctcgcgatgggatggtgtgttt

SEQ ID NO: 103014 - DNA, 258 bp, Zea mays
  Clone ID: MRT4577_25456C.1
ttttgtttttttttgaacggacatgcgtttttaacccaagcaaaacgagcaaccaatatccaccatactaggcaccaggccggtgctgcccgaaaactcccaatcaaggtaaaaacacccgcaggcaccaaagtttttggaaaccaagtacacataacggcgcacaccactaacaaacatgatcgcggggaaacagatcgaaatgcaagcactacatctccaagcagaggatgttgtacttcatattacccgtactaa

SEQ ID NO: 103015 - DNA, 346 bp, Zea mays
  unsure (1)..(346): unsure at all n locations
  Clone ID: MRT4577_25457C.1
tcgaggccaggtctatgtagcgtctcgaaccctctctcctatagagggtgcgctagctagtttctactgtgcgcagnatatatatatgcccctgctcccgataccttgaatcaactggcaccgtttaaatttctacctctactaagcgctgaatgagcctcagagatccaatcttgctgctgtaccgtgccctcgtcaggtaccgcctcgtnnaaaaaagaaatagaaataaaaacgagatccgagatcccgatcttgttgacgaacgcacccccgtcgccccgatgggcgaccatcttctgtcctgccataagcccgcccgctggtgccggccccgtttcgccgg

SEQ ID NO: 103016 - DNA, 395 bp, Zea mays
  Clone ID: MRT4577_25458C.1
gacacacttacgcccacgcatttttgatcataagtatcactgaagacaatgccagacactgaggtgtatcaagatgtaaaagtcccctaaaaaaacgacacggcacgactaactacatgcacccaaatcaaatatgctcattccacatctagggagctggcagcacaaccgaagcaagacaccacctttcctctagtggtaggaaactaacaaaactgttcagtcctccaagcgatacgaacacaccaattatagatggaaatggacgcccagactccgtgcaaactgaacgtgtacacaacgacttgcaaggacataaattggtgcaccctactattcatggtgcttcatgctctctattaacaaatagccccagatatcaatgctattatggc

SEQ ID NO: 103017 - DNA, 296 bp, Zea mays
  unsure (1)..(296): unsure at all n locations
  Clone ID: MRT4577_25459C.1
gnacttcatgccggcgtgttcagcgcagctgagcagcggcgaattgtccaatgtgtgtatgacctccaggcaagagggcagcgtggggagctcggagagcgcacatatacagaaccccaaatggatgcgtggtaaaggccgggtaacaatccaatttggatgctgttacaattacgctacggataggaaaggaaatccaccaggcattatacggaccattgtttctgatccaatgcctgncctctttnngactttgnttttgtgtttggtccgntggctggttctgcctgctcctt

SEQ ID NO: 103018 - DNA, 269 bp, Zea mays
  Clone ID: MRT4577_2545C.1
gccttatcacgccaggatgacgcgcaggcgctcacgctcgccgtcctcgggggagccgagctcgcgcaccagtaacacggtgagatctcctacgccagcgaagaggcatcatcaagaggacctggactaccgtttatactcacagatggacgattttcaccaacgtcgacggcaacgaaaacaagaacttggtgcttgatttacatgacttattaaaaaaaaagatccagttctttttctgcactactactacttggaccatctcatct

SEQ ID NO: 103019 - DNA, 164 bp, Zea mays
  unsure (1)..(164): unsure at all n locations
  Clone ID: MRT4577_25460C.1
cccacgcgtacgcctacgcgtgnggagagagttatctatctagccactatagactaaataatgaacaggtggtctgctgagaaagacgccaactcaaaagcttccggaacaactatacaatatatactagggccagaatgggacggggccacagtataaatgac

SEQ ID NO: 103020 - DNA, 315 bp, Zea mays
  Clone ID: MRT4577_25461C.1
ctgagctgccacatagctgatgggatttcaagatggcatgacagctgctcgtgcataatcagtgggttttgcatgactggggtgatggtgattgtaaagatactaaagaactgtaagaaagctatacctcccatgattgcagaaggaaagatgataattctcgatatggttgttggaggccagttgccaaacattaagtacaaagatattcatgtcttgtttgatctcttcatcatgtatgtctcatgtctgtcaatggcgctgagcgagacgaacaacagtggaaaaacataattttcgaagctggatttaacg

SEQ ID NO: 103021 - DNA, 340 bp, Zea mays
  Clone ID: MRT4577_25462C.1
caactgaactgggctttggggtccaaacaatattgcttgtggtgggcttggttcctaaaaaacaaaacaagggggttccccaacttcccacctggttttccattcctttttaaaaaccactcccctacacaaaacactgtccagggggaacttggacattcatcctttacttttttgaagggccccgtgggaccccctgtaatgtttaatggggggtttgttttgtttccagcaccctgcaaacgtggaacttttttcgacccaatgatgggttacttattcctagggccttgcccttttgtttccagcgggtttgccattcaaagaatttttaaataaa

SEQ ID NO: 103022 - DNA, 233 bp, Zea mays
  Clone ID: MRT4577_25463C.1
atctcctttcttagctcttcgcaacgctctatttcacagcaatggcgatctcggccactcatccgcgttgggatgagatggcgagcctcgaccattcttatagtcgcggtagtttggccagatcaagcacaactggaaaccacagaagtttgttatgattcagcgccggttgttgcgatcgggattcggttgaagattctttcgttcgaacagcctgaggggaggaccagtgc

SEQ ID NO: 103023 - DNA, 474 bp, Zea mays
  Clone ID: MRT4577_25464C.1
agggaaagggggggcccccccctcgaaaattaacacgcgggggcatggcacattcttaaaaccctaacaaacaggttttaatcccgggaaaaaaaaaaacgggatgcaacagcccatgactgggcattgctgggggggggggcgcccgccctaacagggtagggggcctctgggggaacacggccaccaccaggttgagggggatgccgttgcccaaaaagttgaggggggtgccccccaagaacagccccccggtcttgaaccaaacagcctcagggccacagttagggccaaacttggggcaggcccttgggatgacagcgccaggggcaccgagcagggcccattggggagggatcaactcgaaggccgggaactgggcaaagacctcgggctttttgcccaggccaaaaggggcgaagccaaagtctccagggacccctccggggagggactccgggacctccgaccggg

SEQ ID NO: 103024 - DNA, 317 bp, Zea mays
  Clone ID: MRT4577_25465C.1
gagtcttcagacccttggcgtcatccacttcagactgcagaaaagcgccatcgacaccataaagcattgaatgagggagatgactctctctatatcgtcctatggacgacgactccatgcatgcgatcagctgctggatctgccaggcaccgaggggcgctgatataaccgcgcccgtgcatgtgaaacctccgactcatgaggaaattgccgagcgtatgaaaaccccggacctgctgacagactccgggcacctgcctcccgaggatcatgatcctgccaccattgatactgcacggggcagcatgaactacggt

SEQ ID NO: 103025 - DNA, 544 bp, Zea mays
  Clone ID: MRT4577_25466C.1
gggatcgcttctgctcgacgtgttccaaacgccggcgcgaactctcgcccggagccgacagatcttcaattcgccattccgcccaccgatctaccttcacgccagtctcggtctcttccgaaggggtcgcgcgcggatgtttgacaggagaggaggaagatgacggagcgcatctccgtccacatcggacaggtcggaatccaagacggcaacgcgtgctgggaactttactgcctcgagcaccgtatccacgctgatggccaagtgcctggagataagaccgcgggacatcaccatgatgccttcaggaccttcgtcagccagactgatgctgggatacacgttcccccggcaatcttcgttgatgtacaacccactgtgatcgatgaggcgcgcactggtacgtaccgacagctcttggaccctgaacatctcatcattggcacggaggatgccgctgacaatttcgaccgcgggcactacacaaattggggaggagattggttgatctgtgccctgaccggatgccccaagcttggtgaca

SEQ ID NO: 103026 - DNA, 2092 bp, Zea mays
  Clone ID: MRT4577_25467C.1
tggaaatccatcccttcaaccttgtggactgtcaacgctctccagtcctttagtgaatgctcgagcactaagtgaggcagacaataatccaccagctgataatacagcccctgatgacaatggtaacggtggcggattcagcaaaatagagattgcctccataacttcagcatcagcaattgttgcagttctcttggctctggtcatcctttatatttacacacgaaaatgtgcatcaagaccatcaaggcgttctctaagaagggaagtaactgtttttgttgatattggtgctcccttgacatatgaggctgttttacgtgccagtggaagcttcaatgcaagtaattgcatcggaagtggtggcttcggagcaacgtacaaagctgaggtagcaccaggaaaattggtggcaataaagagacttgctattggaaggttccaaggcattcagcaattccaagcagaggtcaaaacacttgggaggtgtcgccattccaatcttgtaacactcataggataccatctcagcgattcagagatgtttctaatatataattttctgcctggtggcaatttagaaagattcatacaagaaaggactaagagaccaattgattggagaatgcttcataaaattgctctagatgttgcgcgtgcacttgcatatcttcatgacaattgtgtcccccgcatcttacacagggatgtcaaaccaagtaacatcttgcttgataatgattacactgcctacctttctgattttggattagcaaggctgcttggaaattcagaaacacatgcaaccactggtgtggcaggtacttttggatatgtagctccagagtatgcgatgacatgccgcgtttctgataaggcggatgtgtatagctatggagttgtacttcttgaactcatttcagacaaaaaggcactggatccttctttctctccttacgggaatggattcaacatagttgcctgggcttgcatgcttctacaaaagggtcgagctcgtgaattctttatagaagggctgtgggatgtggccccacatgacgaccttgttgagattctacacctgggcatcaagtgtacggttgattctctttcttctaggcccacaatgaagcaagttgttcggcgacttaaggaactcagaccaccgtcttactaggaatagcaagcagagactggcttgcttctgcataatgagaccaagactgctggctgtttgggtgactgcaacagccagtaatgttccaaataaactggtggcaactggcaagcaattcaaatgtcatttctcaagggatcctcaagcaggacattcatggtatttaatcatttggtcgtcatggtcactgtatggaacgccgatatcgcttcaatgccactgcaagcaagcatcaaggatgcctgaggaagttcttctatgcctgccaaatctgatgactggattaggctctgttcgtttagtccagattggaggccggaaccattccaactcatcaagctaatacaaatttgcgaactattccaatccggaaccaatccagtaaagcattcaggaagaaccgaacgggcacttaggcattaccgacccagttaacaggatgcattatataccttgctaagcaattattacggcgtaacggagatcgaccaccttgactcattggaacgtagccatatatctggcagttctagcatatatctgatcaaagcaaagccatatatctggcagttctggggtgatccgtccgtggaaaaggcttggccactgacctgcgcgaggacaaagcagtagaaacatatcagccaatcaaagcaaagccatatgaattcatgttaaacatgtccatacatatagcagtgaaaagtatcaaatcactgatttcctttcttggcctttgtaactgtacatactgctttcgtggcctttgtaattgttcatacttcttccgggcattcattatgcaggcatgccgttgccgtgccattctgttcatgttgataacagccgcaaataatttaattgctcgatttgcaaattgaagggcagagtggtcggatctgtaaattaacccaa

SEQ ID NO: 103027 - DNA, 560 bp, Zea mays
  unsure (1)..(560): unsure at all n locations
  Clone ID: MRT4577_25468C.1
tccggaattcccgggtcgacccacgcgtccggcgccacgtgcactgcacagccgcctgctccagaggagactcacatttgcacccaggagccggagccacgacccaagccacgagaaatgaaggactgcagtaatggatgctccgcgccgtttgctggagagagaggatcagaagaagtggcagagacttttagggccaaagatctcatcgtcacaccagccactgtcttaaaagagaagccggacccggattcgctggtctttggagctacggttactgaccacatgctgacggtggagtgctcctctgcgtctggatgggagaaacctgacattaagccttttggaaacttgcccatacatgccgctgcctctgttttgcgctacgctgaggaagctgctgaaggcttgacagcctttcggggagttgctaacaagatccgattgcgncggccggacctcagcatggatagaatgtgccgatctgctgtgaggagcacgctgccgatgtttgacaaggacgagctcctaaagcgtattcttcagcttctaganatcga

SEQ ID NO: 103028 - DNA, 1028 bp, Zea mays
  unsure (1)..(1028): unsure at all n locations
  Clone ID: MRT4577_25469C.1
tttatttggttancaagctggtgggggggggggggggcggatagcaaccactggtgtggcagacaaaaagcactggatccttctttctctccttacgggaatggattcaacatagttgcctgggcttgcatgcttttacaaaagggtcgagctcgtgaattctttatagaagggctgtgggatgtggccccacatgacgaccttgttgagattctacacctgggcatcaagtgtacggttgattctctttcttctaggcccacaatgaagcaagttgttcggcgacttaaggaactcagaccaccgtcttactaggaatagcaagcagagactggtttgcttctgcataatgagaccaagactgcaacagccagtaatgttccaaataaactggtggcaactggcaagcaattcaaatgtcatttctcaagggatcctcaagcaggacattcatggtatttaatcctgtggtcgtcatggccactgtatggaacgccgatatcgcttcaatgccactgcaagcaagcatcaaggatgcctgaggaagttcttctatgcctgccaaatctgatgactggattaggcattaccgacccagttaacaggatgcattatataccttgctgtgcaattattacggcgtaacctgcgtcgctgctctcctgatcggagatcgaccaccttgactcattggaacatagccatatatctggcagctagcatatatctgatcaaagcaaagccatatatctggcagttctggggtgatccgtccgtggaaaaggcttggccactgacctgcgcgaggacaaagcagtagaaacatatcagccaatcaaagcaaagccatatgaattcatgttaaacatgtccatacatatagcagtgaaaagtatcaaatcactgatttcctctcttggcctttgtaactgtacatactgctttcgtggcctttgtaattgttcatacttcttccgggcattcattatgcaggcatgctgttgccgtgtcaaaaaaaaaaaaaaaaa

SEQ ID NO: 103029 - DNA, 344 bp, Zea mays
  Clone ID: MRT4577_2546C.1
gtcctggctcgcgcgctcctctgaggcccgcgcaaacctcctccgcgtccggtcacgagggggacgcctcgtcgcggaggacgacggcgctgaggcggtgaggacggtgggcctgccggcgctcgtgcgggagatccaacggatcgacaccatccggctctacgcggaagctactctacagctggaatctttggttggcaacctggaagatgctgcatttttcattgttaggcaggccccaatgtcaaaactgtcatccataactcgaaaatcgaatgaaaccgaatggaagcaagggaagctgctccatgctgttgaccctgggaaggatattgggcgagaat

SEQ ID NO: 103030 - DNA, 1253 bp, Zea mays
  unsure (1)..(1253): unsure at all n locations
  Clone ID: MRT4577_25470C.1
gcaacgatcaaactattttggataatttatcagcttaccatttcaatagccgactcaaatccgcgagatcggtagtgattttccgatccagtcaattgtcgagcgcctggggaatatcgcgctgctagcttcgtcttcactcgattcttgggattcttgatgacgcacggatcgacgacgatcaggagggtgacgtatatagagctgtactcgcgacgcgacgacaaacgacgttaaccggcggaatcgacgacgcgattgggaattaaagccgagtgagccgagagggcgcaccggcgagcaggaaaccacgcgagtacaagatatggaaaacgacgggctcgacaacacgcgaagcgacgacagtcgaatcggcaacaaagcgttggcgaattcgatgaacacganctacagtcgcgtgctgacgcagtcaagataattgtggctagcaagcttgcgacagagcgatgatggcgcggcacgacaaactgaaacaggaatacggcaacatgaggcttgattcaacgcgggggctcgacgcggaaacttaacacgccgttgtgagcagagaattttcgtgcgcgcactaanaagaatgtgacacgcgcagcaggggcgagcagcaggcgccgagctgcgcgacaaagcgaaatctgagctggagctcgcgacaacagcgagctggggcgagcagaagtccgggcgccatgggacgaagaaaaagcagccggacacactacagcttggaatcgatcctagaaacggcgactggcacggatgggtgtagttcgcggacaagaatgccccagcaggcagagaggcaccgcggccaccatggggaacgagccggagctgcacgcgcacgtgaaaatcgctcggcagagaggacggacagggagctgtgcgcggtgagctgccgatggctggagacgcgagcagggagccgctggggcgagcagggcgctgcaagggagctccacggcgaacttgaggacgaacaccatgggaagcaggagagctcggcgctaaaaaaattcgagcagggaggattgagcgagctgcgcgcggcagagagaaacttgaccggctgagagatagagatgccacgaggaagtagcttggcctccatggagccgcttggctggaggagtgaggagcacagaggagaagccttggccggcaggaggcaagcgcgcgacgccagcagaggagatggagacgccgggaagatgagcgccggccaccccggcgag

SEQ ID NO: 103031 - DNA, 235 bp, Zea mays
  Clone ID: MRT4577_25471C.1
tcacaccaccctccgcggcccattattcgcgctacaaatcccccaacccaacgattaaccaagcaagtaaatgcttttacgttcaaaaaatccaacttcatactccatcatcgctcacatgagagactcatcacattaccaaacctaccaacctatcactctgagactaaagcttccagccttcatctcaaacattccttctatcccacccatgtttctcgcccatctcctctcc

SEQ ID NO: 103032 - DNA, 224 bp, Zea mays
  Clone ID: MRT4577_25472C.1
ctttctttttttttttgtagtaactaagagcttctataggaacacaacttgaagaaccaaggagctatatcgaggccaggggtcaaccactcaaacctatttctttaagccgaacacaagctcccgaggtttttttacatttacagacgtccttcaatttgaaaacacgaaacatgggattctatcaacgcccttcaactttttagaatcctgcaaaaaacaaa

SEQ ID NO: 103033 - DNA, 185 bp, Zea mays
  Clone ID: MRT4577_25473C.1
taagaaagtactttcttagttctgggacacaaacttcattattgaactatcactaatatggaaccgtaacaggcatgctaccattatcagccttgttccttcaacaaccgtgtgccctattacagcagttaccttttgtccatttggtggcacaatacatttgggggcaacaaataccacagctt

SEQ ID NO: 103034 - DNA, 515 bp, Zea mays
  Clone ID: MRT4577_25474C.1
tttttttttttttttttttttttttttttttttttgcacaaaacaacataagatgaactttatcatgggataagatacatttgaccatttgttgcaaaaggaaaataaaatgcaagggctactccaacaacttagtatacactacatacaccgtatatgtccaaccaaaaagaacagaaaagacattcgccgggggttcttaaagtatgaaccatcaatcgtctatcagtttttaacggcaacttatcatcacctcgtctgaaaggttatcagggcagcacgaattttgcagtacggccagaagccagtagtgtgtgcttcagcacagttcccgggcaaattttactactatgttcacgagatatcatcaggcggacatgtggaacagatttccagctttcaccaagagcaggcttgacagcaccattgccagctgaacccatatgattggtcaccaaaacagctagattatgctcataggctaacttttttaggatcatcgccagggatatcat

SEQ ID NO: 103035 - DNA, 691 bp, Zea mays
  unsure (1)..(691): unsure at all n locations
  Clone ID: MRT4577_25475C.1
ccggccgggctctaaaccggcgaccaggagaacttctcctgtcgacgggtagctcggcgtgggggcataaccctgccggcaaccacgggtcaaggctacgatctacgtagccgaggtcctcctaccttgggtttaccactctagtttcgctgatgatgatgggatcacaaaagcttgcagctgtcctttgcttccactgaaaactcatatcaagggcccggcaccagcctctgaccctgataaagcggacattgttgatgaagccataactttctttcgagccaatgttttcttcaaaaatttccatgtgaaaagctcagcagacaagattggagaaagttcctgtacctggggaaccagggtttcctttccctggacttttcactcttccccaatcccaggaggaagcagaattgttgaggaattatttgaagcagataagggaggaaacaagtggaagattgctcaactgtgcatacagagctaatggctttccaaacaagtggtggttggcttttgctaagaggaagttcatgaacattgtcatcctttagacttgggctttttgtaccaactggttcaagctgttttttcactcatgatcgtgtgaagtatccacacacaacaaagatagttatcctacatcccanagtaacaagccaaagacttcgatgataggatagatgaatga

SEQ ID NO: 103036 - DNA, 662 bp, Zea mays
  unsure (1)..(662): unsure at all n locations
  Clone ID: MRT4577_25476C.1
gcaaaaccaaatccaatcctcgatcggccgcgtgcacggcatggcgtctccgccgccggatctactaatcgacgacgccaccgccgagattctccttcgcctcccaccggatgacccagcgtgcctcgtgcgcgcctcccttgtctgcaaggcttggcgggagctcctctctagccccatcttcctccgccgctaccgcagattccacggcgcgccgcccctgcttggcttcctctacaacatctacgacgaacgcccctgtgctcgattcgtcgtcgccgccgacgccgccaccaccttccccttctctgcaccggcgttcgaccaattcgatttgtggttcatcgagtgccgccacgggcgcgcgctgctacaaactttcgagcggcatgcgcccgcgcgcctcgtcgtctgggacctcatcacgggcgaccagcagcacataccaatgcccgtgcccgggtacccttacttctgccgcaccgcagctgttctctgcgccgcggatggctgcgatcatcttgactgccacggnggcccatacctcgtcgtcgtcataggcgcctacgaagaagatactctcaggtgggcgagcgtctactcatcggagactggcgtatggactacgtcatcctccattcaaattgatgcctacgtcgagc

SEQ ID NO: 103037 - DNA, 1161 bp, Zea mays
  Clone ID: MRT4577_25477C.1
aagtggatcattcccggctggaaagtttcccgatccacattttaattgtcttcggctggccgggccgggattattccccggactattctcagccattttccctgaatctagccagggaactcacccacgcccgcatcgcgtggaattccacgcgaaggcgaggggagggcaacgcatgcggctagcgaggcgatggctgcacgacacgctgacgttgacgcctgtgaccatcgatcatccattgttcatctccatccccttcggtggccgattttctctccggtttaccactctagtttcgctgatgatgatgggatcacaaaagcttgcagctgtcctttgcttccactgaaaactcatatcaagggcccggcaccagcctctgaccctgataaagcggacattgttgatgaagccataactttctttcgagccaatgttttcttcaaaaatttccatgtgaaaagctcagcagacaagttattgatctatctgacgttttatatcaatattgccttaaaaagactagaaggttgtcggacactagctgttgggactaaagcaatcattaatctgggattggagaaagttcctgtacctggggaaccagggtttcctttccctggacttttcactcttccccagtcccaggaggaagcagaattgttgaggaattatttgaagcagataagggaggaaacaagtggaagattgctcaactgtgcatacagagctaatggctttccaaacaagtggtggttggcttttgctaagaggaagttcatgaacattgtcatcctttagacttgggctttttgtaccaactggttcaagctgttttttcactcatgatcgtgtgaagtatccacacacaacaaagatagttatcctacatcccaaagtaacaagccaaagacttcgatgataggatagatgaatgacataagataaattatttgttcccaatttgcgatgtataaccgtgggaacagtaattatcatgttgtattgccttttgtaattctcaccctgctatatcagagagacgaaacctcatacgggggtatatttgtatgagtatattctacaatgatgtctaaaacgagacagttcaaatgtccctactattggtttagtatccccaaaaacttcatagtattg

SEQ ID NO: 103038 - DNA, 1377 bp, Zea mays
  Clone ID: MRT4577_25478C.1
cattgggtacctcgaggccggccgggccagccagccgccgctccctgttaccgccgccgccctctgcttctcttccccccacccatctctctctcccagccggctctctctctctctcctctcttctccctgcttcagccgattccaagccgctggacaccaggacgccgagcaagccaggctgcccagccgcgaccccgagcgcccctgcccgaccgcgccaagcgcgcgaccccgccagggagccccagccgcgaccctgcgcgacgacccgccgcccagcgcacgacgccctgcaacccgcgcgcctcaagccgaccgaagccaggaaccgaccaagccgccaagatccgaagcgcccgtgaccgttcttcttcgcgagtaaaggagcatttagtcatccggcagcgacgatcctacagggggcaaacacgatctctgcccctccttccccaaaatcatctctctcccgatcttggcctccccagattcaccacctgctctcctctccggctacgaccttggctcatcctgattcggacacgcaacatggtttaccactctagtttcgctgatgatgatgggatcacaaaagcttgcagctgtcctttgcttccactgaaaactcatatcaagggcccggcaccagcctctgaccctgataaagcggacattgttgatgaagccataactttctttcgagccaatgttttcttcaaaaatttccatgtgaaaagctcagcagacaagttattgatctatctgacgttttatatcaatattgccttaaaaagactagacggttgccggacactagctgttgggactaaagcaatcattaatctgggattggagaaagttcctgtacctggggaaccagggtttcctttccctggacttttcactcttccccagtcccaggaggaagcagaattgttgaggaattatttgaagcagataagggaggaaacaagtggaagattgctcaactgtgcatacagagctaatggctttccaaacaagtggtggttggcttttgctaagaggaagttcatgaacattgtcatcctttagacttgggctttttgtaccaactggttcaagctgttttttcactcatgatcgtgtgaagtatccacctacaacaaagatagttatcctacatcccaaagtaacaagccaaagacttcgatgataggatagatgaatgacataagataaattatttattcccaatttgcgatatataaccgtgggaacagtaattatcatgttgtattgccttttgtaattctcaccctgctatatcagagagacgaaacctgatatagggtatattctacaatgatgtctaaaacgagacagtttaaatgttct

SEQ ID NO: 103039 - DNA, 416 bp, Zea mays
  Clone ID: MRT4577_25479C.1
ggtccagaattaccgggtcgacgcacgcgtccgcccacgcgtccgaataattcagcggtcgtcgaatactgcaggacgtcaatggctgcgctttctgggagcaccgctggacttctcggcctcaccggtttcttcggtttcggcttttatgtattcgctgttgttggcctttggggacttttgatgctaaaagcaggttcgcaatggaaaaaatattttgttaatagacgggtcatactgaccaatggtttcttcggtggattattcacatacatcttgttttggacatttatctacggaatggttcacgtttattgagggaggatcaaatgtgccttttcattctgcatttttaatttaattatataccatttttatgtttgttgttctatttattacaataaaaagtccttttt

SEQ ID NO: 103040 - DNA, 355 bp, Zea mays
  Clone ID: MRT4577_2547C.1
gacacacataaagcacaacactgttcccatattggcagccaagatagccaggcttcttgtgctccttggccttcctgcatgtgctgctaccgctaccatcttgcctaaaagctcacaaggttctatagattacctttttcccgcgaccgtctcaccagttgagtatccagcttttcaaaactccatggttcaagcgtacatgcaccaacgcgtattaacagcttgcgtattaactctataacaaccgtatgctctacagtcacaagccttattacagcatttgcctctgcagcgtatattggcacaacaactacagggcacagcagctaccaacactagagctagcagaccttgc

SEQ ID NO: 103041 - DNA, 529 bp, Zea mays
  Clone ID: MRT4577_25480C.1
aaaaattttttttttttttttttttttttttttttttttttttttttttttttttttttttttttttttttttttggaattccaaccggaacggggtttttatttaaaacaaaaaaaccctgggcccgggggggggggggggtttttttttcaaaaatccccacgggaatttcacgggccaaacaaagcaaacatatagccttgggaaaaataggggggggcattgcccaacccccaccattgccagccccccaggggaagggccgatcaaaaggcacccctaaatcttgttgaagggaactttttcccaaccctgtccctccccgtaaaccggcccaacgcacaaattgtccccaatgaaagtttttacaaaaacaagggcccccacaatgggcaaaaaaatttgcaactttttgataccatatccaactgggacaagcttggatgccccccaaagcaacccttccatttggacactcctaacaagttcctcgagcttggccatttaagtctaatcgccccatgggtt

SEQ ID NO: 103042 - DNA, 584 bp, Zea mays
  unsure (1)..(584): unsure at all n locations
  Clone ID: MRT4577_25481C.1
ctcatcttcgtctctttcctcaccccgacccccccgcaccgactcctccacgcgcacgcgcgcggcggcggcggcggagtcgggagaggtccctggtgctgcttctcgctcaacccgtacgctactccttcctctccgtatggcttccgccgccgtggaaaccctcgtctcgttcccaatcgcatcccgtccccgctcgctcctacgccccttcccgcggcgacctgccgccgccgccgccgccgggggatgcgcgccttcgatccggatatccgccgtgccgccgcggggcctcgggctcgcgctggtgcacnccgcgcgcgccgctgcccgccagcggcgcgcgcgaatgttgagcacggcggcgacggcgcctctggtaacggcgagccgtcgtcctcgtccggggacggcgaccgcgacgcggctgcggactcggggggcgacaccaccggcacgagcaccacgagcgccgcccagacgccgccgccgccctcgtcgaagaggggcgaaaacaagtggcggcggaggctgactaagggaggtggcgtcgggcgctggctatgggagcccatagtccaggg

SEQ ID NO: 103043 - DNA, 515 bp, Zea mays
  Clone ID: MRT4577_25482C.1
accgttgcaaaggggggctaaaccaaatgtcttattgttgaacagccgcccttcactattcaccacgggaaaattcccctcccctggggggaaagaagcaaagggaaaataatgcccggtatctcccaaaccccgtttaaaaaaacatgggcctaaccaacccaaccttggagcgtccaagaagcacgctctaataagggcccgccctgttttatgagactatgatagccccaaaaaacaagaaaagctatccgcgggggtcccaacaacaaaccctgaaaaacccggacagaaccaaaaaactttcccgctgaaaagtgacggcccccaatgctcaaaccaacaaccattggtatcggaattggaaaaaacacccccacaggggccaccaagggagttctccaaacaacaaaaagagcccagaaaacggctgaaaatacaattccgaataggctatttgcgccccccaccttatccactttaacggagtggggcattgaaaacctgggcccaac

SEQ ID NO: 103044 - DNA, 169 bp, Zea mays
  Clone ID: MRT4577_25483C.1
acgcccacgcgttcgctcacggctcagtatcactctatgctcgtggtcaatgtacttggtacgggggtgtgactactgtacccagaatgactgctacagtgattgtggattccttccaccactgttgcctgaccaggtccaaaggcttaagcacctcatatcgctaact

SEQ ID NO: 103045 - DNA, 325 bp, Zea mays
  Clone ID: MRT4577_25484C.1
ctaaggaacccaacatatgaattcatattatctcacagcaaaatcacaatatcatatgaatatgtccaacaaaaatatttcattccacaacatataatctcactacaaaacatatatatgctgtaacttacaattcaagcgaaaatcaaataacttgcactcaaagactcaaccattaaacataattgaacttaatcctataacttcaagtcttcaaatatcgaactaccttactagcttctattacattcataaggatacgtgtcctattgttgcacataagactaaacatggacgcacttgacttcttttgaatattaatagt

SEQ ID NO: 103046 - DNA, 191 bp, Zea mays
  unsure (1)..(191): unsure at all n locations
  Clone ID: MRT4577_25485C.1
agagaggaaaatgtctagcgggcttatggggccagtgggccatgggatttattacatatacttacaaacaacattctcatctgatggtgacgccaggtaaagaactaacgaacgagcgagatggtgctangattctttctctagggaagggggaatcacccgaccggtctagtacgtggcccaggattttg

SEQ ID NO: 103047 - DNA, 480 bp, Zea mays
  Clone ID: MRT4577_25486C.1
agtaccgcaccaaaagcaaggttccatagcacatgaaaaatcatacgtcacacagcgcacgtgagtgggccaccagggtgggttcgctagcaaccgaaagatggctaccacgcgaagagagcaacaccggactcatcaaggtgcggttgccctacggacacacaagggttccacgacaacagtcgctgccctcacatgtcatcggtctgcacctaccacacgttctcgaacttcacctcgacctacacagagtactggtactgctgggactaaaacacgaggacgttcatgaacctgtcggactccgtaaactccatctcgtacatgccctcgaccgtgtaccagtgcaagaaaagcttactcctgaacatagtagcgaactgacacctcacaccacgggacatattacgagatggaggacaagttgccctttaacttggacaccatacacagggccatgagccggatatggcacacgct

SEQ ID NO: 103048 - DNA, 208 bp, Zea mays
  Clone ID: MRT4577_25487C.1
taggacttaggagtacagggctaaaacccctacaaagaggggccggagtaaaatgggctttgagagaacaaatattggcctgcccgcatttagagctacaacagctatcgtacaacatggccattaccataaagagacatgggtcatcatctagctatattaaacgactagggtatttcccagcaacaaggcctgagactgagagggt

SEQ ID NO: 103049 - DNA, 446 bp, Zea mays
  Clone ID: MRT4577_25488C.1
acgccacgcgtgcgcggacgcgtgggtaaaaaccaacatgcttcttgtaaaaaaaataagtatgattttgttgctgtaatcctttaataaagcgttatgtttaggaagcaaagtagggtattgaatagactgcaactaggaatagagaaaccttgctattgggagccatatggcatgacaccaaagtataatagacgattgtgttatatgaattgctagaatggtagagtgggctagtttttagttgtgaggattaagctgtcttatgttcctgttaggccacaggttttcatttgactggtacatcttttgtttgaaattagacagcacattagaactgtactgtgaaatgactgtgccatgatgcccccctattcagtctaaaaataaatagttgcccccctatccaggttaaaattatagtatatttgggagtctctggcact

SEQ ID NO: 103050 - DNA, 452 bp, Zea mays
  Clone ID: MRT4577_25489C.1
aaagcgcagactctttgaagcaggatattgagctgcgcatatactgaaaatacgaagtgtaacaaaatgaatatacacacacattacagggtacatcgttattggaataattccattacctttttctccgggaataaaaagacatgaataccttatctgcatgagggaacagccaataccggcaactggatacgcagaacatttcatttgccctagttacctggaaaaggatcaaaacccggtgaatctgtaaggcgaactggtgttataggatacaccacaacacaggctccaaataacacgacaaccaatgctgtcaagccaactaagaaggcctctgtgccaaatatggcgaaacctgaactcttgaggaaagagaggttctcaagaaagcctagttctgctttagcccgtgttaagatgttcacaaagagcccaaaagttcgtgccaa

SEQ ID NO: 103051 - DNA, 391 bp, Zea mays
  Clone ID: MRT4577_2548C.1
attcggctcgagcggggagggggtggtggttttggacgctcaggcggtggaggatctggcatgtctggattaggccgttcaggagttgcattcggagactcgatattgggccgttccggagctggagggtttggcaactcacgatatggcccgtcaggatggcactggtggattcccgcactacgaaatgacccatctgatggcatccagggaggatctattgtgtttgtgttagtgctgttgggactaccacttcggagtcctgggttaggaacgcctgctgcctttggctacaagcactcacgacagacctagacctgatagcaagtctggaattagggccatactgcgccagcatgatgccggtaatgcggtatataacactggatat

SEQ ID NO: 103052 - DNA, 630 bp, Zea mays
  Clone ID: MRT4577_25490C.1
ccggccgggaactccctgccgtgcaacgggggggagatcttgtgttctcgtaggctatgccttccccgatggctcgcgtcctgcaccgccgactactcctcctagccgccgtctccttcgccgagggcgcttctctccttcgcccagctgatgcaatgcgcccgtatgttttggttctctccggtgaggacttcctcaaggattaggccgcgcacccgtccctcccctctgccgactccaccgacgacgacgggtgggacgacttcgacgacgattcaccagccggcgacccgcttctctacccgtgctcctgggtgcctcttcgtgacccagcaagccctcccctttctggcgatgacacggactcctcggccgacgcgctcttcatcgtgggcgcccgcgccatgctcttcgcagcgttcgatggggacgactccgcgatcgccacggctgacgctcagatcgacgacgcgggacaggcggggcacccgggcgcgcaggccgtactcgcgtttctcaccggcgccgggatgacacgccccgcaatccgatcgctcacattcctgttgcacaagttcgccgtcgacgcgggagatcttcaatcaaagatggcccctccgtactactact

SEQ ID NO: 103053 - DNA, 465 bp, Zea mays
  Clone ID: MRT4577_25491C.1
agcagtggtaacaacgcagagtacttttttttttttttttttttttttttttcccttttttttttttttttttttttttttttaacaagggggaacaacaaattcggcccccagccaacccatggtttggtaccggggtaaaagaagctaaaaagctggcagaaaacggagggggggggcacaactggacccaaggcaaaaaaaacggggggttggaagggaaaaccaacccaaacccttttaagcccctccaccggggcccgaacctggggtggaagaaaagaaagacccccgggaacttgggggggtacccacggctaaaggggaaattcggaaaatatccataaaccggggggccggtcggccaggcatcaagggggcccaatccccccaaaagggcgggggataacaatgaaaggggcggggagaaaaaacgagcagaccggggaaaacctgggggttacc

SEQ ID NO: 103054 - DNA, 304 bp, Zea mays
  Clone ID: MRT4577_25492C.1
cattacgcgcccacaacccaccacaccagtgtcagtcatctcatcatggcgcaggcgtacgaggggtcctcctcgcagacgatccggtagccgccgccgccgccgaataacaaggaggagccggccccgccgccgccggcgaaggtcgagccgccaccgaaggagaatccaccgccaccggcaccgaaggaggagccaaaacccgccccggcgccggcgccgccgcacaatgtggtggaggtcccctagccgtggccgtacacgtgcccgtacccgtacccggcgtggccgtcagccgactgct

SEQ ID NO: 103055 - DNA, 427 bp, Zea mays
  unsure (1)..(427): unsure at all n locations
  Clone ID: MRT4577_25493C.1
cccgtttgctgtggnccttgcacctactccctgcacatctttgttgctcagattgtaccagctctgactcagctagttgtggcctaccctgctgcctacttgcaacagctgcttccattcaacctactgactntgtcgaactctgctgcgttcctcccccagcgccttcagtttcttaatccactagcggtggctcacccattggtcgctgccttcctcccgcagcatcaattgctgccctacaacctgttctctttgctcaaccctgtcttgtcgcggccgctccccttcgttggcggtgccctcttttctcttccatatgagatgtnctcggtgttggtgccctctttccggcttgtgtttccttgaactcctcaatntnttgattgagatttatctcactctcctctttttttttttttctttt

SEQ ID NO: 103056 - DNA, 360 bp, Zea mays
  unsure (1)..(360): unsure at all n locations
  Clone ID: MRT4577_25494C.1
ggcaggccggaaaaacgaaaaaccccctgggggtatttaccccgaaagccaaccggggaacccaattccggggcggggggggggcccccaaaaaatccggggggccccccggggcccggttttcacccgggggaaccccccccccccctagccggaggcaaatcgatggccggccctgccggggggcttaattaaaaaaaaaaggaacccccggaacccgattcccacaaaacatattagacatttccgaaacccaggtccaacggtttaaattaaaatggccccgcatcccgcaaagggtttcccgcaaaacgaagggtaaccgggggctcctttcngccccccagtttttctggtttt

SEQ ID NO: 103057 - DNA, 445 bp, Zea mays
  Clone ID: MRT4577_25495C.1
cggacgcgtgggaccagacactccaaacacttgcgccgccactgccttacaggtaaggccgtcatggtctccggcttgggcgtgtgtgcgaagcgcatcgtggtggacgcgcgccaccacatgctgggccgtttctcctggatcataggcaaagagctgctcaatgggcagaaggaggtcgtcgtacgctgtgaggagatctgcatgtggggcggtctcgtccgggagaagatgaagtaccttcgctaactccgcaagcggatgaacaccaagccgtaccacgggctccatccacttacgagcccccgccaagagtcctgggcgcaccattcgcgggatgattcctcacaagaccaataggggggaggcggttctggcgaggcttaacacttacgagggcgtcccggcgtcttacgacaagaccaagcgtatgggcatccctgac

SEQ ID NO: 103058 - DNA, 292 bp, Zea mays
  Clone ID: MRT4577_25496C.1
agaccatattgttttatatttttttacacccatttggtttttaactatttttaagctcactggggggacaccacattaaagttcacaatggcacccccactgttttcaaatagtttattaccacatattggctccctccagaagcgaaaaaataaacccattccatatgggaagatgttgaagtataaactactacctgtcttagaaaaagctacctcaccccctcttataaagggtttggagaaaattctggaaaaactccctggaatgcataatgtactacagaagctgg

SEQ ID NO: 103059 - DNA, 247 bp, Zea mays
  Clone ID: MRT4577_25497C.1
tttcttttcacagcgatcatacagtttttttattatgtaaccattaacaacaaaacgggccagcccttttcatctaaaaaagtgacacaaccctggctatcacggtttaatatcttcccagcacaagcctttttcgtcaacaaaaacaatggagaagggggcggctccgagcgccattaccaaacgaggtacatcttgaaaggacaacgccatccactttgaagccacaccctaaacgccgcgggtg

SEQ ID NO: 103060 - DNA, 411 bp, Zea mays
  Clone ID: MRT4577_25498C.1
cttggttttttttttttttttttttttttttttttttttttttttttttttttttttttttttttttttttttttttttttttttttgggaaacccccccaaaattttttttttttcgggggggggtttcaaaaccccataacggcaactttttttaaagacagaatttttttaaacaaaacttaaacctaaatttggggggggtttttaaaaaaaaaaaattttagggggtgcgtaccccttaactcccccctaatgggctccaaaacaataaacggcccaacggcccaaaaaaaggtgttgaacccccaaaaaaaaatttgaaccctgagttgtttcaacaatttcccttgactccggaaaaattttaggggggaaccctttggggtgggaaaaaaaatttgttttttt

SEQ ID NO: 103061 - DNA, 419 bp, Zea mays
  Clone ID: MRT4577_25499C.1
gtcacacgtgcacgcacacccggagccacaaccccaaagccgtgaccccgccggccccaaagcctacctatatcctggttccacaatagtgaccgagaccggacataccgacgactcggttgactgctggcggcacggcaccgactaccttcgcagaccttggcctatcgcattggctggcgaatgcttgcaaagccctgggcatgcggtgccccactgtggtgcaggaacggtgcatatcgcgcgcgctctgttgtgcggacgtgctcaggatctccgaaacggcgagcggcaagactgacgcgttcgcgctgaccatcctgcaccgtctgggtgaggaccgctatggcatggtcgagctcgcgctatcccctacgcacgagctcgcggcgcagatatgtgagcatatactggcgctc

SEQ ID NO: 103062 - DNA, 574 bp, Zea mays
  Clone ID: MRT4577_2549C.1
tgcgcttttcaaaacgcgagtcgagtcggctctcttcacacactccgagctgataggggctgcccgagtgctttcggaccaagtcgatgggactgcctgcatgccgaactataacgagtggatgtagagtatcaacgggattgagctgtgcacaacgcagtataactaagtacagtgcagctcaaaagcctcaccttatcattcgacccgcccctagctaaggcaccccacttcatttatattcaatacatggctttaagataatgaaagggtggtatggtgatagcgaaggcaatgtatataatctaatcagatctgacctgccttaacagaccgtaccttagcatagcgacgtatggcatagccaactaccgacgcaccaatcatataccaggcgcgtgtagatactcgcatgaactggctggactgccatagtatctaaggccgccaatatcccatatgcgacatcccaagcgctagacagcatcagattggcacatccgcaatgaacggcctgtcctgatatgactgtgcgctcaaaagaaggtacggtgctgtaaaggactgacggtat

SEQ ID NO: 103063 - DNA, 504 bp, Zea mays
  Clone ID: MRT4577_254C.1
aaacggaaacagccataattattctcaataacccgggagcaaggcgggggaattaacgacttttacaacatcagggggggaaaaccacccaatactttataacagacccccataacacgatagcgggagcaactcacggcaaatcacgggataaggggaggacactggcctgatgctgcgtaataaaaaaacttttttagtactcggcaccctcggcgccatcctcgcccttatagaactcagggccgacctccttgtagtccttttcgagcgccgccaggtcctcacgggcctaaaaaaactcaccttcctccataccctcaccgacgtaccagggcacaaaggcacgcttggcgaacatgagggcaaacttgggggcgatgcgggaaaacacctccacgacactgggggagttggaaatcatgcacacggcacgctgcaccttggccaggtcgccaccaggcacaacgctaggaggctggtagttgatgccgcacttgaagc

SEQ ID NO: 103064 - DNA, 429 bp, Zea mays
  Clone ID: MRT4577_25501C.1
acaagctttttttttttttttttttttttttttttttttatttttttttttttcttttttgggctatttccatcaccctggccgccacccctagagggccaaagccagcacccaggcgggcggaaacaagggacacagccgcgggcccagggaaggcgtaatccgggcccaagcccacacccgggcgaaaccggaagcacaaaccaaaacccagaggagccaaacgggggaccaaaagggaaaaaacgggggggcccaaagagggagccaaccaaccgaaaaagcggggcgcccaccggccgcaaacaaaccggcaaaccccgggggccagcgggaaaaaaaaaggggccaacccgccgggagaggcgactgacccactgggcccgcccccccggccgcgggcaccgactccaggcccccggaaggcgg

SEQ ID NO: 103065 - DNA, 614 bp, Zea mays
  Clone ID: MRT4577_25502C.1
tttttttttttttttttccagccctggtgctcgcttgctgctccccatggccgctaaaatcccctgccctctcatggccgctgacccatggcaagctctgccgtcgatctgcgcagctgtcccggcatcgtcgcgcagcgagctccgccctggatttgcgcagccccaatacacgccgtcgatctgcgtagccgcggccacgacagctccctcgcatcgtgtattccgcctcatcgcactcgtcgtgctcgacaaaatgtcgcagcatgctgcaccttgaactgtgcagtcccgattgcgttgtcgtcaccccggaataaaatccctggaaatttggtggagaagaaggttcagttcaacactccctacgtgttcgatgatatgctcaaaccgctggtcgtcgtcgttcttgcaaaaaaaaatcaagtcggatcaggatgtggtacgctagttgatcacgtgatgcggaaatcgagctgagtcgaccacgagatgctgttaagcgtgggcttcttcgcaaggagatactgatgataaacctgaagatggataatctgaacgagtgccaacacaaaaggctggtcaccaagtgatcgtcatctaacaacactcac

SEQ ID NO: 103066 - DNA, 382 bp, Zea mays
  Clone ID: MRT4577_25503C.1
cgggccgaccgacgcgtccgcttcggctcctcccctctagctcatatcctctcacctacaatggccaccgccatttcctctctagtaactctctagaccgtacaccgccgatgccaggcccctgcctgattcttcgtatacctgtgcacccctatccgtatttacttccggccccacgccgtgcctaatgtgtcccgccgaagctcggacctgccactatcctcctgaccccatgtgctatacgcaccaaacacggtgacctcccataagctctacatgcggaatattcacaagaccgttacaaactacgagctccgcgacatgttcgctgcgcactgcaacatatatctgtccgcggatatgtacgacaagtatacaaatc

SEQ ID NO: 103067 - DNA, 573 bp, Zea mays
  unsure (1)..(573): unsure at all n locations
  Clone ID: MRT4577_25504C.1
tgtagggctggctcgcctgcatgtacgggcccggacttactggctggaccgacgcatgcgtctcgctctggactaggcgactgcgaccgagcccgagaagtacattgacatggaggaggagcacgaggtctgcaagaagaaggatggccttttcggcaagctgcaccgcaccatgtccatctccagctcgtcgagcgacgaggaagaggaggcgatcgatgagaacggcgagattatcaagaggaagaagaagaaggtgggcctcaaggagaagatcaaggagaagctgccgggccacaaggacggccaccacacggtcgcaccgtccccggcggccaggccccgtggagacccatgcccaccaccaggaggatgggcataacaggccgaacgttggtccgggcccgggttccgtggcctcaaccgtacgtgaagatgcacgttcaccagcacgagcacgacacggngttagtcgccagaaggtcgaggccgacgtgaagaccgggacccctctgcatgcaccggatgaggagaagaaggcctgctggacaagatcaaggagagctccccggt

SEQ ID NO: 103068 - DNA, 783 bp, Zea mays
  unsure (1)..(783): unsure at all n locations
  Clone ID: MRT4577_25505C.1
aattcggcacgagggtaaccatcatcgaactcatcaatattaagaccatgagcatccacgccttgatcatccccatcttttccctattgcttccttcaatttcatcttccacatcaagatcatcaagaatatattcttcatcctcgtcatcttcatccgctaaattagtctcctcttcctcaaggtcttcattccttctcacacacacaccaacaactctcctaggaaaattacgacctctgagatgtgcagatgcaccaatagcttcatcaacttggtcccatgataaattgaaatcatctccaagagcattgctaacatgagaagaattagctaatggatcaacccattcattgtcccaatcaaagtcttctaaaatcaaagatcaaagttttttcctttctcgcgtattttttgaaacctatcagccatctttctgttgtatgaaacatataccaagtcattcaaccttttgtactctaacctattcctctttttggtatgcatctacaagtgcaaataaaagtaaccaatgaagaactgaggataaaaaagtagtggcgaatagaaattgaataatttgactagctcacttacaaattcaaatgtactccaatttcgctcacaaccggatgatgaagcacanagactaacaatccgtcttgcanacttatataattcaatagtacgaccaccatatgncagccaccaatcaactaanatggncagaacanagaaagatatatgttacatgctgaaaatggnaggaaggctatcaatttt

SEQ ID NO: 103069 - DNA, 133 bp, Zea mays
  Clone ID: MRT4577_25506C.1
gagacgcgttcgaagacacatacggggactcttggtctttcgtgtggtccgactactgcgaatcgaagccgagatacgacggtgggcttcaccggcaccggatcaaggggtaaggggaagaagggagcagcct

SEQ ID NO: 103070 - DNA, 1332 bp, Zea mays
  Clone ID: MRT4577_25507C.1
gtcttcgcttccactccccacgttccccgcctgcttcctccaggccccggccagatccgcgcgcccgcggggaagagggcctcctctcctccctcctcccttggctcgcgctctggtcgaggaggcggaggccggtgccggcgggcgggcggggaggtaggtagcagcttgcggttgcgggagggaagctgcgcgcgctaggctgccatggcggtggagaagacgctgcccggcgcgagtgcggggaggaccgtgctggtcacgggcggggcgggctacatcggtagccacgccgtgctgcagctcctcctcgcgggcttccgcgccgtcgtcatcgacaacctcaacagctctaacagttttaggaaatgactatgcaacaagagacgggactggggtccgagattacatccatgtggttgaccttgctgacggacatattgctgcattgcagaagctttttgagaactctagcatagggtgtgaagcgtacaaccttggaaccggaagaggtacatctgtgctggagattgttaaagcatttgagaaggcttctgggaagaaaatacctctgatttttggtgaaagacgcccaggtgatgcagagattctgttttcagagactactaaagcagagagggagcttaactggaaagcaaaatacggtattgaagagatgtgccgcgaccaatggaactgggccagcaagaacccttatggctatggatcacctgactctatcaagcagaatggtcaccaaacaaacggatccgctgactcctccaagcagaatggccaccgcacaaacggttcaactgactcacccaagcggaacggccaccatgcgtatgggtctgctgactcacccaagcgcaacgggcactgcgtttttggatcatcagacctcaagccgaatggtaatggccacctgcgctgagcagaactgtttggcctgtgagctccctgtacattcggttgcgatgtgagctccctgcacgttcggtcgaggtctatcgtgaacccactatccgagattgatgtggatcattgggttgacaggtcatacagtatagagccggtggcagaggaattcctgtttgctgtgggtaaagcttatcttctgctttcgtgttttttcttgcttctttcgattatggtgtaggtcataatgtattagctgattatcctttccctgctaattggactttattacgcttcattaagtttggctgattactgtttaacggggaaaagttgcacctgtgaaaaaaacaccaaaaaaaaaaaaaaaaaaaaaaaaaaaaaaaagtactctgcgttgttaccactgct

SEQ ID NO: 103071 - DNA, 757 bp, Zea mays
  Clone ID: MRT4577_25508C.1
aaagagacttgtttcaactttttactccaaaacatttagttttgctctgcttaaggtaagtgtagtgagtatcttcgatattactttaactaccatttatgtttgtccttttgaaaatgtattaaccattaattttgctgagatagagctagatactcatgtacctctatgtttgtccttgtgatctcttgaaacttgctcttaattaagacctttaggccttgtagaattgtagtcttaatttatatgatgggtgacagagaagtagctttttctgaaatgggataattggataaactttttagtataattttgtggagtgttattggtgctgaaaaagatcgaggaagatagatttgtacttgttagtgtccaggggatttgcagaggaagcattttttggaaactagcaattccctgatagtgaggacgtcattttcccatcgggaaccttgcccttctccccaatacatctttgcttgtttatagtatgtatcttgtttccgccacatgagtatgaccttgtgcatctttttgttaaatttgcagtgttaatgaatcaaagttggatacgcggtctctggtcaatctggaggtaccggtagctcgtcttctcaaggtggtggttgtgtagataatctgctaacgcccttatgtacaaaggcatatctatcgtgtgatttttaatgcaatatagttattttgatttcttaacaaaaaaaaaaaaaaagggaggccgctcgcgttctagaactag

SEQ ID NO: 103072 - DNA, 1038 bp, Zea mays
  Clone ID: MRT4577_25509C.1
catcagctgcagtttatgatgagtaacaccaacttcttgcaaccgtgaacagacataacttctagaagttggtgttctcatcatcagctgcagtttatggatcacccaaaaactcaccctgcacagaaaattttcctcttactccaaacaatccatatggcaaaacaaagctcgttgttgaagatatttgccgggatatctaccgttcagatcctgaatggaagatcattttacttaggtacttcaatccagttggtgctcatcctagtggatatcttggcgaggacccacgaggaattcccaacaatcttatgccctatgttcagcaagttgcggttggtaggaggccagctctaacagttttaggaaatgactatgcaacaagagatgggactgggaagctttttgagaactctagcatagggtgtgaagcgtacaaccttggaaccggaagaggtacatctgtgctggagattgttaaagcatttgagaaggcttctgggaagaaaatacctctgatttttggtgaaagacgcccaggtgatgcagagattctgttttcagagactactaaagcagagagggagcttaactggaaagcagaatggccaccgcacaaacggttcaactgactcacccaagcggaacggccaccatgcgtatgggtctgctgactcacccaagcgcaacgggcactgcgtttttggatcatcagacctcaagccgaatggtaatggccacctgcgctgagcagaactgtttggcctgtgagctccctgtacattcggttgcgatgtgagctccctgcacgttcggtcgaggtctatcgtgaacccactatccgagattgatgtggatcattgggttgacaggtcatacagtatagagccggtggcagaggaattcctgtttgctgtgggtaaagcttatcttctgctttcgtgttttttcttgcttctttcgattatggtgtaggaatgtggtcataatgtattagctgattatcctttccctgctaattggactttattacgcttc

SEQ ID NO: 103073 - DNA, 341 bp, Zea mays
  Clone ID: MRT4577_2550C.1
agccctactatgtagccagcgggtgtttcttcctgctgtggattaagcccaaccgcgtggttaggcagtcaacgttaggttgcttggccttgcaatgactgtggctgctggaattatggtccaatatggggggcgtgctctggtctggtttattccggcctattaatggcccagggcggacactaacacgttaccagggatgacaccgacttataggccggccgttgtgagggatccagactaatttgcattgacatcacatgtattgaatcctctatatggcacgttaaaataataatgggatggaagcattacaatcaaaaaaatgaaaaaaccggggg

SEQ ID NO: 103074 - DNA, 1377 bp, Zea mays
  Clone ID: MRT4577_25510C.1
cttttgttttaaaagttttagttggtgttctcatcatcagctgcagtttatggatcacccaaaaactcaccctgcacagaaaatttcctcttactccaaacaatccatatggcaaaacaaagtctgctgcctctttttcaatgtgaaaacctgctgaagattgttagctctctaagttgactgaaaagtttcaaatggttgcagctcgttgttgaagatatttgccgggatatctaccgttcagatcctgaatggaagatcattttacttaggtacttcaatccagttggtgctcatcctagtggatatcttgggcgaggacccacgaggaattcccaacgatcttatgccctatgttcagcaagttgcggttggtaggaggccagctctgacagttttaggaaatgactatgcaacaagagacgggactggggtccgagattacatccatgtggttgaccttgctgacggacatattgctgcattgcagaagctttttgagaactctagcatagggtgtgaagcgtacaatcttggaaccggaagaggtacatctgtgctggagattgttaaagcatttgagaaggcttctgggaagaaaatacctctgatttttggtgaaaggcgcccaggtgatgcagagattctgttttcagagactactaaagcagagagggagcttaactggaaagcaaaatacggtattgaagagatgtgccgcgaccaatggaactgggccagcaagaacccttatggctacggatcacctgactctatcaagcagaatggtcaccaaacaaacggatccgctgactcctccaagcagaatggccaccgcacaaacggttcaactgactcacccaagcggaacggcccccatgcgtatgggtctgctgactcacccaagcgcaacgggcactgggtttttggatcatcagaccccaagccgaatggtaatggccccctgcgctgagcaaaactgtttggcctgtgagctccctgtacattcggttgcgatgtgagctccctgcacgttcggtcgaggttttttgtgaaccccctatcccagattgatgtgggtcattgggttgccaggtcatacagtaaaaaaccgggggcaaaggaattcctgtttgctggggggaaagcttattttttgctttcggggtttttcttgcttctttccaataaggggtaggaaaggggtcataaagtattagctgattatcctttccccgctaattgggctttattacgcttcattaagtttgggggattcctgttttaaaaaaaaaaaaaaaaaaaaaagaaaaaaaaaaaaaaaaaaaaaaaaaaaaaaaaaaaaaggggggggggcacgaggcctcgtgccgaatt

SEQ ID NO: 103075 - DNA, 298 bp, Zea mays
  unsure (1)..(298): unsure at all n locations
  Clone ID: MRT4577_25511C.1
cgcgttttgaaacgcccccgaacagagacangccgcggggaggttttagaggccaactcgcgctttttctctcgcaaatcaacaggggggtacacatgcatcggacacccatggaaccgaccttgctgcaacctacgtacagacctgtatcagctgtttaatggcagccggaccatacggcagtacccggttcagagcgcaacgcgccatgtaccgggaggagacccgaactctggagcggcccggacggcggatgcttgctcaccactgaggtaacgggaagcggacagtgaaagcg

SEQ ID NO: 103076 - DNA, 2208 bp, Zea mays
  Clone ID: MRT4577_25512C.1
ctcgccgggatccttttccgcgacgctgagcgcgacccgcgagtggtgcccggccaccaggccgcacggcaccaccgacaacctgtcttccggccggacacgctgctgcgcggggcccgccgcggcgccgccccagctgcacgcaacgcaactccagccgcgcataaactcggtcgcccccgcacgcgtcgccacccctccctccattccatcgtcttcgcttccactccccacgttccccgcctgcttcctccaggccccggccagatccgcgcgcccgcggggaagagggcctcctctcctcctcctcccttggctcgcgctctggtcgaggaggcggaggccggtgccggcgggcgggcggggaggtaggtagcagcttgcggttgcgggagggaagctgcgcgcgctaggctgccatggcggtggagaagacgctgcccggcgcgagtgcggggaggaccgtgctggtcacgggcggggcgggctacatcggtagccacgccgtgctgcagctcctcctcgcgggcttccgcgccgtcgtcatcgacaacctcaacaactcctccgagctggccgtccgccgcgtcgccgcgctcgcgggggaccactcccgcaacctctctttccacaagattgatctccgtgacaagggagcactggaaatggtttttgcttctacaagatttgaagctgtcattcacttcgctggattgaaagctgtgggtgaaagcgtacagaagccattactttattatgacaacaacgtcattggcacgataaatcttctagaagttatgtctgttcacggttgcaagaagttggtgttctcatcatcagctgcagtttatggatcacccaaaaactcaccctgcacagaaaattttcctcttactccaaacaatccatatggcaaaacaaagctcgttgttgaagatatttgccgggatatctaccgttcagatcctgaatggaagatcattttacttaggtacttcaatccagttggtgctcatcctagtggatatcttggcgaggacccacgaggaattcccaacaatcttatgccctatgttcagcaagttgcggttggtaggaggccagctctaacagttttaggaaatgactatgcaacaagagatgggactggggtccgagattacatccatgtggttgaccttgctgacggacatattgctgcattgcagaagctttttgagaactctagcatagggtgtgaagcgtacaaccttggaaccggaagaggtacatctgtgctggagattgttaaagcatttgagaaggcttctgggaagaaaatacctctgatttttggtgaaagacgcccaggtgatgcagagattctgttttcagagactactaaagcagagagggagcttaactggaaagcaaaatacggtattgaagagatgtgccgcgaccaatggaactgggccagcaagaacccttatggctatggatcacctgactctatcaagcagaatggtcaccaaacaaacggatccgctgactcctccaagcagaatggccaccgcacaaacggttcaactgactcacccaagcggaacggccaccatgcgtatgggtctgctgactcacccaagcgcaacgggcactgcgtttttggatcatcagacctcaagccgaatggtaatggccacctgcgctgagcagaactgtttggcctgtgagctccctgtacattcggttgcgatgtgagctccctgcacgttcggtcgaggtctatcgtgaacccactatccgagattgatgtggatcattgggttgacaggtcatacagtatagagccggtggcagaggaattcctgtttgctgtgggtaaagcttatcttctgctttcgtgttttttcttgcttctttcgattatggtgtaggaatgtggtcataatgtattagctgattatcctttccctgctaattggactttattacgcttcattaagtttggctgattactgtttaacggggaaaagttgcacctgtgtacgattatttatttgtacctgtaatatttatggagaactagcctcgccgcaaatagccctgatgaattcagctgcagtttattcccagattggactgttgtttaatgtgaatgtaaatatgatgcctctgcaaacattgagcagatcccaatcccgacatcagtagcacaactggggcact

SEQ ID NO: 103077 - DNA, 338 bp, Zea mays
  Clone ID: MRT4577_25513C.1
attattttttttttttttttttttttttttgggtttttttttattttttggggctcacggaagcagtttaattcacaaacggggagatcttaaaagagagtttacacaacgggccattttgggcctacaacatacaagaccacacccaaaacacattggcacgcgaagtctgaatgggtttctgggcccctgttcaagttaacggatttaaattgaaagactgctgggaccattcatttccgttcttcatttaaggggccattgcataagagaactttttcatgggcggccaggaaaaaacctagccgaaacccaaaagttggcaaaaccatttttat

SEQ ID NO: 103078 - DNA, 537 bp, Zea mays
  unsure (1)..(537): unsure at all n locations
  Clone ID: MRT4577_25514C.1
cgggcttcacgataacccggccgacttcatgctcgacctctcaaatggtgagtctctctcgtgctttacgctaccttcctttccttgttggcctcagcaaaaggctttgcgttgcatgtctcttattatgcgttgtttcagtttcctgtgcattacctataagacaagtgaaagagctagctaactaaccaccaaattcatcatggtctgatcctctgcgacaggaaaagcagacacacacacacacatacatatatttctcttcattcttagctaagctagctaaccaaaagattatgaagagttgaaacacacatttagagacatgagagagaatcactagattgaccagatcactactagaacaagtggcgttgaagtctggagcaagtgtctgtgtgttcttgctcaccttttttctgcaattgatgagaggattagattcatcatgagacccgagacaagcgcaacgccctgtgagtgaagtgtggagtgcccccaacaaagaaaanagagagagagagaggggggagagaa

SEQ ID NO: 103079 - DNA, 268 bp, Zea mays
  Clone ID: MRT4577_25515C.1
ggacagaaaatgctctgaccttgtactgctctgtttggaaacacaggcaaagggcggcacgcacgctggctcacacacatacaatacacacggccactccttttcctaaagacgcacagatccgaccgaggcactacattaagagatgatagcacgtgctgccgcgccgggccgggatcgatatatatggccggccggggggcacgcgcggaacgccacacctaccagtcgttcgttcggccctatcctccagttcattactataaca

SEQ ID NO: 103080 - DNA, 721 bp, Zea mays
  Clone ID: MRT4577_25516C.1
ctgcgatagtccattagtccctgacaacctgtacccggacccgtctcgcctcctatggcctgtgcctccccagtccccacggaggccgccggcatgcctctcgcggccgttgccgtcgcacctccacgttcggcgtagcgctggggtgcggctgctcgacgccctctgccaagcccctggcggcctccacagggcgctcgccaccgcctcctccacgccgcgtcgcccgcggtcgtggcctgtgctcgccgtcctcaagtccatctacacgctctccaataacacgtacgtccaacgatcgtcgagggcttcctcggcctccaggtgcacaaggggttcaggaacgggatcgacgcgctcggggtggtcgtcaaggtcgccgtcatcgtctctgaggtcgctgtttgtgtggggggccgattctggggttatgggcgcgctcgctgcgtcatgttcctcggtttcgccaccccagtagcttagtcctccttggctgtagcaaatctgaaccccccaagttgctttcttcgatccggcctcagaattgctctccctcgttgtgcgagttagcctttagcacatagtgactgtctgtacatttgcttttgtcagatatatgttgaggcggttcttcatctagtgcgtgcaactatgttcgtgtacgaatagacaagtgtggttcaagaaacttgtacaccaaaaaaaaaaaaaaaaagcggcc

SEQ ID NO: 103081 - DNA, 411 bp, Zea mays
  unsure (1)..(411): unsure at all n locations
  Clone ID: MRT4577_25517C.1
cggttttggaaaaattcccgtgcctcgcgcggggaccggnccagttgtcgacttgttactgtngcgacggaggaacgactgggcggccgttgtggtgggctccaccgggttggtcgctccgatttttgggatttttttttttggtggcctcttgttgttgggggggaagcaagccanccactttacctanctagtgttccggcggggggagtggtgactattcgggaaccttgtcctgtggtcgncnctggtccgcgctgcngnnngagaggcgggtgggggcgggttcggngaacccgggcggggaccttgctggggggggggcgggggggggggggtgttgtttggggcgtgtgtgtttttgtttttggttgtgttgngngggttggttgtgtgtgttgtgttggtgtg

SEQ ID NO: 103082 - DNA, 845 bp, Zea mays
  unsure (1)..(845): unsure at all n locations
  Clone ID: MRT4577_25518C.1
ggttattctaaacttctattccagcaatagaatgaactatacatgtctttctgatgaattaacacactgttctgatacaattgagaaatatttactttttgcaaaatgtgtagagtgagttttgtggacatgctacatggtagtacgatggcaattcttctttcataagtaatattccctccgtcccaaaatagtattcgtcttagcttttgttttttatgtctaaattcaaatggatggtgatgaatctagacacataaaacacatgcatcaaatattgtataaatccattaattatctaaaacaaattttaatttgggacagagggagtatgttttttttgtttcccaagctaattcgtatattgaagtagtgaatttgattgaactgtagagtatcttgattcttgaatgtaggggtggtaatggattgcgatccaaatggttctttacaaaatggtagaaccctaaataaattttagttcaaaaataaatagaaatatggtccgattctaatccgatctgatccttaaatcttatagtgtaaaatttaaagcccattgtcacccctacttgaatgacaataatcaatatccactggtagtttatttacaactggtgctgcttagatgtgacgttttgcaaatacagatctaagctatatacttgaattagatttgtgtcgaaccatggaactataattgtaagggcacaggaatctttccttttctattaacttctttaatccagctaattcaatgcttattacacaattttactaaatgnatgctctgttttgaaatgtangtatgctnctctatcatgttcagcaagggatcaaaacat

SEQ ID NO: 103083 - DNA, 323 bp, Zea mays
  unsure (1)..(323): unsure at all n locations
  Clone ID: MRT4577_25519C.1
anaaacccaatttttttttttttttttttttttttttctttcggttgctctagctttctttttttggtctctttttgccttatctttcttcttttttttttttttttttttttggctgttttcccgccccccaacctggcaaaccagctgtgccaattactttaatgactcgcgtcgcgagcggggttaggcgttgtgcacttttccgctctcttgctctctctcttcattggctcggtgcgctcggtgggccggtctgtgccagctctctcagctgagtcaaaagcggtattccctccatccgcggattccggaggtaaccc

SEQ ID NO: 103084 - DNA, 272 bp, Zea mays
  Clone ID: MRT4577_2551C.1
gggaaggcatgagacaccaaccaactctagttaccgtctacgacgaggaacgataacaggctgattcgatcgagcatacagcggcgcggcgggcacggccgtgtacccgactaacggcaaagcaccttcagctccccgtcgccgcagtggatcccatagccgcgtaccgtcacgagaaatcaggagccattgctggaaccacctcagcaaccctatgcgtgtagccaacccagcggccgccaccggtactagaaaccgccgccgccaccgcc

SEQ ID NO: 103085 - DNA, 477 bp, Zea mays
  Clone ID: MRT4577_25520C.1
aaatccatcagcatggtctgactgggccccattctattttaaccccccccaaaaacattcacattttggggacgatgcgatcaagtaaacaacaaccacccggtggactaggccaacctgaatgaatcaagaggccccccgacaaaagaaaaggagaacggcccctaattaacgggggggaaaaaaggggaaaaaagttgagttgttcagcctgccctggggaacttccaggcacaacaaacagagcacacccctcacatcaggagggggggctcagcccaacaaagggaaccctttagcagggctgaacactcagcaaaacttccagggatgggggcagcccacccatgggacaaacggtggcatcggatcatcaacactcccagtttgcaggtggagaaagacgaattccgctgcccacatggggcacacttgaactgggccgccgtcgccttgggggcccccccccccccgcag

SEQ ID NO: 103086 - DNA, 475 bp, Zea mays
  Clone ID: MRT4577_25521C.1
agcagtggtaacaacgcagagtacttttttttttttttttttttttttttttttattttttttttttttttttttttttttttttgttttttttcgggcgccaaccaagcacacacaacaaacgcttgatgtgccataaataggggagaaaaaaaattttaaaaaccaaccaaaaaaaggcccgacaatgggtaccaaccaaggcgccccccgggggggaaaagatgggaaaaacatactgacccatccaagacgaaacctaccttagacggccttggaagggggggcgaaaaaggaccaggaggaagccatgatcccgggcttctacccgcggacgaacctccagggggcgcgcatggggcacctctgggccttgcagggggtggccaggaccccggccgccctttaccccttggtcacccgaaccccggaggtgccccacaagttgggcccaagcgggacccaggggaaaccc

SEQ ID NO: 103087 - DNA, 408 bp, Zea mays
  Clone ID: MRT4577_25522C.1
ggaagggatggcaggaacaaggtagggcttcggctcttctttatcggtatcggtagtctttcttgctataggtaatgtcttgacttcgttgatggttgcaggaactgcttcagtttcacaggcccctttcagaacgatatgtagtagctcatcctaattgaagtatttcattctggcgagcgctcctttcattggaaatcttatgagtgtctttcctggtttttaaagacgggttttcatatgccgtctgcgcttggcttcggctgtagaaagaagtccctttctctcaggcaagaggagccttatccaggattcgctctagccgcttgacttatctgcttttggctctaaaggtatcactctggcttttttctatcttttcaaactattaaaattctgcttttccag

SEQ ID NO: 103088 - DNA, 176 bp, Zea mays
  unsure (1)..(176): unsure at all n locations
  Clone ID: MRT4577_25523C.1
cgggtattggatggatagacacggacagacaacaaacaaactgatcgtccaccaaaacatgaagagccagcagcatgtcgtcgacctcgctgctctcatcgtcgtcgtcgtcgccaccatattggtacagacgccgccgccgcgaggtgcggaggcggctanttacttcgggtaat

SEQ ID NO: 103089 - DNA, 391 bp, Zea mays
  Clone ID: MRT4577_25524C.1
cgtccggatgaacaactacatcgtcgagttgtttctgcgttacattgctcagccgtcggtggccactcgggcttccctgttacttatagccgagtcaagcatctgttcgcttggaccaagctcaagtcatttgttcaacgctttgtccagcagtgtcagatctgtttacaagctaaactgggcagatcttcatatccaggcaagttacagcccttggaggtccctaaatcagcttggcatacagtatcccttgacttcgtggaaggtcttcctcgtttaggaacagctaactgcattttggtggtagtggacaaattcactaagtttgctcattttattcccatgtcacacccatatactgttgccacagttgccacactatttttgtctc

SEQ ID NO: 103090 - DNA, 225 bp, Zea mays
  Clone ID: MRT4577_25525C.1
atggcgggactcgtcgggaattcgtcgccgaacctggtggtgccgccgcggagccacctgtaccatgggcgggcattcggatttgagcttggggccctagcgcacaatgtggacaacaccggccatggcgccaccgtccctgctcgagggccaccatgcgtggccgagttacgtggggaagaaacccttggcaccgttgatttgcaagggggcggtcatgattag

SEQ ID NO: 103091 - DNA, 399 bp, Zea mays
  Clone ID: MRT4577_25526C.1
gtaatgactgttgggggttttcaccaaacgatttttagcattttaacagcttacagcctacagcagcttttttccacagctcacagcccacaacaacttttttcacagccacagcccaaccaaacagacccaaaagctctcttggagactcaaaaagttgcacgtacccgtctctctgccatcacagggaactaagcgagggaaaccccgccgtcgctactgtccttcgccggcgtcgtgactagactttccatgctgaaacccgagggcctgttgggcgcggacaggcttcggctcccaccgaatttggcgaatcttgccccggagtcgagcaattcctcgtcgtggggctcctctactgcggcagccgctgtaccgcgtggtcagtccccgtcgtcg

SEQ ID NO: 103092 - DNA, 478 bp, Zea mays
  Clone ID: MRT4577_25527C.1
ccgattgttagtttttttatctagacgaagaatagcctaatcatttcaaggaacacaacgcggcccacatgccagtgaacatataaggagcctcttggcactaaggaacttaggctggaacacatacttcccacaaatctaaacaccaacattctacagcatagccctcctaacaggactaattgttaataattatttggcaacttgcactgccttctttgcagacttgcttatcttcttagcccactaaatctacttgatgccgccggtggacaccttctcccccaccttattgcccagaaaaaccaagttgatgttacccaggacaccggcgagcacgattgttacctctgactgcaccttgccgagctaaacttcgttacaaattttcagtatcaagtgtcactacacaatacaacctttgttggagcccttttacagaatcccaaccagatgcatcacctctgatcctaggtac

SEQ ID NO: 103093 - DNA, 492 bp, Zea mays
  Clone ID: MRT4577_25528C.1
cccacgctttcgcccacgcgtccggttgggggccccatggctgatgggctcactggtgcgagtggtggggaggaggccctgggtgctccaagtggccgtggtagggagaagaccgtgcgcagccacaatggcggtggcggcgtcgtaggaggtgagcagatccacggcggtggtggatgcaaaggcacacgcgtcggctgctgcagcggctgagaggccgaccagggccacgacgtcggaggggcgcgtgccggcgacctcgtaagtggaggcacccatggcggcgttcaggtctccatggcgcacgtccgtgtggggaagctgtcggttgtggctgtcgacgatggagaagggcaggccgtgactgggcgcaccgactgcgaggaagaggcaagccacggcttgtggcgccgagccgtcgacgacgtgtgaggtggccatcggctgtaggagggcagtggctggggtgcagcctgtagaggggtgctagcg

SEQ ID NO: 103094 - DNA, 241 bp, Zea mays
  Clone ID: MRT4577_25529C.1
aaaatgtaataaaatgtacggactaaatattattccttttaaaccaaacaccctctaagttggcgcggtgcgtgtatattatataatggaagccctcacctcccattatagggcaactcccaaccacaatgcgtttaggccaccacctctcatgactgcgttcagttttatgctggtttacccaaattatatacattgcatatactataccctgaatcttagaacgccgtttaccttcata

SEQ ID NO: 103095 - DNA, 361 bp, Zea mays
  unsure (1)..(361): unsure at all n locations
  Clone ID: MRT4577_2552C.1
cncttcttcnnnnnnnnnnggcaaaccccaggngggcacttgagaggcncagcccgcaccaaagcaagccgggcgananacaaaccccacannaccaccnncgaggaccanagggccggnaacananncaanacaacaacccagnagcgaaggagccgccacccacaaccggccgcaggcaccccacagaannccnctccaccaccaggcccacatagnaanccaaaccctgcagccggcacggnaacaacaganagcgnactnngcactaccnngcaccgagggagacccacgagnagnngaancccaccccgccagacaacccagagaccgccccncacagagaaccccaggaccgaaa

SEQ ID NO: 103096 - DNA, 605 bp, Zea mays
  Clone ID: MRT4577_25530C.1
cccctcgagttttttttttttttttttttttttttttttttttttttttttttttttttttttttttttttgaaaaaaaaggctgctcagttaacaaaaaatgggggttttcaccaaaaaacgattttcatcaggcagaaaacttagggtactaaaaagttaaacccttctcatcccatcctgacgggccaagcccttttgctcctaccttgggcttgggggaaaacattttaaaagctggggagccagggagggggacaccccctttgggtttttttctttttttggggggaccaatacccaaacctccaacaaattttccataaggagctgtttccagggtggaaaggttttttacctaagcctcgggatggcccacatggaaaaacattaaatctgcaaacaaaatttctgtatggaaaattccttaagaattaacatttttttggaaaaaaaattttttcctttgggcttcctttttgcccttggggcgggaataaaaaacaaaaaatggaacttttttgttctttaacctactgttattggcagggaccggctcttaaaatttcttcgtttaacctcccttgaccttttttttttcctta

SEQ ID NO: 103097 - DNA, 606 bp, Zea mays
  unsure (1)..(606): unsure at all n locations
  Clone ID: MRT4577_25531C.1
ctgntgnaccaccgtctaccgcgcgttcgtgcgcaagcccttttccccacgacgtgtccatcgccgtcactcagcgtcccaggctaagttcggnaaggatcctcgcgcacatccgcgcctccggcgacggcgtcaaggacctcgtcctcgccgtctccaggcacggcggctcctccggatccgacaccaacagcgccagcgagtcgccgtcgcccatggcgcgtggccgccgcagggcagagccgtaggccaccgcaccgtccatctccaaacaattcttaaatctagctgtctctgcaggcttcagctagacggcagcagagatatgagtcactgcatctgcactactttgtagaggtacctatgtgtccttggagcgattgccatgacgacaaggatgcaatcgcgggatgacacctagatcagttgcttcttttttttttccttttgttttattgttgaattatatatcttggcaacttatatacatattatagtatatatataggaaggataataggctgtgaatctttgtatgttctgaaccatgactgattttatctctatactattatcnnnnaaaaaaaaanannanaaaannnaaaa

SEQ ID NO: 103098 - DNA, 230 bp, Zea mays
  Clone ID: MRT4577_25532C.1
cccacgcgtccgcccacgcgtccgcccacgcgtcagcccacgcgtccgcccacgcgtccgcggacgcgtgggctgatgtatccagcatggcatcatccatctacaattacgtacgtagtgcaacgactgtcgattcgttgggtgaggaacatatatgtgaatgcaagctccggctaccatacatgtgtaatgtgtaatagatatatatacaaaactgccgaggcgccgac

SEQ ID NO: 103099 - DNA, 620 bp, Zea mays
  unsure (1)..(620): unsure at all n locations
  Clone ID: MRT4577_25533C.1
agacaaactttttatgaaattccaaagttaggattttgggatgttacaaaacaccataatctcgcttctttaactcaagcatcaagcctcaaaaggctgcacataaatcttaatctcatgaactagagtatcctatcaaaggattaacacgactcttagtattaatgaacaactcattattaacaagcatagaattccatggaataaaaattatcttaacttaaaggcctaaaacacttgtatgcataaacactagacacctctaactctacacccaaaatattgtccaatagcctagtattctataaaacaataggctcaacaaatttgaagatttaaagcacttatgtgcactaaccatcacaaaattctcatgtttcagttttaatcggcttattgatactactcgtttttagacactcagggtagcaagcaacatcaaatcaaggtatctaatcgttcactaaacatttagtataaagactactagtaaagcatttatcgtgttcaaataaatcanagaagtataacantactgatagaacctatcttagaataaggacagaagcattacagctagccttctaaacttaaatggtacattagagattaatatatta

SEQ ID NO: 103100 - DNA, 1550 bp, Zea mays
  Clone ID: MRT4577_25534C.1
tcggggagtacgggacacggctgcttgcctgcgccccttggtcctttccccgcttcattgcctcgaggccggccggagggaaaaaacaaaaaaaactgcacaagccttggtccgcttgcggcttgcctttttcgggccgcctccgctcctctctctctctctggctctctccctctcccatggcccgccccaggaagccgccgccgccgccgccgcctagggcggcggcgccgtccatcgccgaggcgctgctgatggccacgatctgcatggtgggtctgcccgtggaggtgcgggtccgcgacggatccacctactccggcgtcctccacaccgcctgcgtcgatgccggttacggtgtcgtgctaaagaaagcaaagaagattgcaaacggaaagggagatgcgaatctctcgctgggatcgtttgtggacactcttgttgttcatccagatgaccttgttcaagtgattgctaagggtctttcactcccccttaaaggtgtttgtaaacctcttgactccaacgtggttgctgccagtggatccttgaagcctcaaatttcacatgcaaatgacccaaaaatgtctaataaaactgaaaatatgtctccacttatgcaagctgagaaatgcacctctgtgggtcaggagaaaaatacttctgttaagagaaatggtcaagataatggtattactacaagtttaagttcttcaaccggacatgtgggggcatgtttatccaataattgggattctaggtctggaagtatggtgcctaaagttgatgttatcacaagttcagcttcagctgtgcccgtggtggcttcaggtgttaaaccctctcagccagtcaataattcagttgccaagattgtcatgtcaagcaaaactgctgctaaggaattcaaactcaatccttccgcaaaggtcttttctccatcttttgcaagttctaggcaagtacttgcagctgcggcccctgttgacacatactacatttcacactctgcccctgaagtaccaatgggtgtgcctgtatatgaaccaaaatctgtgtcaggtgtttcacctctatccaacaaggtttattgtagtaatctatctcctgcaaactatgccatttcacctcagtatgtgccgtctgtaagtgcttcgatctattcttatgtgtttttgattgcttcatttatttcgcattcattggataatactatattatcctcttgatatttaaaaccgctattgcatgacaacttgcaacatgcctttggttcaagctgataacttgctgcatatggcttaggcttactccgttatcatttgctctatatttgaggccatgcacgtactcagttactcctatgtgctttgcctttgcagttgagctattcaagccattcttacctgttagctgcctaatttacttgtctgttggattaaatgaataaattgaacttgtaaactgattcttcatgtcaacttacagcttatcagctttaattcaatctctgatgcaagaaaaaaaaactttttactccgaactgaaaa

SEQ ID NO: 103101 - DNA, 1206 bp, Zea mays
  unsure (1)..(1206): unsure at all n locations
  Clone ID: MRT4577_25535C.1
gagtccgagtcacacgggagtacgggacacggctgcttgcctgcgccccttggtcctttccccgctttgcctcgaggcggcggggcctttgcctttttcgggtgggctcctcccctcccccccctctctctctctctctctctcatggcccgccccaggaaggcgaaaccgccgccgccgccgcctagggcggcggcgccgtccatcgccgaggcgctgctgatggccacgatctgcatggtgggtctgcccgtggaggtgcgggtccgcgacggatccacctactccggcgtcctccacaccgcctgcgtcgatgccggttacggtgtcgtgctaaagaaagcaaagaagattgcaaacggaaagggagatgcgaatctgtcgctgggatcgtttgtggacactcttgttgttcatccagatgaccttgttcaagtgattgctaagggcctttcactccccgttaaaggtgtttgtaaacctcttgactccaacgtggtggcttccaatgggtccttgaagcgtcaaaattcacatgcaaatgaccccaaaatgtctaaacctgaaaatatatctccacttatgcaaactgagaaatgcacctctgtgggccaggggaaaaatacttctgttaagaaaaatggtcaaaatagtggtagcgctacaagtctaagttcttctaccggacttatggggccatgtttctccatgaatggggtttctggatcagcaactatggtgcctaaagttgatgctgctacaagttcagctatagctgcgcccttggtagcttcagatgttaaaccctctcagccggtcagtaattcagctaccaagatgattatgtcaagcaaatccactgctaaggaatttaaactcattcctttgtgcaagggttttctctccatcttttgcaagttctaggcaagtacttgcagctgcggcccctgttgacacatactacatttgacactctgcccctgaagtaccaatgggtgtgcctgtatatgaaccaaaatctgtgtcaggtgtttcacctctatccaacaaggtttattgtagtaatctatctcctgcaaactatgccatttcacctcagtatgtgccgtctatcgtgggccataatgcatcaaggctagacccatccagaattggcacaccataccatcctatgcaggtgggggcaacttatactaccnctagtcc

SEQ ID NO: 103102 - DNA, 1089 bp, Zea mays
  Clone ID: MRT4577_25536C.1
cccggggctcaccgcacccccagacggcccgacacgtccgtccgtgctggcttgtacttgcacaccacaccacaccaccacccagcctccccaacgatgacggcggcggcggcaccggcggtcgctagcagggtgtgggagtgggaagggaaggtggcgtcggcggtggccgaggcgacggcggacgaggcgtgggcgctgctgtcggacttcctggcgttccaccggtggcacccgcgcgtggccgcgtgccgcctcgcgtccggcaccccgcgcgcgccgggctgcgtgcgctactgcgagggcaccgccaccgccgccggcggcgagccggcgcccgactgggcgcacgagacgctgctggagcacgacgccgagcgccgcttcttccgctacgagatgaacgacaacaacatgggcttcggcctcttcttcgccacgttccgcgtcgtcccggccgccgccgccggaccttgcccgcgctgggagttcgagtgcgagcccgtgcgcggcacgcccagggacgcgctcgtggcgcgcctgcaggccgggctcgacggcatggcggcgcgcgtgcgtgaccacgtcctcgccgctcgcgccgccgcccctgccgtggtgcccgccggtgcagctggtgagctcgtcgtcgtcaagctcgacagctccatcgccgccgtctgatcaccggccggcgcggcgtcgacggcgatccaacacgtaccaacgaagagaccgccgttcgctggtgctctctcctctgtctgctcacgcgcgccacgctgtcgctgcccatcgtgtttccgtttcctatctcctcgtcgtcgtggtttttagccctttgtctgtgggctgtggctgtgtgctgctgtctcgtctccataatttatccgtccctgcatagattattgtatgcatgtagtataaccgtgtactccactgcttttatcctctcaccctcttgtgcattttattaattaccctgggtacgtgtcctgtactagtattgctgtaccttgcccggaataaaccagcttgatcggctgacttttttttttttaaaaaaaaaaacggctaactttttttttt

SEQ ID NO: 103103 - DNA, 170 bp, Zea mays
  Clone ID: MRT4577_25537C.1
gtttcatgtagtatctgcggtggtctgagggcgacttaaacagaacgttgtaattgactgtgactcgcaagatcttgctcatgctcataacttgagtaattaactggttgaggaatatgtagaccaagacaccattattgaggatcggaaagcttctgaatttctggaag

SEQ ID NO: 103104 - DNA, 787 bp, Zea mays
  Clone ID: MRT4577_25538C.1
tcgcattgacatcacaggaagaaccaactatctacattaccacgtgatacacggagaaccatgccgtcctcctccctcgccttcctcatggcactgctgctgctctcttgtagcaccaccatgagtagcgcggcacggtacctggaggaggagaccaagcctgcaccgcatcccaccaccaccaccgtgccagagctccccaagcctgaactgcctccacaccctacagtgccggagctgcccaagcccgagctaccaccacaccctacgactgtgccggagttgcccaagcccgaactgccaccgcaccctgctgtgccggagctcccaaagcctgaactgccgcaccccgctgtgccggaggttccgaagcctgagctgccgcacccggagccggaggtgccaaagcttgaactgccgccaaaccccaccgtgccagaggtgccggagcacgtgccggtggtgccaaagcatgagttcccgccactgcccgagccggagctgccacccaagccggagagccactacccggccgtaccagatgccaagccatgatcgacctacgatcgacgtcagtgttgttgtttcaggaataaatagttgttgtcccagtgtctatgtgtattgtatgttgtaggatcagtagctagtgtgaccttcagtgttgtacgttgtgctgcatgctttgagatgtacctatatatctctattgccttgagtgtacaatatatacatgcatgtatattgagatttgagtcggtttccttcgaaaaaaaaaaaaaaaaaa

SEQ ID NO: 103105 - DNA, 124 bp, Zea mays
  Clone ID: MRT4577_25539C.1
cggctcgagatggatcatcaccggtacctcggtgcggacggcatctatgtgtatatccctactgatttcgagggctggtgcttcttcaccactctcaggaagcttgtctgggttatccttcagc

SEQ ID NO: 103106 - DNA, 734 bp, Zea mays
  Clone ID: MRT4577_2553C.1
gccggccgggctgcccaatcagctatgctcgcccaccgcttcctcctcctcgtcgccgtcgccgcggctgcggcgagcggcatcgcctccgctaagccgacggcgtacgaagccctcgccgactacgacatccccctggggatccttcccaagggcgtggtcgcctacacggtcgacaacgccacagccgccttcacggccacgctcgatgcctccgcgtccgacgcgggatcctccatctgcgagttctccatcgagggctcctactcgctactctaccagaccaagatcaccggcaagatctcccccgaccacctcaccgacctccagggtgtctccgtcaaggtcctcttcttctggctcaacatcgtcgaggtcacccgccatggcgataacctcgagttctccgtcggcatcgcctccgcggacttcgggattgacaacttcctcaagtgcccaacctgtggctgcgggttcgactgcaacgacctgctcatgctccagaaggcggggccctccacctccaggctgtgcctgcgaggtgccttctagaattccactcatgcaaatccaggatgggatagtaagttcaggactcgattttatgtttcaccaactgtttcagacagttttagggaagtcagagatttaattaagatctttcaaaatatgtaaacttatatttctgtatggaaattgccttcttacaaaaaaaaaaaaaaaaaaggccccta

SEQ ID NO: 103107 - DNA, 2971 bp, Zea mays
  unsure (1)..(2971): unsure at all n locations
  Clone ID: MRT4577_25540C.1
ccgagccgacgcccaaggccgcgtacagagagatcatgacgaagctgttgtccgagaaccagcacacggatttcgacggccgcttctccgtgtacgatgatggtgactcgctcttcacagccggtgcgctgccgttcgacaccaaggagttcgaggtnnnnntctctgcaggcggcgacgaaaagatggacaggaagtacaaggtgatgatcaaccatgccgcaacgattagtctgctacagctgaggatgctgttagcgggctatcccacggacatccccgcgcaggcgctcgtggtcctcgacaccgtgctgcgtgacgtcttcaacgaacgcaatgacatggaatgcgtcgtgattgacnnnnnggatcgcacactgggtgttgacgcatggaaggggctctatctgagcatcaggccaacacaaaactgcttgtctctgattgcagacgtgtcctcatctgtattcgttcaacccctgctattgattgaattcgttcagaagatcctaaagatagatgccgtggataggaacttgactaaacctgagtatgacaagctcttgaaggccctcaggggtgtgaggattcaagtcacacacagagataatagacgccgagtatggtnnnnnnnnnnnnnnnnnnnnngccaactctctacgtacagagttgctggcttgtcagtgaatcctactaatgatttgagttttgaatcaaaggttggagtcacaacgactgtgattgattacttcagagaaatatacggcctggaactgaaatacaaatatctcccatgcgtcaatgctggcagcgagcaggatccaatctattttcctatagaggtttgcaagatagctcccaagcagtgttaccagaagaagctggaaggtagtcagttttctactccaaggaagtcagcctggatccatcctgaagccgagcaatcctgtcctcagattgttgagcagaggcagtacaaacaaaccaaacgtgcaaatgaatttgacttagaatttgatggcaatcttacaacagttgctgctagagttctgctgcctccaaatcttaagtatgatgattctgtatcacagaaaacatggtttccactggatgggtactggaatannnnnnnnnnnnnnnnnnnnnnnggtgccaagatcagaaactgggcatgtnnnnnnnnnnnnnnnnnnnnnnnnaaggaagatattaagaagttttgctttaagctggctgaaatgtctcgtattactggactggactttgccgatttgaagctcccaatattcactgcacgtccagatcgagttgaagatggtattcgtaggtgctatcaggaagcgaagaacaagctaagggatcagaagattgatttactgcttgctatactaccagatnnnnnngacagtttatatggaaatattaaaaggatctgtgagacagatattggtcttgtgtcacagtgttgtcgaaggtcaagagtcttagtgaataataatcagatattggcaaatattgctattaagatcaatgccaaggttggaggaagaatctcagtattcgatgacgtacagaagagtttaccggttgtttcaaataagccaacaattatatttggtgctcatgtttctcacccttctgttgtagatggttctactggcccttctattgcttctgtcgttgcatcccaagactggcatgaggtgtctaagtataatggtgttgttcgtgcacaaggtcacactgaagagatcggtggccttgaagacattgtcaaggagctccttcatgcatttgcaaacgagtccaaggagaagctccagcagctgatattctacagggatggcataagtgagggtcaattcaatcgaattttggagaaagaaatcccagcgatagaaaaggcttggaacgcactgtatgacaatgagaagccacaaatcaccttcgttgttgtgcagaagaggcataaactgaggctgttccccgtggacgacaactataagatccgttctgctaagaagaaaattgttgagcctggcacagtggttgatagtgagatatgtcacccagcagaatttgatttcttcctttgcagccaatctggtgttatcaaaggcccaaggcgtcctgtgaggtaccttgtactgcgagatgataacaacttcacggcagatgaactgcaggctctcacaaataacctgtgctacacttattcaggcggcaatcgttcgttgtcggtcgctcctcccgcatactacgcccaaaagctcgcacatcgggcccgcgtctacctcgccaaaggctcggacaataatgcagctgctgctaatggtggtcggaagcaaattccagagataaagaatgagctgaaggggtccatgttctactgctagtcctttgcctgctgaacggacgatgaattgttctatagtgaaagacttgagtgtgctctgagtctctgactgacatctggagaaggatggcatctgcaatagtcgccgtgttctttttagtacactagaataaatggatgttttttgtggacgcccatgttgaactagttttcttttccagtaagtacttcagaatgagtgagataaatatatcaaaaaaaaaaaaaaaaaaaaaaaaaaaaaaaaaaaaaaaaaaaaaaaaaaaaaaaaaaaaaaaaaaaaaaaaaaaaaaaaaaaaaaaaaaaaaaaaaaaaaaaaaaaaaaaaaaaaaaaaaaaaaaaaaaaaaaaaaaaaaaaaaaaaaaaaaaaaaaaaaaaaaaaaaaaaaaaaaaaaaaaaggggggggcgcccggaaaaaaaaaaattttttttttttttttttccaaaaaaaaaaaaaggggggtttttttttttttttcttaaaaaaatgccccccaaaaaaaaaaaaagcagttttttgggaaaaatttttttccccgggggggggaaaaacccccctttttcccctttgggaa

SEQ ID NO: 103108 - DNA, 430 bp, Zea mays
  Clone ID: MRT4577_25541C.1
gggccgacttccgggtcgcccagcgtccggaaacaagcgctgacccgctcgcgaggagcgaaaggcgagcgcgcagcccagcgcccgtggcggaggcgaaacccccaccgacgcatcgcgcggagaccctccggtccggaccggaccgaactggagcccgcacactctctccgccggcggacgggatacgatccaacgtcacggagcgccggcacgagcatgctaggaatggggagcgtggaccggcgtggggccaaggggatccacgaagctaatacagcgcgcgcaggacgattggatggacagaatgccttactcccagaatgcagcgtagactgcagatccatcgagtgaagagctgaacagagcggctcaggacggcgacgtgctggcgccgattgagaacacacggacacgagccggtcttgac

SEQ ID NO: 103109 - DNA, 550 bp, Zea mays
  unsure (1)..(550): unsure at all n locations
  Clone ID: MRT4577_25542C.1
ccttcatgcatttgcaaacgagtccaaggagaagctccagcagctgatattctacaggttcatatatctcattttgttctgtgatgccaccacatgagtgctttttctatctatgttcttttgttatgtatttggttactagggatggcataagtgagggtcaattcaatcgaattttggagaaagaaatcccagcgatagaaaaggcttggaacgcactgtatgacaatgagaagccacaaatcaccttcgttgttgtgcagaagaggcataaactgaggctgttccccgtggacgacaactataagatccgttctgctaagaagaaaattgttgagcctggcacagtggttgatagtgagatatgtcacccagcagaatttgatttcttcctttgcagccaatctggtgttatcaaaggcccaaggcgtcctgtgaggtaccttgtactgcgagatgatnacaacttcacggcagatgaactgcangctctcacaaataacctgtgctacacttatttangcngcaattgttcgttgtcggtcgcttc

SEQ ID NO: 103110 - DNA, 800 bp, Zea mays
  Clone ID: MRT4577_25543C.1
ccggccggggtgagctctcacttgcgtctccttcctagccatctcactggtcgcgcgcgcgagctcctctgcagccgctcgacgcccatgcttccgcccagctcgccggccatcaccttcctggccgcgcgcgctttctccctgcgcaggacgccgctgaccttgctccagcccagacgtcgtcatctccgacctccgaccctaatacctacagcacccagctcgtcccctccccagccgcatctcctaacgctcggccttcctctgcgtgagcgcgcagaactgtgcctgtcgtatgctcgtctctgccgagcaccgtctgccccagcgtcaccggcctccctgtgccggcgtcgtgttctggtggccgagcatcgtcaccagcgctccttccttaacttcggcagcgcatgctcttctccaagccgacgctccggcagtggcgtgctcggcagactcgcgccctcccggtagctcgcgtgatgttaaatccggtggccgatctcgcctccaccggtaacttcacttcgcaactcacctattgttgtggtgctcctatgccacgacacttatgccggtgcatcgtccgtgccttgtgtttgtgctggcacgctagctgatcacgtatgtggaggacaagagccgggtcgaccccaagatgatgtaacgaatcggttactccacaaggtgatgctggtggatcaacctgaaggtggacatgctgaacaagtgccaacacaaaaggctggtcatcaagtggtcgtcgtctaacaacactaacctagtgttattccaggtta

SEQ ID NO: 103111 - DNA, 420 bp, Zea mays
  Clone ID: MRT4577_25544C.1
aatttttttttttttttttcttttaaattttttttggggtatttttttttttttacccaataattatattaaacaaacatgaaatatattggaaacttcaggaacataaaaatcaatcccctctggaaacaaagttaatgtgcactctgaaacccgcctagaaactatatgatcagaaacttccttctaaaacaaacactaatattatatacaaagcatatgtgcattttttctccaagcggtgcaaaagcaaaaacagaaacatttacagggaacttacataggaaaaaacttgctaaaagttgctactagccaccttgctttggttttatatttacaaaaacctcaaacttctgcaaaaaactacattctagagctccggaagtcctttatgggaatgaatggactaagttgctcggt

SEQ ID NO: 103112 - DNA, 443 bp, Zea mays
  Clone ID: MRT4577_25545C.1
ctccacgcacgtcctcgacgagtaccctgcccttcccaaccgaactcggcacaatggtggacgtgttgagcgccttcggcttcggcaacctgtgtctggccttcaccttcctccatatctccaccttcccggacccgcagctcgctgcggacagcaccgctgaagccccactgctccacgtcgcggccgaggttctgccgtcattagcttctgcggcggtcctcttcctcgccgccgtccccgtggccggcgcgggcaacgggcggcggcggcgctcgatctcggggcttctcatcttcgtgctatgcgtcttcgacggcacgctcgagctcatcgtgttcgggaaggccgccgttggtggtactgcggaggctcgcgcgctcggcctgcctgatctcccagcgttgcctgccgcggcgacggccacgttctttttcgggatg

SEQ ID NO: 103113 - DNA, 969 bp, Zea mays
  unsure (1)..(969): unsure at all n locations
  Clone ID: MRT4577_25546C.1
gccttgtatttgtactcacttcgtattccacctgcaacgctgctgcaagctcactcatctccccagcgctggtcgtcatcctccactccaatatgcagttcggtctggtgctcctaccaagtaccgacaccagcgtggtccctttttttctctgtcttggccggccacctctgctcctccctgctgccgcgtcgctggcccagctcggatctcgtcgaccccatgttgagctcccatctgccatggtcgccggtcagcccctgcgcacggcttcctgcgcgccgggatggctcgtctccactgatcaaggacgcttggaaacagcagtagcccagctcagcactagctatggtggtcgacgttcactcggaccgtgccgctgctccattcatggctgcgagtccacctccgccgagctgccagtgctccagcttgctccttcctcgccttcaatcccctggtcgctgcgcccctcagctcgcgaagcttgctgtggtggcctggtcactcgccctcggcttcaccttcaagccgcaacgccatcggctcctcgtccggctttaactttgtcgaggccagcagcttcaaatccttgtagtgtgtctccgcactcaacgtcatcgccgtcgtggttttggagttcatcgtgacgtgtgccgatgatctgcgtatagcggaagatcttcgcaagttcacgtagcttcatggtaattaattttgatggcgatctgcgttatttaacgctatatttgtttcttttatgtgttttcgtgtgcgatcgtggagggagatttgatgctaaagccgaagccaacgcgatgcttctcggttgttcgataaaatggtcgagttgagtattagtgaactatattcgctacctctgttagcagagtcattagggattggctaagtatgggtgattgatttatctatntgtcgcaaaaaaaaaaaaaaaagcggcctcgagct

SEQ ID NO: 103114 - DNA, 534 bp, Zea mays
  Clone ID: MRT4577_25547C.1
tttttttttttttttttttttttttttttttttttttttttttttttttttttttttttttttttttttttttttttagccaacaggcaaaaaattttaaaaccgcccaaaggcagaggggggaatttttggggggggccaaaaaagggggggccgggccctggaaagcccaaaaaaaaaattggggcaccaaaaatggaaaaaaaaggggcgggggggaagggaaaaattccccaagaagaggaaccgggggtaaaaaatttcctgaaacccaaccggggggaaccccccctaaaacttggggaggttgggtgccctcaccaccggataaaccctgggaaaggggcccccgggaaaaggccgggagaaaaacctgcaaaccggcttgggggaaaaaggggggggggcccaaaaaaaggtcccacaccggggggggaaacccggaaggccaaccctttttctggaggggccgcaccgggttggccccaccctccccccttggggagaaagccgccccccccttggtggggccgg

SEQ ID NO: 103115 - DNA, 326 bp, Zea mays
  Clone ID: MRT4577_25548C.1
aaaaaatcccccaccgaacttgggggaaaagcatgggaaaaaaaaacgggggggtttgaacaacaatttgggccaatggggggctcccaacaatttttcacaaaaaacaaaaggggaaccccccgcacccgcccccaaggggggggccccatcccggggtttctcaaaataacccaacccttaaccccccgggaactaatttttaaccgggtcctcaataggaatggccctcggaacccttgtaatttgcaccctttgggccgactttctaaaaatccttttaaaaagcagccaaatccttacgggcctgggaaaacccacccttt

SEQ ID NO: 103116 - DNA, 439 bp, Zea mays
  Clone ID: MRT4577_25549C.1
acgcgtcggaccatccgtcatgcgagggcccccacgacccaccaatccaccagggctcgctataagactccggggagccgcacggctccgccgccagggaggcctcatctcggcttactataagagtagtaagacgtctgcgcaacaaagctgaaacttttttttgccccctccttccacagacccaccctgtcgtcgttgatactcgcatagagattcgcgcggccgtgtcttgctcgcgcctgcccccttacttacttgtcgtgccagcgcccatatctctcgctcgccggcgctcgggccagatctgggagggggctcggaggcggagccgggcgcaggataggtttgacccaaagggcgaggaggagagggaagaatacccctgacgccatggagctggcggctggctgcgggatgcagcggccggtggtgcaca

SEQ ID NO: 103117 - DNA, 971 bp, Zea mays
  Clone ID: MRT4577_2554C.1
gccggccgggtcgcggagatggcagaattgcagatgcactgtagaagcagagcacaaaagaaatccatccgtctcattgcttccgcttgttcaccaaacaaaaccgaagccgcactccaccgctctcctccccaatcagctatgctcgcccaccgcttcctcctcctcatcgccgtcgccgcggctgcggcgagcggcatcgcctccgctaagccgacggcgtacgaagccctcgccgactacgacttccccccggggatccttcccaagggcgtggtcgcctacacggtcgacaacgccacgggcgccttcacggccacgctcgatgcctccgcgtccggcgcgggatcctccatctgcgagttctccatcgagggctcctactcgctacgctaccagaccaagatcaccggcaagatctcccccgaccacctcaccgacctccagggtgtctccgtcaaggtcctcttcttctggctcaacatcgtcgaggtcacccgccatggcgataacctcgagttctccgtcggcatcgccgccgcggacttcgggattgacaacttcctcgagtgcccaacctgtggctgcgggttcgactgcaacgacctgctcatgctccagaaggcgggggccgccaccgccaggctgcgcctgcgaggtgccttctagaattccactcatgcaaatccaggatgggatagtaagttcaggactcgattttatgtttcaccaactgtttcagacagttttaggaaagtcaaagatttaattaagatctttcaaatatgtaaacttatatttctctatggaaattgtcttctttccattgagatgtttgcccacatgtgaatcagtttctaaagtggtgatagttgaatcccatggttatggatggttgcttgaaaaaaaaaaaaaaaaaaaaaataaaacaaaaaaaacaaaacctactacaacatcacaaaaaaaaaaaa

SEQ ID NO: 103118 - DNA, 498 bp, Zea mays
  Clone ID: MRT4577_25550C.1
ctcttggttcggccccggtgggtcggcgaccggggcctgccggggaaccacggtccggtaccgggaggcgtaccagatttcgctataatgatgggcataacagcttgctgtgagaataggcaaaccggttacatgtgcaaaattgtactacgccgaaagtttaaaacaaaaaaccaggggggcctaaaaagtgaaaaacctgaggtgaatagtgaggggcttaatgcacatttatcaggtgggaaacatggcccgctttctagattaaaaaattggccaacccgctggattagggaattggccaattggccgggagagggggtttgctttttaccagccagaggggcaattttttataccacttaaacggctaacacttaaagagctttaacaggcgggccactgctagattggcccaaaaggggaaaatcctgtttgcccgaggttaacaaaatcctgtaacatgggcggtaacgggggtatataaaatcaactacc

SEQ ID NO: 103119 - DNA, 310 bp, Zea mays
  Clone ID: MRT4577_25551C.1
caatgccctattttttttttcttttggcctgaataattagagagactgcaaacagtaagtaaactttgacctatctacttcatactgaggaactttgttgcttcaatataatcgctgtactccacacttgcctccaggacattgtcagtcagtctgtaattccttattccctataaggactaaagaagcactttgaaataatgttctgtgtagtaccacagtaatgcatactccatctctggatgaatcaacttctagagttgcaacagtttgatcaatttcatacaaaaggtactaaaaactctgacaa

SEQ ID NO: 103120 - DNA, 170 bp, Zea mays
  Clone ID: MRT4577_25552C.1
tgtgtggtatttgattgccaggctgccatctggggactgggtgttctactgcgccgtgatgggtttcttatttccactgaataaaagataattgcagtggatttttatgaaggatggtaggcacagattatgtctggttcattcgatatatctcttattcttgctattta

SEQ ID NO: 103121 - DNA, 403 bp, Zea mays
  Clone ID: MRT4577_25553C.1
cattattgtttatttgtttatttatttacagggacgggaccgtgggtcatttaatttactgcacacaaaatctaaagacaccaggtcccaacattatacatgaacggagggaaggccggacattgattgatattgtggatcagaccgatcatccgcgcgcagtgacattatgtataagtcatcgctcgacaccgcgcaagaaggggctacgtcgtcttgatagcctaccacttgtgcaacctattctgtgcgtgctctaactccttgagggagtcagcccttaaggagacccacactagaataatcgcttgcatgcaggtgcatccgatcatcccaaacaaaatgcccctaacaccgagcttgaagaataacccgagcagggcgccgagggggacgccgacta

SEQ ID NO: 103122 - DNA, 281 bp, Zea mays
  Clone ID: MRT4577_25554C.1
attgggtcttttatacggcaacgtgtatttaaagcttacgacccctacgaacgaaccaaacacattccaacccataccaccgtacaagaatgcatactttgggattgaattggtccacaaaagatatctagacaaggcgaaaatgagaaaagctgggctaccgaacaaagagcacaccgcattgagaaactccctgcgtgtttttttcaaacccaaacaaagtttacagtcttgcagaagcctggaatggtgaaggagcagccttacccgagggtaccggc

SEQ ID NO: 103123 - DNA, 437 bp, Zea mays
  Clone ID: MRT4577_25555C.1
ttttttttttttttttttttttttattaaatttatttttattttttttttttttaaaactttttaaaatatattatttttaactaataaaaagtttttacgagtttacactgtttgaactattgaaaaaaagaagaaaaaaagggccaaacactttttggaacaaaaggacttaaaaaaaaaaaacaggataaggaacctgctgttttttggggtcagggccaactttaaaaataaggacagtttcttcaatgcaagccgagactcgatgttttttcccacaaaaatttaaatgttgttaataaaaaaatgtgcaaaggctatttaattttttaattgaaaaaacaaaatggtgagacggaaaaactggttgaaatccacccaaagaaagagacactggatgagagccttttctttttaaaaaccaaggaggttttt

SEQ ID NO: 103124 - DNA, 385 bp, Zea mays
  Clone ID: MRT4577_25556C.1
attcggctcgaggtggactcgattctttatcaaagcgcttatcggtaggaagagctggttcattatatgaaccggtggaagtgctggatccccactcccatgggacatgtactgccagggggcgtagatctaagtcaaaatcaagggctgtagaggcgtggccaggcttggctgctacacacgatgcagaatcttctgaggttgatgcaacggacaaagaggacacgtcatccacagttactgatcctggacctgtggctgtatgggattcacgaccaacgtgggacgatgaacctgaatcggatggttaacctaactggcaaccggtgactgtaatggagctacatcgccctggcgaggatattgagcttggtctgactaagga

SEQ ID NO: 103125 - DNA, 264 bp, Zea mays
  Clone ID: MRT4577_25557C.1
cttcttttcccgcaaggaacaaaaggtttttggggggtttttaaattccaaatcagggtatacattttttattcgtggttactgactaccatactactattcttaacaaaaaatgtgagtcttggtactctgtgaggttacaaatctcttatatcctccattattttacttattagatatagcccttcttttttatgcttttctatgctttcacatgtacgtttgcatatttattatcttactcacatgtatttttctgatgtt

SEQ ID NO: 103126 - DNA, 2469 bp, Zea mays
  Clone ID: MRT4577_25558C.1
atgacggcgctgcagttcctgttgctcgcgctcgtcgccgtcactcaggtcgcgagcgccaccacggtcacctacaacgaccgtgcactcgtcatcgatggtcagcgccgtattattctatcagggtctattcattaccccaggagcacgccacagatgtggcctgatctcatcaacaaagctaaagaaggcggcctcaacaccatcgaaacatacgtcttctggaatggccacgagccacgccgccgtcagtataatttcgagggaagctacgacatcatcaggttcttcaaggagatccagaacgctggaatgcatgctattcttcgcattggtccctacatctgtggggaatggaattacgggggccttcctgcatggctgcgcgacattcctggaatgcagttcaggttgcacaatgccccctttgagcgcgagatggagaccttcaccaccctcatcgtcaataagatgaaggacgtcaacatgttcgcaggacagggaggcccaatcatccttgctcagatcgagaacgagtatggaaacatcatgggacaactcaagaacaaccagtctgcctcgcaatacatccactggtgcgcggacatggcgaataagcaagaggtcggtgtcccgtggatcatgtgccagcaggataacgatgtgccacacaacgtcatcaacacctgcaatggtttctattgccacgattggttcccgaataggaccggcattcccaagatatggacagaaaactggactggctggttcaaagcctgggataagccggatttccatagatccgctgaggacattgctttcgcggttgccatgttcttccagaagcgtggatcggtccataactactacatgtaccatggaggaaccaatttcggacgcacttctggtggcccgtacatcacaaccagctatgattacgatgcacctttggatgagtatggtaacattaggcagcccaaatacgggcacctgaaagatctccacgacctgatcaggtccatggagaaaatccttgtccatgggaagtacaatgacacaagttatggcaagaatgtcactgtaaccaagtacatgtatggtggttcttcagtttgcttcatcaacaaccagttcgtcgacagggatatgaaggtgaccctcggcggcgaaactcacctcgttccggcatggtccgtcagcatcttgcccaactgcaagactgttgcctacaacactgcaaagatcaagacgcaaacatcggtaatggtgaagaaggccaactcggtggagaaggaaccggagaccatgcgatggtcgtggatgcccgagaacctcaagcccttcatgacagaccaccgtggcagcttcagacagtcacaactcttggagcagatcgcaacatccactgatcagagcgactacttgtggtataggacaagccttgagcataagggagagggaagttacacgctgtacgtgaacacaagtggccatgagatgtacgcttttgtaaacggaaggcttgttgggcaaaaccactcggccgatggagcgttcgtcttccagctccagtctccggtgaagctccactccggaaagaactacgtttctctcctcagcggcacagtcggactcaagaactatggaccttcgtttgagcttgtgccagcgggcatcgccggtgggccggttaagcttgtcgggacaaacggcaccgccattgatcttaccaaaagctcttggtcttacaagtctgggttggccggtgagctcaggcaaatccacctcgacaagcccggctacaagtggcagagccacaacggtaccatccccgtcaaccggcccttcacgtggtacaagaccacctttgaagctcccgccggcgaggaggccgtcgtggtggacctgctgggcctgaacaagggcgtggcgtgggtgaacggcaacagccttggacgctactggccgtcctacaccgcggcggagatgcccggttgccacgtctgcgactaccggggaaagttcatagcggagggcgatggcatccgctgcctcacgggttgcggcgagccagcgcagcgcttctaccacgtgccgcgctccttcctccgcgccggcgagcccaacacgctcatcctcttcgaggaggccggcggcgacccgacacgcgccgcgttccacaccgtcgccgtgggccccgtgtgcgtggcggccgtcgagctcggcgacgacgtcacgctgtcatgcggcggccacggccgcgtcgtcgccagcgtcgacgtggccagcttcggcgtcgccaggggcagctgcggcgcctacaagggaggctgcgagtccaaggccgcgctcaaggcgttcacggacgcgtgcgtcggcagggagtcgtgcacggtcaagtacacggccgcgtttgccggcgcagggtgccaatccggcgcgctcaccgttcaggccacctgctcatag

SEQ ID NO: 103127 - DNA, 333 bp, Zea mays
  Clone ID: MRT4577_25559C.1
atgacatattctaaccataccatgtcggttcaaaagaatcggcaagaagaaattaaattcacctttaatgttgccaaatgtgataaaatatttgatgagctaatacaatcggccataaatgaggaccggttgcgttttcaggaaatgcaagtagacacggaactattttctgtcaatacaatagaactagcatgcaaaaaagtcctagttcggccggaagtggccaataagggcaaatgcaaaaacatcgtcattggtgatcctcgcacgttgaatatatcacaaggagggattgctccaaaggctccggatggaagactaataagtctgtag

SEQ ID NO: 103128 - DNA, 455 bp, Zea mays
  Clone ID: MRT4577_2555C.1
ggggggcaaaacaaaagggttggtttgaaacaaacaaacaaaggggttgcgccaaggcttggccctaaaacaagaaaagaagggggggcccccccaaccagggaaacatgaaggggccccgggggaaaagagaccgccctcctccccgcgaataaacccccccccctccccgcgggtggctggggttcatcaaaaaaggggccccccggaccccggaaccccaaccaccggggccactagcagggggggggggggggggaaaataaagctggaaccaaaaccaaccaaccagccagttccaccccacttttttttggtgaaatacgtaaagtttcccgggccgtcccctttcgccttggggcaagccaagttgcaacagcagctggctcattttcaaagagggttggttcttaacaccaccccacctaaaacgagggggggcttcccttattggc

SEQ ID NO: 103129 - DNA, 481 bp, Zea mays
  Clone ID: MRT4577_25560C.1
cggtccgcattcccggtcgccccgcgtccgcttgctgttcctctcgccgcgcccgcgctcagacacgcgccgcccttccgctcttacggcacgcccctcgtctgcttcgcacggacagcaggccgggccgcgactgctcttccgcgcggcccttcaacacacaacacctacctatgcccccggccacgcgaggtcctaggccaaccggccacgcgaggagtctagcgcgcattgtccacctcgtaagcgtaccagagagactgacgcgtgcgtgtctgtttggagcgccctaaaactggaagcccatgcggggcaaattggaagctgtagaaggatagtacagatatgtggttaacaaaagaaaggactaagtgaatcagaccatcggaaaggtggacagtgctggacgaaatcaaatttaaatgagtgggttttagtaacagaagcgacagacattacagaggttttggtatatgtccgt

SEQ ID NO: 103130 - DNA, 154 bp, Zea mays
  Clone ID: MRT4577_25561C.1
gctggccatctgtcacgccatcgaccagtggttgacggactacctcgacctctactacctcaactacagcgtgctgagggccgacgtggagctgcacgcgtggtgcaaggacgcgcgcgaggtcgtacacgcctacctcactacacgccctggt

SEQ ID NO: 103131 - DNA, 480 bp, Zea mays
  Clone ID: MRT4577_25562C.1
attcggctcgagcacgacatatgttttttactggaattggattgagcataatcacgggtcttgttgaactaatgggtggcgcgataaactttgtcagccgaccacatgttgggagtacgttcacattgactgcggtgctcaaaagatgtgacagaagcgctgttggtgacagcaagcctgttatgttgcatcctatgccatgccagttctcaaaggttctatctgcgctattggttgatggaagaccagaacgagctactgtaactaactataagttgcaataggctgggaattgtctgtgatgctgatgctaccattgaactgggtgttgtggtgcatgtccggagaaatggacagtccctaaccagtatgaagcaaccatgcatgtgattgatcgagagtgattcatggggctaccatattggtggttctctacgatctagactgctggagatgaagcacagtggttacacacatgta

SEQ ID NO: 103132 - DNA, 617 bp, Zea mays
  Clone ID: MRT4577_25563C.1
ggccctaggggccttttttttttttttttttctttttttttttttttttttttttttttttttttttttttttttttttttttttttttttttttttttttttttttttttttgaaaaaaaaaaccacccggaaagggtcaaaaaaaccaaaaacccttttaacaaaaaaaaccccccccattaccgccctggggcaaaatttttaccccagggggggcccgcggctaatttgctgcttggggggggaaaaaaacgagacaaggcgggaacaaacctttttttccccggggggagggaaccgggaaaaaaaactttggaaaaaaaggccggaaagaaagtttggggaagccccccaaccctttctaaaacccccttcaaaatttttgggaagacggggggggcaaaacgccccggggacccttggctctgggagaggttgggcgcaacatcaacccccggggcaagggggccctgggaaaccccggcgggcttaaagggggcccccccccacgggccgagggaaacccgggggggggccccaacaaaaccgggtcccgagagggggaacccccgccgggaaccctctcccaaaagggatcgggtgccccgggggttg

SEQ ID NO: 103133 - DNA, 359 bp, Zea mays
  Clone ID: MRT4577_25564C.1
tgggtaccgcggccttccctcggtgtttttttttttttttttttttagttggtttttttttttttttttttttttttttttgaggaagagagggagggaacttctaccccctaagtgatctggctgaatccttgaactaacgcttgcttagtatgtacaaaaagagggataaatgccttttcacgttgcgggggaaaaaaaaaagggggtcttttaaaaccatctcttaactaaaaacaggacaggcactggatcatattcctactaaggggggaggtggtgggagttgaaaacgaatcgggaggcctaaaggtgggccttgtgagggaaccacaggctcggctgccggtccttctcca

SEQ ID NO: 103134 - DNA, 501 bp, Zea mays
  Clone ID: MRT4577_25565C.1
actatccatcactgagacggctggggacagaatcgcaacacttatagcgagagagagagagagagaccgatgcgagcgtggagcgagggataggatgggttgcacttccacggggacggagagcgggtttgcggaggcttagcgccacatcgaccatcatgcacgtgctacgactcgaacctacacggagctcacgccggtctggctcctcctgcgcgcggtgcttgtgcatccggtgatggcctgcgcacgtgcacggtcccgggcgctacatctgtgctgacacctatcgatcgttgacgcctggctctcatccacacctcgagcagcgatatccgtatggccacgagaagcacgggctgcatgcgatagtttactaatgatcgagtgcgacatatgaagctcacttcggaagtcaccaatgtacttgagctagctgcgagactgggacagtattgtggctaagactgccgacacaatatgcattgctttccttgaaca

SEQ ID NO: 103135 - DNA, 280 bp, Zea mays
  Clone ID: MRT4577_25566C.1
cctttaattatttttttttttttttttttttttttgttggttttttttaaggcgcacgtcgcgaaaaaaaaccctcttacttttaccacaaccccaatacaaggtgtaacaacatattcttcctcatgataacttcaaaaaccctgtgaatattatttatacacaaacgctgttcctaccctcctggatcaagcaatacaactgcttcccacgcaacaacaaatattttggcaccataacaaaaaccaacttcattaaaaagattttccaactacaaaaa

SEQ ID NO: 103136 - DNA, 437 bp, Zea mays
  Clone ID: MRT4577_25567C.1
tgaactaaaaaccatggatgaccttacattccaatgtttccgtaataacgattataataacattagtaggcataaccggtattatagcagaagagggataaataacattattgaccatatcaaacatctgtcttgatacatgacttggattcgccacaacagcgaggcatgatccactatacgagtattactttaaagcttatcacgtaagagtacctacccactatgcggcagtaaccaagcacagactggattcatttacttgattcgacagcggaactgtttcgacagacagatgatactattctcttgttagcacttgccattcgcagcttgtttgaagcaggccacttgctctccacactatagatgactttgacagtcaccgtctgactaatgtatactgccgcaaggagagcaagaggagtacactgaaa

SEQ ID NO: 103137 - DNA, 419 bp, Zea mays
  Clone ID: MRT4577_25568C.1
attggtgtttctagcatgaccgtctttacctagcaactactcgcggcgctgcaagagaaacccaccggccattcttcgttcggaatacttccattcggcaccacacgtgcggagcggatgatcaaatttgagagacttcctgtagtacaaggttagcgcctttggagcgcgcttgaacagcacctgaacagtagtcagcctacagatgaatgcccgaatgagctccatgaattcattgaccaaggatttgttataagggctcactacatctgacaactatgggaagcttgccacctcagaggatctggacacgatctttctgaagctctaacttggagatttgggacatgatcccttcatgaaggatgaaagagcagtacttattcccgggatcaatacgaggatcatgctcatagatg

SEQ ID NO: 103138 - DNA, 466 bp, Zea mays
  Clone ID: MRT4577_25569C.1
acgctgaaaaacgcacatctttgctctcatacgcacacaccaacgcctacgcgtcttataaactcaggcgtggacagaaggggaaaatttccaacatgatcacacaatgggctcatactactgttcaggatgagcaaactggtacgcccctacattaacacagaaaggaccaatcaaacatcactcactttacctcccgttaataccattagaccacgattactacggacatgggaggtgacacgtgtgccatggcacatacgctataccatgaaagccagtactcagggacccaacgggtcgctcttggagctgatgacctgcgcgctctgctttgaatacaacttgaagtgaacagtcttcatcttcctgaagcggatctctgctgtgcaggaggacgggtggacatgctgctcgccaacatagatacgcttgctgaagatgcaaacatttaccttcttggtta

SEQ ID NO: 103139 - DNA, 493 bp, Zea mays
  unsure (1)..(493): unsure at all n locations
  Clone ID: MRT4577_2556C.1
cagcagccaccactccccaccaggaccgagnccaacgagcagacgcacgcaagcgccaagacgaaacggccgacaaggcacgcacgcgaccagccgcagcgaacgccgcggcggccgcgccgccgcagccgccagggccggaaacgaccacggaggacgccagcacccgcggggaggggagccccgccaccgcgacccgccacgccaacgccagaggcacggggcccgcccccaccgcgacccgcagaagcgacgccaggaacccgcaagaggaacgccagcaccgccgccgacaggcgcgccgccagaaacagaacaaagaacgccgccaggggagacagcggccgcaacgccggaaacgccgccagcacccccgccaagagcgcagcgagaaacccccacaccaacaggacctgcaccgaatgcaccagcgggaaccaaaaccgacaccacgcgcgacgacggcccgccggaacgaccgaccaaccagacc

SEQ ID NO: 103140 - DNA, 1672 bp, Zea mays
  Clone ID: MRT4577_25570C.1
tcctgggaccctcgaggccggccgggcggcacctcagagctactgctggccctgactgaggccctcggccctcctccgtcccctccgcggctccgcctctattaaacccttgtcccttcggcgagactcctctccttcttcagatcaaccctcccctccccggcccgacgcccctcgcccccctcctgaccggccatggcgaccgctgctgctgcgtcccgggtggctgtctcggcaccggtcttcggctcggacggcggcgccaggagctccgggatcaagggcaacaacaatgttagcttcggcagcaaatcatgggtcggcggcacattggcctgggagagcagctgctcggtgcggcccaggcacgccagcaaggtgctctgcatgtccgtccagcaggcgagcaggagtaaggtctccgtcgcgccgctccatctcgagagcgccaaggagccacctctcaacacgtacaagcccaaggagcccttcacggccaccattgtctcggtcgagagtctggtcggccccaaagctccgggggagacttgccacatcgttatcgaccatggtggcaatgtgccgtactgggagggccagagctacggcgtcattcctcctggagaaaatcctaaaaagcctggagccccacaaaatgtccggctttattcaattgcatcgactaggtatggagataacttcgatgggcgaaccggaagcttgtgtgtccgccgtgcagtttattatgatcctgagactggcaaggaggacccctcaaagaatggtgtctgcagtaatttcctatgcaactcaaaacctggggacaagattcaattaacaggtccctccggcaaaataatgcttctgcctgaggaggatccaaacgcaacccatatcatgattgccacgggcaccggtgttgcccccttccgtgggtacctgcgccgcatgttcatggaagatgtcccgaactacagatttggtggcttggcctggctcttcctcggcgttgccaattcagacagccttctgtatgacgaagaattcaccagctatcttaagcagtatccagacaatttcaggtacgacaaagccctcagcagggagcagaagaacaggagcggcggcaagatgtacgtccaggacaagatcgaggagtacagcgacgagatcttcaagctcctggacggcggcgcgcacatctacttctgcggtttgaaggggatgatgcctggaatccaggacacccttaagaaggtggcggagcggagaggcgagagctgggaccagaagctggcccagctcaagaagaacaagcaatggcacgtcgaggtctactagggctcggattgctgtggttgcgacccttgatgctgccggggcagcgtcaggagacaaacacatgattgaaattgaatcgatggatggttctcggggcggtgtaaagtcacaaaagttctctttgtgagaaaaatcgccttttgtaattcataaaagcttccgcgccacggttatccgtggaacggaccgtgtaactttcagccgtttacatttgcagtgcagttgcttttggcagtctgtctaaaaaaaaacaataggtctctgtccagttcctacgcatatgaaccctgatgactttgcataattgccgttcttaacatcagaggattac

SEQ ID NO: 103141 - DNA, 501 bp, Zea mays
  Clone ID: MRT4577_25571C.1
gacaggctatgtagggcactgggaggtgcagagaaagtcgagatagaatggggaaaccatgctctgtccaacagagtgcaagaagcagttgtggccattgtagattttgtcaaaagggaggggcccaaaggctgggatgacccatggagctagatacagcagttataatctcatttgtaactagtttgtgcttttcctcttctctcttttctccaattgtaacttctttcttttgcattattattggtccatttttcaatagtgatatgctatttttcttataacccccacccccacaaaaaaacatgcatcgcgttctcattctggtatggcgtatcgcatatgtaaattgcgttcggaatctttatttagccggctgtctttggtggatcatgtaaaataggggcagactgtctttggtggatcatgtaaaatatgggttgtgacagtttgaaacagaggatgatataggggatgtgacaaggagctgttggagacggc

SEQ ID NO: 103142 - DNA, 278 bp, Zea mays
  Clone ID: MRT4577_25572C.1
ctcctcccgcaaggggcggcgcaaccaaaacggaacataaaacaaaggccttggacgcaagaaaaatggcccggctgacaaaccaaggggagaccctgggaccaaaaagggcttggggggcccagggccccccccaggcggaacgacaccggggggcggggaattaaagctccctccaaaacaaaaggggggaagaaaccctcgggtaccggaactatgaaattccccagcgatgaaagggaaaaaaattaaccccacccccgctggaaagggccggg

SEQ ID NO: 103143 - DNA, 748 bp, Zea mays
  Clone ID: MRT4577_25573C.1
ctcgaggccggccgggccggttttcaagaatcgaatcgcgaccaaaccaaatccccaccccggcgcgctgccccatcaccctccccgctgcgctcacgcaccaaaccccactccgttcctcactgcaatccaccgccccagctctttcgcgcaatggcggccgtcgcggcgccggcgccgccaccgccgcggcagctgagcctggaggacctcaaggtggtgtccgtgctcgggcgcggcgccaagggcgtcgtgtttcacgtcgtgcacgctcccggggaactggacggcgagggcgagggcggcgccgcggccgcggccatggcgctcaaggcggtctcgcgggaggccgcgcggcacaagaaggcggccagcggggacggggacggccaccgccggatctggttcgagcgggacgtgctcctggcgctgcgccacccgctgctcccctccctgcgcggcatcctcgccaccgacgcgatcgtcggcttcgccatggaccgctgcggcggcggggacctcaactcgctgcggcggcggcagaccgagaagatgttctccgactccgtcatacggtacatccaacggttcatcaacggcctaacggaaccaggtgctgcctgacaatttggtggctaatctctgccctggtcgtttttttttttgtttcaatcgcaggttctacgcgggggagctggttctggcgctcgagtacctgcacagtctcggcgtcgtgtaccgggacctc

SEQ ID NO: 103144 - DNA, 1297 bp, Zea mays
  Clone ID: MRT4577_25574C.1
ggggttgagctctgaggtgtgtgtgtgggatttcatctctagcctaccccaacgtgcttgggacaaaaaggctttgttggtgttgttgtagactcagacagtgaagcactgtgctgcattataacttaaagtgcaaattgggaccataatatttttagtgatgggaaacggaagcgcaaatggtatccaccacatacgtggtcaccaccatgtgcttaactatgtctagaaattaggttccacaacatataaaaacttctggtctaagggctcttatggctcataaccactggcgggcttttagctactgattacttgggttcattgtcacttgcattaacggttgagaaatggtccttggtacagccattgctttcttcatcatacactggattaccggtctccagctcccggctcgacccatgcgtccgagagcaactcatcagttacctaataaataaggaaaattctgaaggagtaatattgcttggtcatagtactggatgccaggatattgtgcattatatgcgcacaaactttgcctgttcgaaagcggtttctggggtcatcttgcaggccccagtaagtgacagggagtatagagcaactcttccggaaacagctgaaatgatagacctggcagccaaattgattagcgagggccgtggaatggatttgatgcctagaaaagcaaactcagatgctcctattactgcctacaggtaccactccctttgttcatatatgggtgatgatgacatgttcagttcagatctaagtgaagatcagctgaggcagagacttggtcatatgtcaaccacacagtgccaggttattttttcaatgggggatgaatatgtgcctgaatatgttgataagagggctctagtagacaggctatgtagggcactgggaggtgcagagaaagtcgagatagaatggggaaaccatgctctgtccaacagagtgcaagaagcagttgtggccattgtagattttgtcaagagggaggggcccaaaggctgggatgacccatggagctagatacagcagttataatctcatttgtaactagtttgtgcttttcctcttctctcttttctccaattgtaacttctttcttttgcattattattggtccatttttcaatagtgatatgctatttttcttataacccccacccccacacatgcatcgcgttctcattctagtatggtgtatcacatatgtaaattgcgttaggaatcttgattatcaggctgtctttggtggatcatgtaaaattggagttgtggg

SEQ ID NO: 103145 - DNA, 3006 bp, Zea mays
  Clone ID: MRT4577_25575C.1
cattggtacctcgagccggcgggagtaaaaatgaacccgtttccttcccgctggtcttgattgacaacagctcgatccaaccagcccagaaaattcgcagccgccaaccacccgaccccacatggccacatccgcgaccgcgatgcccacgccgtgagcccgtgaggcgcgccgctggagccgccgcagccgttactatgacctcgccggcccccacctcctggttctccggcctctcgcgctcctcctccaccatggccggcggcgtcgcctcggcccccgcccccgtctccgcctcggcccccgcccccgcccccgcctccgcctccggccccgcctccgcgtttctccccgacgcgcccaagtccgtaatcggcgccggctccggaggaggcaagcggaatcatctctgcggggcgctgttcaagtacggccccaaatctgcgcaggtagcattcaggactggggattttaaccatcaggtgatcttcattggtggcctcacagatgggcttttagctactgattacttggaaccattgtcacttgcattggaggttgagaaatggtccttggtacagccattgctttcttcatcatacactggatatggaatttccagcttacagcaagatgcgttagaactagagcaactcatcagttacctaataaataaggaaaattctgaaggagtaatattgcttggtcatagtactggatgccaggatattgtgcattatatgcgcacaaactttgcctgttcgaaagcggtttctggggtcatcttgcaggtattttccctgcccatgctcttgctctgaatgcccaggtagaggaataaaagttatttaaattttatgtgtgctaaatctctctctgaatgtaattcttactgatcaactttggaacatgttaagaagacttgattatatttattggtattaactttataatttaatgatatctttgttgtaacttctacaagtactctgaatgttgtgacaagtgtccgaacaagtgatggggacaccgatgactttccaattaacataggactacatcaatttttttttgtgataggcatggtgattgctttggtgatagatgaggtcacaagggacatacaaggagatataccgtggtgtatgctttttgccgatgatgtggtacttattgaggagagtaggagtggtgtttcgcaaaagttggaattgtggaggcagacgttggaagcaaaaggttttaggcttagtaggtctaaaacggagtatatgaagtgtgatttcagtgccatggggtatgaagatggcgatgttagtcttgatgggcaagtggtacccaaaaaagacacttttcgttacttaggatcaatgcttcagaaggatagagacatcgatgaggatgttagtcatagaattaaagctggatggttgaagtggcggcaagcggcgggtgtcttatgcgacccccgggtgccacacaaactaaaaggcaaattctacaggacagcaatccggccggctatgtggtatggagcagaatgttggcccactaaaagacgacatgtccaacaactgtgtgtggcagagatgcgtatgttgcgctggatatgtggccacacaaggagagaccgagtccggaatgatgacatacgagagagagtaggagtggcgccaattgaggagaagcttatgcaacatcgtttgagatggtttggacatatccaacgaagacctgaagaggcaccagtgcatatcggaataattaggcgtcccgagaatgtgaagagaggtagaggtcgaccaaccttgacgtggacagaggcagtgaagagggacctgaaggagtggaatattgataaagagctcgccgtggatagaaaggggtggaagtgtgcaattcacgtgccagaaccttgatttatagttccgcttttcctccttaatcgtttgaccttttcttgtgcccatttagaccttgctggttcttgtgggttttatctcttttatgtgttcccccgtttcgtcgttttcggttctcctttgcctttgtttcccctgttttctttgggggttgagctctgaggttttcatacggggtttcatctctagcctaccccaacgtgcttgggacaaaaggctttgttgttgttgttgtttgttgtaacttctatcattttctattcctcaggccccagtaagtgacagggagtatagagcaactcttccggaaacagctgaaatgatagacctggcagccaaattgattagcgagggccgtggaatggatttgatgcctagaaaagcaaactcagatgctcctattactgcctacaggtaccactccctttgttcatatatgggtgatgatgacatgttcagttcagatctaagtgaagatcagctgaggcagagacttggtcatatgtcaaccacacagtgccaggttattttttcaatgggggatgaatatgtacctgaatatgttgataagagggctctagtagacaggctatgtagggcgctgggaggtgcagagaaagtcgagatagaatggggaaaccatgctctgtccaacagagtgcaagaagcagttgtggccattgtagattttgtcaagagggaggggcccaaaggctgggacgacccatggagctagatacagcagttataatctcatttgtaactagtttgtgcttttcctcctctctcttttctccaattgtaacatctttcttttgcattattattggtccatttttcaatagtgatatgctctttttcttataaccccccctcccctaaaaaaaacatgcatcgcgttctcattctggtatggtgtatcacatatgtaaattgcgttcagaatcttgattatcaggctgtctttggtggatcatgtaaaataggggttgtgatagtttgaaacagaggatgatataggggatgtgacagggagctgttggagacggcaatcagatcaacttcgtgcaaacttcagttttgg

SEQ ID NO: 103146 - DNA, 229 bp, Zea mays
  Clone ID: MRT4577_25576C.1
tcggccgcttccccgtttttagctactgcgtttcttgcgcgcaaaaaggggagacattgggcccatatggttaaccacgctcctcggcccattttggcgtttgaataaacacctccggccccggggcaaccaacctaatctttgcgctcgcaaacccgttgttcaactccgtccccattgtcgccatcacgggacaggggccccaacccatagattggaccgacccctt

SEQ ID NO: 103147 - DNA, 596 bp, Zea mays
  Clone ID: MRT4577_25577C.1
ccggccgggggtcgcattatttttttctcgtgtggcgcgcgacgcgaggagctgcccctgctccgggtccggcgcgcgggcaagctgggatggcgccgtcccgagccgcagctcggttcgcctcgcctgcagtagagctcgggtcggcgccaaccgcggggccgcaggggacgagacaactcgctcttccgcgggacccgcatccgccgcgtcgagacggctgggttccttccggacaaggacggagcagccggaatgcccgatgacatgatgcatgagatccgtccaaggcgcgcgcggtccttgtccggaggccggttcgggagggggaacaactgaacaaggcggaggagcccgggcccggaggggagtcaacgaggccgagacggtcgacgtaaacgcggtcgaggtgaggctcatcggaacctgcaagtcaacccgggtgcgccacagcgtacacgtacgatgacataattactgaagcatgttcgtaacaattgacgtggtactttccgattgcttgctgcagataaccgaggattccatcatatggaaatcatggcgactgcacaaaaaaataaaaataatttgcggtc

SEQ ID NO: 103148 - DNA, 427 bp, Zea mays
  Clone ID: MRT4577_25578C.1
gcagctcgccgccccggctcgcctccccggcgctgcgctgcttcgcggcgggcgtcgggcctccggctgggggccggtcattcctctgcttcatcttggccggcgcgagaagtgtcgcctccagactgttccgccgttcgccttcgactgattgggggggggtcggcttgaccccgtgttggagctgcgtgccagtcgggttcgggcgcgttgcacgggtcgatgcttcggcgggccgacggcccatctgtgtttggaagctgaagcggtactaagtggggaggagcgttggtggtgagtatcgtttgttttacgttgccctgtgggatttgtaggtggaaagttggccgtgggtggtgtgtctttttgtggttttttttgtttggttttttttttgagtttttttgttttattttttttgtttttt

SEQ ID NO: 103149 - DNA, 533 bp, Zea mays
  Clone ID: MRT4577_25579C.1
gtgtgaggtgctgaaagtgaaagcagcttgtagacatgcagccgaggttcatcctaaccatccaagtattgaactgatcagaacaaataccgatgaaatggcctcctcatctgaccatcctaacacagagcccaggaattgatgactcggtatccttccaacccaacagtaggtaaatgtgagttgcttaagtaccaaagagagaggtcctgttcagcaagttgattagaagcattgggggcttgttaattagattcgtggttcttagtctaaaatcacattgaagagggagatggacccaagtgatgcagttcatgtgttatctgtatcagtctctatttttatagactgtcctatattttctcgaaactatcttgcgttgattttgtgtgaagtgtacttttaatggcacaggccatgtatttccttggaaacgaccataagagtttgtatatggacttattttttcccccttttttttcttgagatgggatgtgtatttgcttgaaagataaggatggtattatctttgt

SEQ ID NO: 103150 - DNA, 422 bp, Zea mays
  Clone ID: MRT4577_2557C.1
aaaaaaaaaaaccatccgggaaattcggattcaggaagggcccaccacaacgaaaatttgcaagggtggattacggcccccgaaggggggggggaaaaaaaatcaaggggcccgacaaaaattcaggatttcatcccctggggggcttcttccttataaacgggaccactaaacttcctacaaaaaccaaaggggggggtcgccccattaaaattggaaaagcacttcgcccgaacccttccttttgggctcaaaaattctctgaacggcggtaggggggggagccccatggtcccaggcgaggcgggagcacccttggaaaacccatcttttgaacccttggactcacaaatatgccggggttgggcgttccgggtttttccggaccttgccccgacgacgacttgggggaaccccggggg

SEQ ID NO: 103151 - DNA, 630 bp, Zea mays
  unsure (1)..(630): unsure at all n locations
  Clone ID: MRT4577_25580C.1
atgacgcctgggcggacgcgtggggaagacttcattacctttagcgggcaacattcatctcagtcactgcaatctctgttcaatctgcggtcagactgcaagctacgtcggctggccgtccgaaatcaacgtgtgcagcgcttccctgaagaaaccatggacatgccagaggtgttgagatcacctaaatgtaaggagcttaattttgagggtatggggccctgtgatagctgtagggcttaagcattggcatggcttgttaaacaactttgtggttcttagtctaaaatcccattgaagagggagacggacccaagtgatgcagttcatgtgttatctggatcagtctctatttttctaagctgtcatatattttctcgaaactatcctgtgttgattttgtgtgaagtgtacttttaatggcacgggccatgtatttccttggaaacgcccatgagagtttgtatatggacttatttttcccccattttctttcctgagatgggttgtgtatttgcttgaaagataaggatggtattatctttgtatttgagctctaaatgctttaatgaagcgatcctccttgatggagnnnnnnnnnnnnnnnnnnnnnnnnnnnnnnnnnnnnnn

SEQ ID NO: 103152 - DNA, 182 bp, Zea mays
  Clone ID: MRT4577_25581C.1
atgtctggcgacgcacaggtaagcacgggtctcggctcgaggtcgtgtcgactggttcgtctccatcgtgcctctcgttgccttcggctccatcgaaggtgagtgtagacgtcgcgcgccgggggcgactgcacgcgcgtgtgcgattcagtcttcggcgtgcggtggtggtcgcgagatct

SEQ ID NO: 103153 - DNA, 615 bp, Zea mays
  unsure (1)..(615): unsure at all n locations
  Clone ID: MRT4577_25582C.1
cgcgcgcatgctcggatcctctattgcggtcgccccctttnttttnttttttttttttttttttttttacagggagaatttgaggcttatttcggaagcaaatacacaacccatttcaggaaagaaaatgggggaaaaataagtccatatacaaactctcatggtcgtttccaaggaaatacatggcccgtgccattaaaagtacactttacacaaaatcaacacaagatagtttcgagaaaatatatgacagcttagaaaaatagagactgatacagataacacatgaactgcatcacttgggtccgtctccctcttcaatgtgattttagactaagaaccacaaatataattaacaagccatgccaatgcttctaatcaacttgttgaacaggacctctctctctggtacttaagcaactcacatttacctcttgtccctcaagaattcatccagttcatttataaattgttctagatcccatctggccatgtcaacttgtttatactcacgatcgagttccaatagcatcttctcgaatgtcctattcagattaggagttctaccaatagaaataaaagcagaacagtcgaattgcttctaagcatgtcatg

SEQ ID NO: 103154 - DNA, 1908 bp, Zea mays
  unsure (1)..(1908): unsure at all n locations
  Clone ID: MRT4577_25583C.1
gccgtgtgctgcatatagnaaaacactacgtacccatcagcctaaagcatctagggaagctgttgcatctcaagttcctagagatatttgacacgactattgatgagctccctagagaaattgcgcatctgaggtctcttcagacactggtattagtccgtactggactagacgagctgccactggctgtttgctcgcttacacggctcatgtgtctgatagcctatgggttcgaaaggtttccagctgacaggatggggaacctaacgtccctggaggagctacgactacatagggtagttggccggagtgccacccaagccctagtggcagagcttggcaagctgacgaggttgagggtggtcaggatcaccttttcagagcagctagaggagagcttgcaagaagcattagtgcaatctctgtccaatctacggttactccaggaactagcgcttttgtgtaaaatgacacggcggggaagcgatatgtggggagactgggagccaccaaggcagctccgatgcctgataattggagcaatcggcttctcacgacagcctcgatggatcaaccgctcctgcctgccacgcctctgctccttatatctgatggtgcacgctcttgaagcacaggacctagataatctagcggggttgccagagctccagcacctcacgctagatggtttcagctggcctccaaggtatactgttggcccagacgacttcaggaatctgaggttctgcgaagtgggcacaacgttcgagtttcgtaagggcgccatgccaaggcttgaagtgctgcgatttggagtttatgcagggtactggagttgggaagagaatggtgtgccgttcgagcagttcccaacgaaggatgtgatcgaagatcttgacttgtttttggataacgtccttttacttcagcaagtaatagtcaaagtcaattgcttaggtgctactgtcacacaagtggaggaggtggaggccgtggtcatgcgtgccgtggaaaatcatgccaaccgtccaaccataaaaatggatcgagcatatgaagaaaatatcttatctgatgaaaagctggaggctctgcttcagcaacacactaaactacaaggcggcgtgctccagctgaaggataaacctgatgctttcttcatcagccagctacggttgtatcgacatcttcaggaagccattattttcatcgactgtgcgggtgccagcatgtgtgaggtgcagaaagtggaagcagcttttagacatgcagccgaggttcatccgaaccatccaagtatcgaacttatcagaacaaacaccgacggaatggtctcctcctcatctgaccatcccaacacagagcccaggaattgatgactcggtttgttagatccttccaacccagcagcaggcggtgccggtcagcagaggtttgcgtgacgcaggagaagagatgcaggcttttgctggctctggaggagttcgaacgtccacgatgacttgtgcacaatcccagacacaggagacccacgtaaacatactgcatgcatacggagattgacagcagatgactctggagattgaaaaaactctggagattgaaaaaactctggagattgaaacagactgtaagtgtcttcgagatactctcacgtcgaatgattgggatgattcgcatgatggattgattattagggagcttaagttcctgattttgtcatgtttcaatgatgttaaggtgttgtttgcgcctagaatatgtaacaaggtagcacatcattttgctactattggttctgatagtcaagacttgatttggttgtataattttctagacgttgtatcagatttggtcgccaacgatttaatgctgtgcgaaggttaatgaagttttcagattgctatc

SEQ ID NO: 103155 - DNA, 283 bp, Zea mays
  Clone ID: MRT4577_25584C.1
ggccggaagcggggcgaccagcagcggacggcagcacgaaaggaaaccaaagccaaacaacgaaaaaagagaggaacaaagcgggacaaaaggaacaggaaacccaaccggaaaaggggccgcaaagaaacaccaaagccaggcaaagagaagaagcgacgaaaaaagaagaagaagaaacaacacaaagaggccacggagccaaaaccaaaaagggaggaagccagaaacaacaggaccaagaaccaaaacaggcagggcaccagaaacccaaggaggaagg

SEQ ID NO: 103156 - DNA, 3410 bp, Zea mays
  Clone ID: MRT4577_25585C.1
cccacgcgtccgcggacgcgtgggaaactccaagaaattgttctacaaaagaatagagagtcaggaaggagaaagccttgatggtgaactctctagtaaaatcatacataaatgtggcggcataccattggctatcattgcaatagctagtttgttggttgaaagatcacgtgaggagtggtcagaagtgtacgacaagattggtcttgggaatgaagacaatacagcaaagataatgtcatacagctactatgatctgcctccttatctcaagccatgtctgctgcaactaagcatatttccagaagaccatgtcattgatataaaatctaccatatggaagtggataggtgaaggtctagttcatcttgagaaacaagatgttagcctatttgaggttggagaaagatacttcaaggagcttgtgaatagaagcatgatccagccgacagaggacaaatatgatcggtttgtagaagggttccgtattcacgacattgtgtttgatctcatttgtaagttgtccaaggatgaagacttcattaccattagcgggcaacattcatctcaggatagtttaagaagagagaagaaaacaggtgtgcctcgctcagactgcaagctacgtcgtctggtcgtccgaaatcaacgtgtgcagcgcttccctgaagaaaccatggacatgccagaggtgttgaggtcacttagcattataggttgtactattgcggttatggccccaattgatagcttcagggtttgccgtgtgctgtctatagaaaacaactacgtacccatcagcctaaagcataagcatctggggaagctgttgcatctcaagttcctagagatatttaacacgcctattgatgagctccctaaggaaattgggcatcttaggtttcttcagacactgatattagtccgtactggactagacgagctgccactggctgtttgctcgcttacacggctcatgtgtctgatagcctatgggttcgaaaggttgccagctgagatgatggggaacctaacgtccctggaggagctacgactaaatagtgtagttggccggagtgccacccaagccctagtggcagcagagcttggcaagctgaggaggttgagggtggtcagcatcacctttttagagcagctagaggagagcttgcaagaagcattcgtgcaatctctgtccaatctgcggggactccaggaactaatgctttcgtgtaaaatgccagagcggggaagcgatatgtggggagactgggagccaccaaggcagctccggtgcctgattattggagcaatcatcttctcacgacagcctcgatggatcaaccgctcctgcctgccacgcctctgctccttatgtctgatggtgcacgctcttgaagcacatgacctagataatctagcgaggttgccagagctccagtacctcacgctatatggtatcagctggcctccaaggtatactgttggcccagacgacttcaggaatctgaggttctgcgatgtgggtacaacgttcgagtttcgtaagggcgccatgccaaggcttgaagtgctgcgatttggagtttatgcagggtactgtagttgggaacagtatggtgtgccgttcgagcagttcccaacgaaggatgtgatcgaagatcttgacttggacctggataacgtccttttacttcagcaagtcagggtcaaagtcgactgctcaggtgctactgccgcacaagtggaggaagtggaggccgtggtcatgcgtgccgtggaaaatcatgccaaccgtccaaccataaaaatgaatcgagtatgtgaaaaaaatatcctatccgacgaagagcgggaggctctgcttcggcgacacattgaaaaggattgctgcgtgcgcacgatgaaggataaatctgatgctttcttcatcagccagctgcggaggtatcgacatcttcagaaagccattattttcatcgactgttcgggtgccagcaagtgtgaggtgcagaaagtggaagcagcttatagacatgcagccgaggatcatcctaaccatccaagtattgaacttatcagaacaaacaccgacggaatggcctcctcctcatctgaccatcccaacacagagcccaggaattgatgactcggtttgtccaatccttccaacccaacagtaggtaaatgtgagttgcttaagtaccaaagagagaggtcctgttcagctagatgattagaagcattggcatggcttgttaattagattcgtggttcttagtctaaaatcacattgaagagggagacggacccaagtgatgcagttcatgtgttatctgtatcagtctctatttttataagctgtcatatattttctcgaaactatcttgtgttgattttgtgtgaagtgtacttttaatggcacgggccatgtatttccttggaaacgaccatgtggacttattttttcccccattttctttcctgagatgggctgtgtatttgcttgaaagataaggggcggggttatctatgtatttgcgcggttcttagtctaaaatcacattgaagagggagacggacccaagtgatgcagttcatgtgttatctgtatcaatccctatttttataagctgtcatatattttctcgaaactatcttctgttgattttgtgtgaagtgtacttttaatggcacgggccacgtatttccttggaaacgaccatgtggagttattttttcccccattttctttcctgagatgggctgtgtatttgcttgaaagataaggatgatattatctttgtatttgaactctagatgcttaaatgaagtgatcatcctggatggagatgcttatagacatgcagccgaggttcatccgaaccatccaagtatcgaacttatcagaacaaacaccgacggaatggcctcctcctcatctgaccatcccaacacagagcccaggaattgatggctcggtttgtccaatccttccaacccaacagtaggtaaatgtgagttgcttaagtaccaaagagagaggtcctgttcagcaagatgattagaagcattggcatggcttgttaattagattcgcggttcttagtctaaaatcacattgaagagggagacggacccaagtgatgcagttcatgtgttatctgtatcaatccctatttttataagctgtcatatattttctcgaaactatcttctgttgattttgtgtgaagtgtacttttaatggcacgggccacgtatttccttggaaacgaccatgtggagttattttttcccccattttctttcctgagatgggctgtgtatttgcttgaaagataaggatgatattatctttgtatttgaactctagatgcttaaatgaagtgatcatcctggatggagat

SEQ ID NO: 103157 - DNA, 859 bp, Zea mays
  Clone ID: MRT4577_25586C.1
gaaggaatgaaagactaatatcagaaatcttatgatatgactgatccaacacaatggagtatactgctggctaatttcagaaatcatataatgtgactgatccaacacagtgaagttgctactgggtagaagtgtagaacagaaacgtagtactttggacaccaggtatcacatgcatgatcacatcaagactagagctaatcacatgcatgatccaatcacttgaggctagtgactgcaaatctcgatcctgtatgtagacacgtacgtagcttggtgacgatggctaacaaggagtggaagcagagaccatgtcatagatgtccgacttgacgttgccgaagacgttgtcgatcagggcgaagatcaccactgataagtcgttgctcccgacgacgccgttgccgccgggcgccgcctgaacgctgacaccggagagggccaccatcctgtcgaacaccttgtcaatgtcaagaggggtgccgccgcatgcgctcgacaccatcctgcgcacggtttggagcccctcgatgatctgcggcgccatccaccacttggcacaccctctctcggcataccacctcacccgcacaaatacaaggaacacataagcaaacaccgagatcagtgggcgccatttctccgcggggatgcggcgcatcgcaccagccgcgaggtcgatgctctcgttcgccatctccttgaacctctcctgcacggccttctcatcttcagattctgaaagcggctttggtagttcaggcgggtagatggcatgcagcttggcagccctcttggccagatgacggtagtaatggtcgaactcctgcacatcctcgtctgccatgcggcctcgtgg

SEQ ID NO: 103158 - DNA, 772 bp, Zea mays
  Clone ID: MRT4577_25587C.1
cccacgcgtccgatgggatggcccaactgcagatctgttcctgggatactacacaatgactacattgcatactcggagctgctcgacaggagcgtcgtcggcggtgctgtaaacatctcctagagtcctcgggcacaagaaggtcaggcggtgatgccaatgcagatcatccaatcagatccagaatgcctgccactgtatacttggagctgctcgacaggagcgccgttggcggcattgcaaacatctcctatagtcctcgggcacaacaaggtcagccaatgacgccaacgcagatcatcccatcggatccggtattcttgacgaaaatccctgaagatgggaaacccacgctgctggtgcaaacaccgccggtgattccagtgtaggccccattgcccttggacgggatgtcgctgactacaatggagtacctttctttcttcgatgtcagtcgattatgtttactatggaatatggatgttctcttatatgcttggttgtagctcctgacacgcagttgtagcttggctcgaggcgggcatcagcgacgacaaacatccctgaggatcccaaacgcatggacggacggcaaccgccggcgtcgacctcaccgtcgtcgtccccatcggcgaacagcgtcgaggaggccgagctggccggagcgttgccgccgccgagcgggcggcgccccgccccccacgtcggagttcggacggtggaacagacggcgcgaacgaatgttccggataaaaccggacgcgtggcggac

SEQ ID NO: 103159 - DNA, 660 bp, Zea mays
  Clone ID: MRT4577_25588C.1
tttttcgattgggtacctcgaggccggccgggagctagtttccgatacttcgatccccactccatctcctccgaagaccgtcgcgtcgctccgccaccgaagcagctcaaggactggctcgggtggggctgcgactgtcgcgcggttggatccgaggctatggagcagtgagctccgtagttgacggccacctcaatctccttggcgaatctgtatagatttctctataagatgagctggagatttcctctcttcggctctcagcatcagcaagcagatccaagtttccaggacatccctacgcagtcttggtaccctccctcggtggcaggttcctcttcacgtccatccacccctacctcttctagcgctagtctacaccaaagagcttcggatagtccgcagtcttcatcccgtgggcaaccatctcctgctgaggctgcaggcacaattgcccgtttgaaggataagagtattgtacgagttaccaacgctattcgaaagacagagaggaatatactgcattcctttaactcacttgatcaagtgaaaaccccacacacatgcgcgctgatgagcttaaaaaaagagacaattgcaactttgcaagggcaatatttaacaaacaggagcagccgaatttttggaaccttagggaat

SEQ ID NO: 103160 - DNA, 277 bp, Zea mays
  Clone ID: MRT4577_25589C.1
ccaaggccgatcattttttttgactttgtgcatgtatatccgttcgcagcctatacacatgttacatctaagtttactacaggtagggatatatgaatccttgaaatacaatgtaccatacctcaagtagaatgccatgatatcaggcatcctgtttccacgcatataacatgaggattacgtggacgattctgatgctacatacacatacgtagctacacaagacgggctaatcaaattcacccatcatcaatcaacctaagaacggcatttcatt

SEQ ID NO: 103161 - DNA, 133 bp, Zea mays
  Clone ID: MRT4577_2558C.1
ttctcacctgggaccaccggtgcactgcgcacaccatcctcaaaaacttaaagatgattgtacaggtataaaagtgaatcacgaccctgaagagagcccttagccggacctataatatgtaacacagaacaaa

SEQ ID NO: 103162 - DNA, 466 bp, Zea mays
  Clone ID: MRT4577_25590C.1
ggcaaaaaaaatggggtttcaattaaatcctggatccccttatttgcatccctacttgcctggggggcccccttaattaagggggccttgcctctaacccccctcgcatttttcccttagttcccacatagtccaaggcccccctgcctcgccccccgaacattttatcatcatcatcatcaccgggggcaggctacccaggggcccccccccaacaaaaagaaaaaggtccatttgggccctcaaacccaacaatgcctgcctgggggggagccccccccgaaccgccaagttcattaaagccccccatttgggggggaaggcccggaaaaagggggcgtggcccgggcccgcgaggggggccaaaagggttcctatggggcccgtgcccgggtactcggccgggaaccaaacccccattaccgccaacatggggaggcccccctttctggacccctgggggccc

SEQ ID NO: 103163 - DNA, 1721 bp, Zea mays
  unsure (1)..(1721): unsure at all n locations
  Clone ID: MRT4577_25591C.1
ctgcagtaccggtccgnattccgggaaaaagcttggagaaatacaacagcaaaggttctctgttgctatcanagagactgaaaggctgctattaagaaagcacttactgaggctgaagagaaaaatgaagagttactgatgaaagttgaagatgctaatgaaaaataggacaccttcaaactaagataaatatgcttgaagataatgtagccgcaaaagagtttctttagaagctgcaatcaaggaaaatgacgcaaccaggaaatctcttactgaagctcaagagagaaatggtgaattactcaagaaaatcagtgacagtgactacaggatccagtccgggtttactgcaagacacggtacaaaagcttcaagtagatgcaatatcaaggttgtcgtcttttgtaatggaaaaacaagaaagtgatattgcaaagagagctgttactgaagctcatgaaagaaatgaagatttactgaagagaaatgaggacctcctcaagaggaatgatgatctgattaagaaaattgaagactctagtaaaattgtcactcaacttcaggaagctctacaaaggcttgaaggaaaagcatccaacttagaggttgagaaccaagttcttcgtcaacaagcaacttcaactccaccaacttcagctaaatctccagcttcacgtgcaaagatctcaaggatccatagaagtccagagaatggccatattttgaatggtgacattaggcaaactgaaatgaagccctcaactggcacatcagcagcaattacctcagtagctaatgttcctgacttgggcgaccaaaaggagtttgaacatggagaaaaactgcaaagaataccaaaacagaaatatcagccttcccataaccagcagccccaagacgatcagcagtggctagtcacttgtatttcacaatatcttggattttctgggagcaaacctgttgcagctctccttatataccaatgtcttctccattggaaatcatttgaagccatgaagacaggtgtcttcgacagcattttgcatgctataaactcagccacagaggctcaaaatgacatgagaacattggcatattggttgtccaacttatctacattaacagttctccttcaacgatcattcaaaactactaggacggcaatctcaactccacaaaggagaagattttcatcggagaggatctttcatggaaatcaaacttcaaatgctgggcttgcttatctcagtggtcaatcagttgttgggtctgctggactgccccaagttgaagcaaaatatcctgctttgctattcaaacagcagctcgtggatctaattgaaaaggtttatggcatgataagtgacagcgtgaagaaggagctaaaccctttgcttgaattgtgtatacaggatccacgaacttctcactcgagtatcgcaaaaggcaatcttaatggcatgggtcaacagaaccaactcacacattggctgggcatagtgaaaattctcactagctacttggatgtactgagggaaaatcacgttccctcaattctggtgcataaactcttcactcaaatgttctcatttattgatgttcaactatttaaccgattacttttgcggcgtgagtgctgttcttttagtaacggggaatatatcagagctggactaactgaactaaaacattggtccgacaatgctacaagagagtttgca

SEQ ID NO: 103164 - DNA, 1182 bp, Zea mays
  Clone ID: MRT4577_25592C.1
ttgggaccctcgaggccggccgggcgcgctctcgtgccgcagacgcttcaccatcggaaaggccacagctagggttcgatacttcgatccccactccatctccaccgaagaccgtcgcgtcgctccgccaccgaagcagctcaaatttctctataagatgagctggagatttcctctcttcggctctcagcagcagcaagcagatccaagtttccaggacatccctacgcagtcttggtaccctccctcggtggtaggttcctcttcacgtccatccacccctacctcttctagtgctagtctacaccaaagagcttcagatagtccgcagtcttcatcccgtgggcaaccatctcctgctgaggctgcagggataattgcccgtttgaaggataagagtattgaggagttacaaaggctattgaaagacagagaggcatataatgcattctttaactcacttgatcaagtgaaaacccagaacaatgtgcgtgatgagcttaaaaaagagacattgcaacttgcaagggaaaatttagaaaaggagcagcggattttggaacttaggaatcagtgcacaataattagaaccacggaactggctgctgctcaagaccgcctaactgatttggagaggcaaaaggatgatattatgaggtcctattcccctgccgcactgctcaacaagctccaaacatcaatggcaaagttggatgaggagtccgaggagctgcaccagaagttcctggagaaggacatcgaccttccaacctttgtgcagaagtacaagaagctccgcacggcttaccacaagcaggcgttgctccatctcgccggccagacatcactccgctgacatccggccaggcgtcatggcaactttgttgtatttctgctcgcctgttcttgttctacactatgcttggccctgttttacgagtgcagcctcttgtagggatttgccgaacatcagcggatattgcatgtatagttttatgtcttgcaaaaacgtcttatgtactctgtcctggtgtagtggtgtttacgtatctagtgtccaagttgggattcatttgtggtaactaaacactttgcctattttgttcaattcgatgataataaagcttttgtacgtttgtatacaaaaaaaaaaaaaagaaaaaaaaaaaaaaaaaagcggcc

SEQ ID NO: 103165 - DNA, 279 bp, Zea mays
  Clone ID: MRT4577_25593C.1
cctcgagccggccgggacgcatagcatacgaagtcatctataccgtctgtccatactctcttccgattccgacagatatcactgcaattaccccattccgtccaccgtatcgaccttcacgccagtcgtcggttctacttccgaaggcgtcgcgcgcggttgtttgagaggagaggaggaacatgcatgagtaaatataagtcccccttcaacattgcggcttccgaccccgcaacttctgctaagaactttactgcataaaacatgatatacaacctg

SEQ ID NO: 103166 - DNA, 651 bp, Zea mays
  Clone ID: MRT4577_25594C.1
ctcgaggccggccggggagtcccgataggcaatacacctgtgataataaagcatagaatcacaactcttttttcccctaactcgcaagtggcagcggacatgtatccgctgccccgccgccgcctatggggcctcatcctcctcgccgccgtggtggtggctacggcgaccgccagaggccctcaggagaacgtgataatcacctgcgtgacaaagtgcggcctctagaaggggtgcatatggtgactcctgaagctcctactgatcagatacaggacacgtggaggctggagatcgaactggcgacgatctggtacgtacacttggggtctgacttcgcctactaacagaggaccttaacaaggaagttctcgagggctactatctgggtcttctgcgcggtgcaggccaagaagttcttcttctgtgcctacggctcgacgatggatacgcaccctgatcagtgcacctatctagatgcaagccggctacccctctgaatcgctatcagcctccatgtcctgaccatgagcgcacctgatcgatccagaggatggcagctaaatgcgctgccagccatggggtcatcagagagacttgcgctgttccccgttgcgcaggcatcaacctcgagttagacaatccacgcta

SEQ ID NO: 103167 - DNA, 515 bp, Zea mays
  Clone ID: MRT4577_25595C.1
catccacctccgtcaggcactctaacatcttgctacgacactgcctcacaggcaacgacgccatgctctccgtctcaccgcgtgtgcagcgaagcgcatcgtggaggacgcgggccaccacatgctgggccgactctcctcgatcataggcgaggagctgctcactgctcagaaggcggccctcgtccgctgcgaggacatcctgcatgtcgccgcgtcctcgccccccagacagatgatgtacctcctcttcctccgcagagcggatgaacactcaagccgcaccacggtgccatgcacttccgcggccccgccaaaatcctgctgggcaccatccgcgccgatgattccgcacaatacctagaggtggaatgctggctctgccgagagctcaagtacgtacgaaggcgtcccgcctggcgtgccactagaccaagcggatgggcatccctgacactcttagggatatgatgctacggcctggacactagcacagcctcctctgctagatctct

SEQ ID NO: 103168 - DNA, 588 bp, Zea mays
  Clone ID: MRT4577_25596C.1
gatagtgtgagcattcagaaaccaccaggcgaggcgcactagcaacagcctaacaacagtggctaccaagatattatgcctccttgcgcttcttgcgcgctgtgcgagcgcaacagatgcgtgcattgttccacattgctcacttgctcctagttccattattccacagctcctgcggggggggcttcactggcctttgaacacccagcggtgcaagcctatcggctacaccaagcgattgcggcgagcgtcttacaacaaccaattgcccaattgcgacatcaatgcttggcgcatctaacattacaaaccatcgcatcgcaccaggaacgacagttcctaccagcagtgagccacctagccatggtgaaccctgtcgcctacttgcaacagcagctgcttgcatgcaacccacttgctctggcggacgtagttgcaatccagcgacagcaacaactgcgacagttgctgccagcgcttagtcgactagccatggtgaaccctgccggctacctgcgacagcggcaactgctttcatctagcccgctcgctgtgggcaatgcacctacatacctgcagcaggaattg

SEQ ID NO: 103169 - DNA, 347 bp, Zea mays
  Clone ID: MRT4577_25597C.1
ccctaggctcctataccatcagaccgcccgctgacatcgtggtttttattttttgcaaggagtccaaggcgttgggggagggctagaagaactcaaacaagaagctcaccgcgtggttcaagaaatacccacccaacagcgcccctgtcctattcatcaacgccaccattgaaaagaccaagcggcggttcgagaactacagtaagttctgcctgctctgcggcgccgacagcctgccgtaccatatcgggagctttgaccatgtgaactggggcgagttcttacaccccgggcctgctcttgctctacatcgtcagaaagaatcggatgggtcggaaggagctacc

SEQ ID NO: 103170 - DNA, 652 bp, Zea mays
  unsure (1)..(652): unsure at all n locations
  Clone ID: MRT4577_25598C.1
gctagnagagaggtcatatcgctttcgtcctccccttcaacctctccggatggggaatcaagggttgacccttgtgacggagggtaatcgcctattcctctcccacctaccatgtgctgcaatgtggggtcggatcctcagcccttccgatgttggcgatggacgagctacagggctgactggagatacctcgctcggttgtgcggatgtccgacactcatatcacgggtctccaagcgtgattagccatcgtggaggcctggcaggaggctgagttggtggagcttcattaggagattgactcggtgacccaaagcgtctatgctcgcgagacaacctgcttgcaatgcttactcgacattcgaatccgcattcgaaacatcgtggatcacatccttctccatggggccggtgttgcctttgctgtcgccaagctccgcactagggtgcttcgttcgtggtctttgagaacctaatctagggatacgacgatgccgcctgtggggtcgtcagcgctgtgtctttaaaggatctgatctgatgggttccctagggccctcttctggcgttcaccttttggttcattggtgcaggcatcttgtaacaccacaaaactatcaactaaaaataatgcaattagattattagtggt

SEQ ID NO: 103171 - DNA, 263 bp, Zea mays
  Clone ID: MRT4577_25599C.1
cgctcttatgctgcagcagcgcctttcgagctgggggggtaatggtcgacgtgctgacatccgaaagtcgacttgtgacggtaatccatacgcgctggacctgactgcttacttagctacccatacctattctcaacaatgtaaggaccaatcccacggaaaagtagtaaccataccacggtatcacaggttcttgatctgttataagacctgagcgcaagatgatgctcatgaaagcttactgaaaagctgtcatataaaac

SEQ ID NO: 103172 - DNA, 1815 bp, Zea mays
  Clone ID: MRT4577_2559C.1
gatgtttagtacatatagtataaaaggcaacataacacttaagcaaacacacacacaaacagagagtgttttctttgtaacaaaaaccttgccttttatactatatgtactaaacatcattgatatgtaatcagatgcatagctcgcttacaagaaacctgccaaggttgtcccaaagaaccggttgaagagagaaaggatgctttgaagttattaacgaaagaggagatgtcgggaaacaagtatccctcaagaattaagtccgacgaaaagccgtcgcggaccgctgcttaattctatgttatctaggcggtcttacctccacaggtcgagtttttttattagtcacatagcattttctcgacagttttacagttttaacttcaataaatatttctaagtatgaatctttgaggctgtagattgaacactcttgattcattccttaccacttgataaaaactggcaatataacaattgcatatgtcgcacacttataggagcaagagcaatcttatttactatgttatatatttatcttccgtacttcacttgaaaatcatttttcaatcctaaaataatatttgttgcaacattgtgagtagttttgagctgataaaatacaagtatgtgatttggtttgcatctttgtatgatgtgctctgagttggctaattataattgtatgctttgggtgggggattcatctatatttaatacagggacatacttctgcattaggttgtcttaaaaatgcattacgtagagcatgtaccaaaatttttattagctataattgatgtttagtacatatagtataaaaggcaaggtttttgttacaaagaaaatactctctgtttgtgtgtgtgtttgcttaagtgttatggattattcattttttgtaaatttagtgatatttttatttgacctgctgcacacctagctaatagttcatttctctgttggcatagcaagaagtggtacacaggttgcatttggacaaggaaactcttattatgcaagaaattttcccatgcccaaaaaggattcttcagcaggtggagcttcgaagttaccaaaagaatatgcagaaccatgggactatagccatgattatcctgttactctcccactaaggaagccctactctggaaatcctgaaattctggatgaggaagaatttggagaatcttctgccagcaggacccaagatgatgaattatctgcagcagagcagcttggattaatggatatgtcgtcggaatcacagttcctcttcttccagttgccatcctctcttcctttaccgaggcagccacaatcaggtgctgaccctaacgaagtccgcgatgagaaacgtgaggacatgaggccatcatcgcacaatggctcgaaactcaaagaggttcctgaaggctatatggggaaaatgctcgtatataagagtggtaaagtgaagatgaagataggagacactctctttgatgtttcatttggctcgaattgcatgttttcccaggaggttgcagcaatcaacatcagagaaaaacattgctgtacggtgggagagatcagcaagcgtgctatcatcaccccagatattaactacatgttgggttctgttgacaagatggaagaatagtccattggtttctttcgcgcaaaccatatagaccatattatgccattacaagatagttttgctttcttatagagaacgacctgtgataccctctcagacttcttcaagaaaagatgcctcaaacaaagaaaaaagcctaaaaaaaaaaaaagggcggccgccaccgcggtgga

SEQ ID NO: 103173 - DNA, 576 bp, Zea mays
  Clone ID: MRT4577_255C.1
taattgagcatcgcagagataggcgtcttcgtactcgcctacctccgcggctcaaacctttcccccttctcccattccttccgccggccgccgctccacccgtacgacgacaccatgagggagtgcatttcgatccacatcggtcagggcggtatgcaggtcggaaaagcgtgctgggagctggactggcttgagcatggaattcaggctgacggtcagatgcccggggacaaaaccattgggggaggtgatgatgctttcaacaccttcttcagtgagactggtgctgggaagcacgtggcccgggctggttttggtgaccttgaaaccactggcattggtgaggtgagaactggtacctaacgacaggtcttccaccctgagcaactcctccatgggaaggaggatggcaacaaccactttgcccgtgggcactacaccattggcaaggagattggtgaaccgtgacttgatcgcatcaggaagcttggcgacaactggactggtttccagggcttcctcgtcttcaacgatgttgtgggaggaacgggatctgggcttgggttcctccaccta

SEQ ID NO: 103174 - DNA, 336 bp, Zea mays
  Clone ID: MRT4577_25600C.1
agcggccggggactcttacgcacagggagaacgaaggtgaggggggggctatctagaacgcaacgggaagcaaccgccagacatggcacaggcagcacacgcaaacgtactaacgagatggaggggatagcaggtgcccagcctactggcgaaggcaaaccatacggcgtgccgctgccgcaccctgacgatgtgagcacactccaccaccttaatggcggggtaccatgttcacgaagagaagggccgggaagccctcgccagaccaccaggaccgatgcgaggctggggactgcagctttgacgccctgagcctggccacgaccccggagaact

SEQ ID NO: 103175 - DNA, 381 bp, Zea mays
  Clone ID: MRT4577_25601C.1
ataattggggagaggggggcccgtttaaagggccccaagggggaaaaccggggggcggggagggaaacccaggggcattgggggggtgtttttttgggggacgggctaaaacttgtcccggggggggcacgaggacgcccgcacctttgaaggggggggcccttaacgaaggggccacttggggggggaggagcaactttttttttttgggccagtttgagggatagaaaaaacctttttgggaaattttttttaaaaaaaaaattggtttttgtttaggggcacataccctgccttccaagagggggggcaccccccctttgggcccacaaaaaaagagatcttgggggcaaacaacggggggggttatggggccccccc

SEQ ID NO: 103176 - DNA, 120 bp, Zea mays
  Clone ID: MRT4577_25602C.1
cgacgggtccatcatgctgtacgacctagcgacacaggaccgggagatgctggagtacggtcatctactagtcgcctacttcagttagggctagacccctctcgttccccgtgattgcag

SEQ ID NO: 103177 - DNA, 368 bp, Zea mays
  Clone ID: MRT4577_25603C.1
ctttctttttttttgatactgctggcaaaatgccattcgaatcgaatccgtaccatttgaggctgcaatacatgtgttttcaatgcaaaacattcatgagtacacacagctactgtctataggtgggtgtcatccatgggcagatgtacgtgtacgccctggaccatgaagaggcacgtatatgaccaatccagcgagcggcccaccgatatgaggcccgtcccagtagacccagtgggagggccacacctcaggcatgagcgcggggctctatgagcgcgcggtgttcatggacgcgccggagaagggcccctcggcctgcacttttgttcactacttccaggcgcaccagcaactgtcccattgcc

SEQ ID NO: 103178 - DNA, 115 bp, Zea mays
  Clone ID: MRT4577_25604C.1
gacaagaccaatcacatatctgagcgtctccgtttagtgaaaacaacaaccattggttgcagaaaccaactaaccgcctaaaaaggactggtataccgggataatgtgcattggg

SEQ ID NO: 103179 - DNA, 322 bp, Zea mays
  Clone ID: MRT4577_25605C.1
aaaaaaaaaaagaaaaaacaaaaaaaacaaaatttattttaaaaaaaaaaaaaaaaaaaaaaaaagaacaagaaaaaaaaaaaaaaaaaaaggccaacccatctaaaaaatccaacctttcttacacatccatccttacgtcatagttcttccatactcatacctaatttcaattcactccccattttattacactgcctcaactttaaaaaccttggcattaccaaacttattccttttccaaactatacccctttccacaacttccccatttcccaaaatgccctaacagataaaatttcccaacagtttcccattctaa

SEQ ID NO: 103180 - DNA, 368 bp, Zea mays
  unsure (1)..(368): unsure at all n locations
  Clone ID: MRT4577_25606C.1
atattgttcattnntgcttttcagggaaacggggccttttcccacaaaacaataccccggtaccctattccacccttccaaaacaaacgcttgttaaaaaaaccgccttaacaaatccaacctccgtttattaatcccaaaaactctacctcccacctcaggtaccaacggacttcttctaaccccatccgacgctaattgccgatgtctaaaaacttcccaacccggaagtggggaaagtgcccctcaccgtggccctttaaaggatccaaaacttccagaggcagacagtccacacctagctcgtggacaggggggagctaaccgaaaacaaaggggagacgtttaccacctcacataaagtaaaa

SEQ ID NO: 103181 - DNA, 951 bp, Zea mays
  unsure (1)..(951): unsure at all n locations
  Clone ID: MRT4577_25607C.1
gcacgagcagactgcagacctagcaggctagcaaccattctagctccgaattcggagcaggcgagggcgaactgaccgaggcgaggacgatcactgtccatgtccatggaggcggcggttggggcggagttcggacctcatctgcatcccgctctcgggttcagacacagccagcgccgtgtctttttttgctgttggcgcctgcatccgccccggccggcctcgcttggcctctgcggtggcgggggagcccgtccccgcggcgctatccccgtcgcggatggcgaccagcggcggcggctgcgagagctcgaggcggaggcggaggcggaggcggaagctggatcgatcttgggtcctccgaggagcagcccccgcgaggtgagggaggagatggcccggtgcttcgacctcgtccgccgcctcggtaggggcgccgtctacctcggctcctccagggtcccgcccacgcacccgcacttcctccaaaccaccgagctcgccagagagatagctcggctgctcgactgcaccacatggacgggagccggccctgggctcatggatgctgccatccaaggcgcctttgaggcagacaagcctgtcggtggcttgaggattgcaaaggaagcgggtgaatggacaagctcagcttccatccttacctgccaccggaatactacctcacatgcagttcttctctgcgaagaaacatgctggttggatctgcgtgccgaacactcttctgacaaaaccttttgtttcctgcagaaggtttggaaccttgaacaatttttgaatcttggccttaatcccttaaaagancggtttnggtncccgtcccggtttggttcccacttacaatcctttttatcccanttttngaatttcttaataaatccngaattgggccggttttnccggcaaatttccccctttgnaagtttttaa

SEQ ID NO: 103182 - DNA, 536 bp, Zea mays
  Clone ID: MRT4577_25608C.1
aatcataagcattttatttcggtagaatatactgaggaatcacatatacatatttctatagaatatgacaatatatcaactcgaaatagtaatagactaagtattgcaaagtactttggtgataattaggcggacgacaccattgtccattggcgcgcgcggcaagcacccaagccggcatcagcgtccgtgccatcaatcaacctggacgccagcggcggcggcggttctctgcgtctcgggcagctgcgagctggcagagacatcctcgatttggcgagggccaggatgcggatgcgttccgtttggatttggtggcttccccggcctcgtcgcgccgtaatgattcgcagcgacaccacacgagtcaaccaaaaatagctagcgtggcctcgcgtcgcaccaaccgccaaaacggcggtgccgtccttaggtgcagcggctgcgcgcagccccggtccctcgtcctctcgtcgcaggtcgcagccccgtcccccggcccgcctcccctcgtgttggggctcctcctgttcttc

SEQ ID NO: 103183 - DNA, 2259 bp, Zea mays
  Clone ID: MRT4577_25609C.1
atggccaaagtacgctccactgccagagttgagagtgatggagatgagaccgaagccactgaaactgttccgatttccgaagcaatgaggcgttctgggctggtttcatcagaggacacacctgctgccgaagcaacaccagctgatgttgaagaagttggttccgaagatgagtacagctgcggggtgccaagtaaacctagtcatctggactttggaaagtccaccatctctgaagctgatcttcctaaaatggtgaagcttggttattttagtgaggccaagaaggaattaattcgttttggtggagaagaaactatcccaaagccaggaaaggatgaggtagtagtcttcaaaagttttcttaaagctggtttaagattccccctaaacaagatgattgctattgtactgaagaagtttgggatttaccttcatcagctgacccctaatgctatcgttagtgttcccaacactgagggagtgggagatgccgaagctagagggagaaaagaagaagggagaacttgttcattgccttatcactacaagtttaagaaacattttaaagcaccctgccaagagtggttggacacaattgaggttatgtgcaacgagatcctcggcaactactctaagaaagaagatcagttaatgactgcggccttcggcactcgtccgaaacgaagattgaatcgggtgctggatgccttgaattttgattaccctgactatgagcaactgcgcggagatgccgaaggccaaaaaagaaaaaggattgccagcgtccttgacaaagaaggcaccaaattggcgaaaaaggacaaagaaatttctgagaaaagaaaactgagccctgagccgaagatagctggtccaaagaaaagaaaagctgcatccccaaaaccaaaaacgtcggcccaagaggaggaagctcctgcaacaccttctgctgccgaagtggaagagattctaaagacaccgccaccgacatcggcgtcaaaaataccatttattgaaagcgctgtcactgccgaaaccacagccaccggagtcgaaaccaccggagccgaagccaccggagcagccaccgaagccgaagccaccagggccgaaaccgagaccaccgaagatcctaatctagagaccacacttggtgatattgataacatgcttctgaaaatggctgaagaagaagctactgcggccgcggtggacacgacaattgagaaaggaaaagagcaaattgaagacactttggaagaagaaaactttaattttcaagatatacttggacaagagttatcagaaactgagaaagaagagctaaagaaatatgctatatcttgtggatacaaaccagggtctatgctatttggtggagtcaatgaagggaaactaagatgccttcggaatcgaaccgaggccaaggttgttaggactttctcaaaaagcgttggcctgccgaagattgaagtggacctctgcaggtaccagcgacagcatatcgccggtagcttgctctatgctaatttcaagagtatattactaagtaaagtgttgaggatgcaacaagatcttgaagacgagaaaaacgaagctaccatcaaagatctagaaaacaaagtcgaaagttacgaagctgctttgaagaaaaaggacttcgtcattcactctatggaaggttcactggctgaagctcaagccaaaactgagaaattaaatagcgaattactcataaaatcagaaaaatatgagcaagaaaagaagaatctcgaaacaagtctcaagaccgaaattgagaaaaattcaaatttgcagaaatcattgaaggagcttcaggaaaaatgcttagatttcggcaaccgatgtgtacagcggctgaaggatgtgttttactcaattggagccagctctgataagtttacaccttcagctgaaaacctgccaagcacctttgaatacattgagggcgaagttgatgcacttgacgaagttatcgctgggcatgccgatttctatgccctgttagcttctcgaggcacgactactgctttcctgaaggctggctgtacacacgggaaaattgttaataggccaaacttcagtttgtcgccagcagatttagttgacatccccagcctagctcgaagcataggaaacaggtttatgacccagatctggataaacggcgggcgaaaaatggctggtgacgaagctcggagccaccttaagccagatgatgaagctgaagaatga

SEQ ID NO: 103184 - DNA, 267 bp, Zea mays
  Clone ID: MRT4577_2560C.1
gacgcacgcgtccacccacgacgtccgcccacgcgtccgcccacgcgtccgcggacgcgtgggaaaaaaaattaaaaaaaataaaagaaaaaagttataaatataaaatgaattaaaggttaacccgcaaaaaggattaaagcttagttatacttgcaggcgaagtcaaaaatcataaaggggggtcccccaaaaggttcaaactttactttccctttaaagccgacgttaatgctcttcactcgggtcccctaatttcatttcctg

SEQ ID NO: 103185 - DNA, 271 bp, Zea mays
  Clone ID: MRT4577_25610C.1
attcggctcgaggggagtggcgcacacatttacacacgggtgcaagctttagctacgctagaatgcacttcgctcgctgctgggcgaatcctgacgacccacgcagcatgggcgactcctcgtggtcatcccaagactacatgacaatggttgactatgtgaacgggaatggcatcagtggcaacctcatcaaggcagacggcatggacacaccaggaagggatgccagcgtggaggatttctgcacttacacggagcaggaagagcctga

SEQ ID NO: 103186 - DNA, 112 bp, Zea mays
  Clone ID: MRT4577_25611C.1
ttcagagcgacatcattgattgtgcgatagtacacaggcaatatgaaccttttattcaggcttaagagtacacagactttagatctctgcctaacggactacagaccacacc

SEQ ID NO: 103187 - DNA, 1983 bp, Zea mays
  Clone ID: MRT4577_25612C.1
atggccagagtacgctccactgctagggttgagcgtgatggagatgagaccgaagccgctgaaactgttccgatttccgaagctatgaggcgttctgggctggtttcattagaggacacacctgctgccgaagcaacacaagctgatgttgaagaagttggttccgaagatgagtacagctgcggggtgccaagtaaacctagtcatttggactttggaaagtccaccatttctgaagctgatcttcctaaaatggtgaagatgggttattttagtgaagccaagaaggaattaattcgttttggtggagaggaaactatcccaaagccaggaaaggacgagactacgaagtttccagtgataagctaccgaagcaaatggccagccggatggaaatctgaatggttttatgttaaagttgatgaaggtgaagataaattggtccaaagtccgctagaactaaccttcggagaaacgaggccccgatgcaacatgataatggggagcccgagtcagactgctttggctgaatttcgagtgattttagatcatattggcactagagacctagtgcaggaatttttggcttttaaggtgttcccaacactgagggagtgggaaatgccgaagctagtgggagaaaagaaaaagggagaacttgttcgattgccttatcactacaggtttaagaaacattttaaagcaccctgtcaagagtggctgaacacaattgaaattatgtgcagcgagatcctcggcaattactctaagaaagaagatcaattaatgactgcagccttcggcacacgtccgaaacgaagattgaattgtgtgctagatgccttgaattttgattaccctgactatgagcaactggtcagaggtgccgaaggccagaaaagaaagaggattgcgagtgcccttgacaaagaaggcaccaaattggctaaaaaggagctgagccaaatttctaaaaaactgagccctgagccgaaggtagctgctccgaagaaaagaaaagttgtatccccaaaaccaaagacgtcggcccgagaggaggaagctcctgcaacaccttctgctgccaaagtggaagagattctgaagacaccgccaccgacatcgacgtcaaaaattgccattgccgaaaccacagccaccggagccgaaatcaccggagccgaagcctccgaagctgaaaccatcggagccgaagccaccggagccgaagctaccggagcaaccactgaagccgaagccaccggagccgaaaccgggaccaccgaagatcctaatctagaaaccacacttggtgatattgacaatatacttcttagaatggctgaagaagaagctgctgcggttgcggtgaatacgacaattgaaaaaggaaaagagcaaattgaagacactttggaagaagaaaattttaattttcaagatatacttggacaagagttaacagacactgaaaaagaagagttaaagaaatatgctatatcctgtggatacaaaccagtgtctctgctatttggtggagtcaatgaagagaagctaagatgccttcggaatcgaaccgaggctaaggttgttaggaccttctcaaaaagcgttggcctgccgaagatagaagcggacctctgcaggtaccagcgacaccatattgccggtagcttgctctatgctaatttcaagagtatactactaagtaaagtgctgagaatgcaacaagatcttgaagaggagaaaaacaaagctaccatcaaagatctagagaacaaaatcgaaaattacgaagctactctgaagaaaaaggacttcgttattcaagaccttgaaatcaaagttaaagatcgcgaagctgccttggaaaagaaagacttcgtcattcattctatggaaggttcactggttgaagcccaagccgaaaatgacaaattaaacaatgaattacttataaaatcagaaaaatctgagcagtaa

SEQ ID NO: 103188 - DNA, 2100 bp, Zea mays
  Clone ID: MRT4577_25613C.1
atggccagagtacgctccactgctaaggttgagcgtgatggagatgagaccaaagccactgagactgtgccgatttccgaagcaatgaggcgttctgggcttgtttcatcagaggacacacctgctgccgaagcaacacaagctaatgttgaagaagctggttccgaagatgagtacagctgtgggactaaagccagaggagatggtctgcacgaaaattttggctgctacaactttgcttatcgcaagactacgaagtttctagtgataagctaccgaagcaaatggccagccggatggaagtctgaatggttttatgttaaagttgatgaagatgaagataaattggtccagagtccgctagaactaaccttcggagagacgaggccccgatgcaacatgataatggggagcccgagtcagattgctttggctgaatttcgagtgatttcaaatcatattggcactagagacttagtgcaggaatttttggcttttaaagtgttcctaacactgagggagtgggagatgccgaagctagagggagaaaagaagaagggagaacttgttcgattgccttatcaatataagtttaagaaacactttaaaacaccctgccaggagtgtaattactctaagaaagaagatcagttaatgactgcggccttcggcactcgcccaaaacgaagattgaatcgggtgctagatgccttaaattttgattaccctgattatgagcaactgggcggagatgctgaaggccagaagagaaaaagtattgctagcgtccttgacaaagaaggcaccaaattggctaaaaaggacaaagaaatttctgagaaaagaaaactgagccctgagccgaagatagctgctgcaaagaaaagaaaagttgcatccccaaaaccaacgacgtcggcccaagaggaagaagctcctgcaacaccttctgctgccgaagtggaagagattctaaagacaccgcccccgacatcggcgtcaaaaataccatttattgaaagcactgtcactgccgaaaccacagccaccggagccgaagctactggagcgggcaccgaagctgaaggcgccggagccgaaaccgagatcgccgaagatcctaatctagaaaccacacttggatctctgctgttcagcggagtcaacgaagggaaactaagatgccttcggaatcgaaccgaggccaaggttgttaggaccttctcaaagagcgttggtctgccgaagattgaagcggacctctgcaggtaccagcgacagcatatcgccggtagcttgctctatgctaatttcaagagtatactgctaagtaaagtgttgaggatgcaacaagatcttgaggacgagaaaaacgaagctaccatcaaagatctagaaaacaaagtcgaaagttacgaagctgctttgaagaaaaaggacttagtcattcaagaccttgaaaacaaagttaaagatcacgaagctgctttggaaaagaaagacttcatcatccactgtgtggaaggttcactggccgaagctcaagccgaaactgataaattgaacagcgaattacttataaaatcagaaaaatctaagcaagaaaagaagaatctcgaaacaaatctcaagaccgaaattgagaagaattcaattttgcagaaatcattgaaggagcttcagaaaaaatgtttagattttggcaaccgctgcatgcagcggctgaaggctgtgtttcactcaattggagccagctctgataagtttacaccttcaactgaaaacctgccaagcacctttgaatacattgagggcaaagttgatggacttgacgaagttatcgctgggcatgccgatttctgcgccatgttagattctcgaagcacggctaccgctttcctgaaggctggctgcacgcacgggaaaattgtaaataggccaaacttcagcttgtcaccggcagatttggttgacatccctagcctagcccggagcataggaaacaggtttatgacccagatttggataaacgacgggcgaaaaatggctggtgacgaagctcggagccaccttaagctagatgatgaagctgaagaatga

SEQ ID NO: 103189 - DNA, 2571 bp, Zea mays
  Clone ID: MRT4577_25614C.1
atggccagagtacgctccactgccagggttgagcgtgatggagatgagaccgaagccactgaaactgttccgatttccgaagcaatgaggcgttctgggctggtttcatcagaggacacgcctgctgccgaagcaacacaggctgacgctgaagaagatgagattgaagatgagtacggtgcaatgccatctaaacccagccacttagagtttgggaagtctactattaccaaaggtgatatggctaagttattgaagctaggctatttcagcgaagacaagaaggagctgattcgcttcgggggagaggaagttaccccgaagcccgaaaaagatgaagtggtggtttttaaaagcttcttcaaagcagggttaagatttcccctacatgggatgattgcaggtgttttagagggatttggaatttaccttcatcagttaacctctaacgccattgttaggcttagtgtttacatctgggcactccgaagccaggaggcagaaccacttgccgaaggtttttgccgggcacacgagcttcattaccagacaaaagctagagaagatgggctgcatgataatttcggctgttacaattttgcatatcggaaagatgccaagtatccagttatcagctatcgtacgaaatggccagctggctggaagagtgaatggttttatgtcaaagtggatgtcggtgttttgggtccgaccgcacacccggggcccacaaaagaacgatcttacgatttattgggcccttgggcctttcgggagatcttttatttctttagtggacccgggggatatctatcccccacagtggatgaaaagaaagaaaagctagttcagagccctttaaggttaaccttcggagtaactagaccccaatgcgtcatggatctagatagcccatgccagattgcactgggcgaatttcgggttgttgcagagcacattggcaccagggatctggtccaagaattcttagccttcagagtattcccaactttgaaggaatgggatatgccgaagctgaaaggggagaagaagaaaaaggagcttgttcggctaccttattatttcaagtttaaaaaacattttaaagcaccttgccaagagtggctggacacaattgaggttatgtgcaacgagatcctcgacaattattctaagaaagaagatcagttaatgactgcggccttcggtactcgtccgaagcgaagaatgaatcgggtgatggatgctttgaattttgattatcctgactatgagcaactaggcaaagttgccgaaggccagaaaagaaaaagagttgccagcgcccttgacaaagaaggtaccaaattgtctaaaaaggacaaagaaatttctaagaaaagaaaactgagccctgaggcaaagatagctgctccaaagaaaagaaaagctgcatccccgaaaccaaagacgtcgggccaagaggaagaagctcctgcgacaccttctgctgccgaagtggaagagattctaaaggaaaacttcaattttcaagatatactagggcaagagttatcagaaactgaaaaagaagagctgaagaaatatgctgtatcttgtgggtacaaaccaggggctctgctgtttggcggagtcaatgaaggaaaactgagatgccttcggaatcgaaccgaggccaaagtcgttaggactttcttgaagaatgttggcttgccaaagattgaggcggacctctgcaggtaccagcgacagcatatcgccggtagcttgttctacgctaattttaagagtatattactaagtaaagtgctgaggatgcaacaagatcttgaagacgagaaaaacgaagctacaatcaaagatctagaaaataaagtcgaaagttacgaagctgctttgaagaaaaaggacttcgtcattcaagaccttgaaaataaagttaaagatcacgaagctgccttggagaagaaggacttcgtcattcactctatggagggttcgctggctgaagctcaagccgaaattgacaaattaaatagtgaattactcataaaattagaaaaatctgagcaagaaaagaagaatcttgaaacaagtctcaagaccgaaattgagaagaattcaaatttgcagaaatcattgaaggagcttcaggaaaaatgtttagatttcggcaagcgatgtgtgcagcggctgaaggatgtgttttacttaattggagccaactctgataagtttacaccttcagctgaaaacctgccaagcacctttgaatacattgagggcgaagttgatgcacttgacgaagttatcgctgggcatgccgatttctgcgccctgttagcttctcgaggcacaactactgttttcttgaaggctggctgcacgcacgggaaaattgttaataggccaaacttcagtttgtcgccagcagatttgattgacatccccagcctagctcgaagcagaggaaataggtttatgacccagatttggataaacgatgttcgaaaaatggctggtgacgaagctcggagccaccttaagccagatgatgaagctgaagaatga

SEQ ID NO: 103190 - DNA, 1290 bp, Zea mays
  Clone ID: MRT4577_25615C.1
atgactgcggccttcggcactcgtccgaaacgaagattgaatcgggtgttggatgccttgaattttgattaccctgactatgagcaactgggcggagatgccgaaggccagaaaagaaaaaggattgccagcgtccttaacaaagagggtaccaaattggctaaaaaggataaagaaatttctgagaaaagaaaaccgagccctgagccgaagatagttgctccaaagaaaagaaaagttgcatccccgaaaccaaaggcgtcggaccaagaggaagaagctcctgcaacaccttctgctgccgaagtggaagagattctaaagaattatccaagtggccgatgtcattcatcagacaccgccaccgatatcggcgtcaaaataccatttattgaaagtgctggcactgccgaaaccgcagccatcggagccgaagccaccggagcagccaccgaagccgaagccaccggagccgaaaccgagaccgccgaagatcctaatctagaaaccacacttggtgatattgataacatacttctaaaaatggctgaggaagaagctgatgcggccgtggtggacacgacaattgagaaaggaaaagagcagattgaagatactttggaagaggaaaactttaattttcaaaatatactgggacaagagttatcaaaaactgaaaaagaagagctaaagaaatatgctgtatcctgtgggtacaaaccaggggctctgctgtttggcggagtcaatgaggggaaactaagatgccttcggaatcgaatcgaggccaaggttgttaggactttctcaaagaacgttggcctgccgaagattgaagcggacctctgcaggttgttttggcaaagtatattactaagtaaagtgctgaggatgcaacaagatcttgaagacgagaaaaacaaagctaccatcaaagatctagaaaacaaagtcgaaagttacgaagctgctttgaagaaaaaggacttcgtcattcaagaccttgaaaacaaagttaaagatcacgaagctgccttggagaagaaagacttcgtcattactctatggaagaaatcattgaaggagcttcaggaaaaatgcttagatttcggcaaccgatgtgtgcagcggctgaaggatgtgttttactcaattggagccagctctgataagtttacaccttcagctgaaaacctgccaagcacctttgaatacattgagggcgaagttgatgcacttgacgaagttatcgctgggcatgccgatttctgcgccctgttagcttcttga

SEQ ID NO: 103191 - DNA, 227 bp, Zea mays
  Clone ID: MRT4577_25616C.1
aaagcccaaacgcataagccctggggtgggctacacagaacgaagaacgacaggttaagggaaaccattcagcaaaacacaaggtgcagggggtacaatctctgctcaaatgagaccttaaacagggactaaccttcggtctagaaaattctgcgctcgctcggtcaatttagaaccaaaacgcgacaaataaaaaaaaacgggggagattttgtttaaaatgaacc

SEQ ID NO: 103192 - DNA, 2061 bp, Zea mays
  Clone ID: MRT4577_25617C.1
atggctagagtgcgctgcactgccagggttgatcgtgagggagatgagaccgaagccactgaaactgtcccaatttccgaagtaatgaggcggtctgggctggcaacatcagagaatacatctgccgccgaagcaaaacaagctgatgttgaagaagatgaatttgaagatgagtacggtgcaacgccatctaaacccagccacttagagtttgggaagtctactattaccgaaggtgatatggctaagctactgaagctaggctattttagtgaagacaaaagggagctgattcgcttcgggggagaggaagttaccctgaagccagaaaaagatgaggtggtggtttttaagagcttcttcaaagcagggttaagatttcccctgcatgggatgattgcagatgttttagagagatttgggattcaccttcatcagttaactcctaacgccattgttaggcttagtgtttacatctgggcactccgaagccaggaggcagagccacttgctgaagagcacattggcactagggatctggtccaagaattcttagccttcagagtattcccaactttgaaggaatgggacatgccgaagctgaaaggggagaagaagaagaaagagcttgttcggctaccttattattacaagtttaaaaaacattttaaagcaccttgccaagagtggttggacacaattgaggttatgtgcaacgagatccttggcaactattctaagaaagaagatcagttaatgactgcggctttcagtacttgtccgaagcgaagaatgaatcgggtgatggatgccttgaattttgattatcctgactatgagcaattgggcagaggtgtcgaaggccagaagagaaaaagagttgccagcgtccttgacaaagaagctactaaattggctaaaaaggacaaagaaatttttgagaaaagaaagctgagccctgagccgaagatagctacttcaaagaaaaggaaagctacggccccaaaaccagaaacgtcgggccaagaagaagaagctcctgcgacgccttctgctgccgatgtggaagaaattctaaaggtaatgactgaacctttgcctatcaagctaagtccgttggcgccacaactgacgaagctttttcagaaggaaaaggagccttcggcaacggaaagtcctgctaagctgaaaaaacggagaattatccaagtggccgatgttattcatcagacaccgccgccggcatcgacgtcaaaaataccaattactgaaggcgctggtgctgccaaagctgaagccgccgaagccgaaggtgccaaagccgaaaccgccgaagattctgatctagaaaccacacttggtgatattgataacatgcttctaaaaatggctgaggaagaagttgttgtggccgcggtggacacaacaattgagaaaggaaaagagcaaattaaagatactttggaagaggaaaacttcaattttcaagatatactagggcaagagttatcagaaactgaaaaagaagaactgaagaaatatgatgtatcctgtgggtacaaaccaggggctttgctgtttggcggagtcaatgaagggaaattgagatgccttcggaatcgaaccgaggcaaaggtcgttaggactttctcgaagaatgttggcttgccgaatattgaggcggacctctgcaagttgttttgccaaagtatattactaagtaaagtgctgaggatgcaacaagatctcgaagacgagaaaaacgaagctacacttaaagatctagaaaataaagtcaaaaatcacgaagctgctttggagaaaaaggacttcgtcatccactctatggagggttcactggcagaagctcaagccgaaattgacagtgttgggggccttcggcttccgaagaagagctttggcatgatagcggaaaggggaaccgacttaaagatgaaaaggctatttagacctcgaagaattatcatagagttattaccagatgtaaagggcattggtgtaattttacatgggttgcgtctcgtgcctataaatagatga

SEQ ID NO: 103193 - DNA, 744 bp, Zea mays
  Clone ID: MRT4577_25618C.1
atggccagagtgcgctccactgccagggttgagcgtgatggagatgagaccgaagccactgaaactgtttcgatttccgaagcaatgaggcgttctgggttggtttcatcagagcacacacctgctgccgaagcaactcaagctgatgttgaagaagttggttccgaagatgattacagctgcgggatgccaagtaaacctagtcatctggactttggaaagtccaccaactctgaagctgatcttcctaaaatgatgaagctgggctattttagtgaagccaagaaggaattaattcgttttggtggagaagaaactatcccaaagccaggaaaggatgaggtggtagtcttcaaaagttttcttaaagctggtttaagattccccctaaacaagatgattgctgttgtactgaagaagtttgggatttaccttcatcagctgacccctaatgctatcgttaggttaagtgtttatatttgggcccttcgtagccagggagtggaaccgttcggtgagggtttctaccaagttcatgaattacactaccagactaaaggcagaggagatggtctgcacgagaattttggctgctacaactttgattaccgcaagactacgaagtttccagtgataagctaccgaagcaaatggccagccggatggaagtctgaatggttttatgttaaagttgatgaagatgaagataaattggtgcagagtccgctagaactgaccttctga

SEQ ID NO: 103194 - DNA, 696 bp, Zea mays
  Clone ID: MRT4577_25619C.1
agtttgttttgggccgaacccggccgggtggcctcccccccaacaggccccaaagccgtaggcctgaaacgggagcacggcggcggcggcggaggaggaggaggtggaggaggaatggcgagacgaagcagaggcggcggcatcgtcacggaagcggcgttgaaggcgcatgcggcggcggtgcgggtggtgtcccgcaggggcgccgtgcggctggtgctcgtgtcggccatcgcctgggccatgcttgggctcgtcgcactcgccttccacctccggccctgcagctcccccgtcgcgttcctctcagccctttgtgaaaaggacagtaaagttttctcggtgttggactcgatggggctctcatcgaaaccactccaccgctgcccgatacctgttgcgaatgatccaaatgctattgccatcccaaagaggactcccaacacaatcgtgaagaagttgtcatatataaccgttgacaagcaggacaaagatccttcaccgctgtttggagggcaccaaaactggaaacagagggaggagagctttaaactgaactctaccatgaaggttcactgtggatttatgaaaaatagtggtgcagatatggataccattgatctcaagtacatacagaaatgcagatttgtggttgcctctggtattttgatggctacgacattccccatcagccat

SEQ ID NO: 103195 - DNA, 729 bp, Zea mays
  Clone ID: MRT4577_2561C.1
cagaaaaaacttaccatcttattatgtaataagtaccttcatattgcttcttttatgaaggagattgtgaaatgatagaactgttgcttgcaaagggagcttatgtagacccgatagctgaggagattgggacaccactgcatcttgctactaaggaacaacaagtcggtgctatgaagactttattggagcataatgcagattgcaacaagacgtacatgagctatggactttatcctatgacacccctcttccaggctgtaaatgtatcatcactacaatgcgtgaagctcctggttgaggctggcgctgttatcaacccagattgtattgaaactgtttcacttgattctgcaatgggaaatgacagctcaacagagtgcttaaatttcttactgaaggctggtgccaagcgtaatgcctctaatgatgctgctgtccacgccagcgccagaggacgagtcgctggcaccgctcggcgatctggcagaggacgaggacgtgaccaggggccgcgacaacaacaggagcagcacgttgcctgtggggaagaggtcgaggtcaaagtcaatcctaaggtgcttattggatagttattcagtcagttttatcatctttagggcctatttagtttgtggctgcagtttgccacatcttaggtagccaagtttggcctagcacgccaaacttctcttcagcaggactcaaatctcagttactatctttata

SEQ ID NO: 103196 - DNA, 486 bp, Zea mays
  Clone ID: MRT4577_25620C.1
ctctgatgcctaccgactctgactgtgatggtccaagatcttgccagctggtgaagggaaagtcaatccacatggactaccctcttacaataatgttgataaactatctcgcttcaacaaggcataactccttacattaccctttaccactctgatcttgctattgcgcttgagaagtaatctagcaggtcgttctgcacgaatatagcgcactcgcttacagactaagctgacttctgctataagacctacgacgatcgagttaatcactggtctacattcaatgagccaaagatctgagcgctacttgactatgacacacggttaaatcctcctcacaggtgcaccagatgcgctgctggtcggaatgcagcaacactaccttacatacatgctcataatcttctcttgagacatgctacgtgagctgcaccataccgtacaacatatcatgctgttcacacaggtaagagcggaatagatctg

SEQ ID NO: 103197 - DNA, 1239 bp, Zea mays
  Clone ID: MRT4577_25621C.1
aattcggcacgagggtaggatcgagggagagggagagcggccaagcgtggaccaacgactcctcttctccgatcctcccgcagctgcaggccgtagctagctctataaaaagctaagggagcctgccgggccggggtgcatcgtcatccaccacgatcgataaagctaattaagctgctactgctacgctagcctcgatcgatcaagcaagcagctcacagacccaccggcccacccacccacccacatggcggcgtcccgttccgctctgatcacgctgctcgtctttgtgagctccgtcgcggcggcctcggcgaccacgttcaccgtcggcgacagtagcggctggagacgtagcgtcaactacgacaactgggccagtggcaagaccttcacggatggagatcagctagtgttcaacttcgccaccgggaaccacgacgtggtggaggtggacaagagcggatacgacggctgctccaccaccaacgccgccaacacaatccaaaacggccccgccaccgtcaacctcacctccggcacccactactacatctgcggcttcaccggccactgcagcgccgggatgaagctcgctgtcaccgtcggctccggctccggctccgggtcccccacccccggcggcggctcgcccagcacacccacaccaaccaccccgagcgcccccacccccgacactccggccagcgcgtccgtgcgcctcacggccggcccagcgctcgccgtggccgccaccgtgctcgtcgccctcttctgatctgatctgatctgatactgcatgcatgcaccgtgccaggaccaggatagaggcagtgcaggatcatagtattcttgtgtacgtacgtacatactttgttgttgagctagcgttttcattctgacgacggcggattattgtactctcgtacgtttttatttccacatgtactactgtctatcattcatgcttccaattcttcattgttaatttgttgcctgtggtgtgtatcatcatatattcatacgcaaagtacttaccaagcatatggtgctaattggtcctcagctcgcacaaaaaaaaaaaaaaaattacgcaaagtaccacaagttccactgaccctttctgagttgccttggctttttgccgaattgatgcagatcgtccctaaatatgaataatgtaaataagattcttcaaaacaaaaaataaaaaaaaaaaggggggcccggacgcgtggg

SEQ ID NO: 103198 - DNA, 268 bp, Zea mays
  Clone ID: MRT4577_25622C.1
gcaggtggaggcctcggagagagagcgccctcaaccacctgccagaacccgggcgacgcggccgacggccgggcgagcaagaagtgcgagaaggccgaagagaaggccaaggagattgcgaagatggtcgagatgctggtggagctggtccggcggatagagaagagcgagtcgtcgtgagcgcggtcggcggtttccagccaatggattctggtcaactggtggagattggctgacacctggagaaccgaaaccaaagaggctttgt

SEQ ID NO: 103199 - DNA, 234 bp, Zea mays
  Clone ID: MRT4577_25623C.1
tttttataatttttttttttttttttttttttttttgggggttttttttttttttttaccaaccgaaagaaacatttgagggggacaaacaaatcaaatattttgtctgtggaacagcgcttgccaacaaaagaaacaacaaaccggtttcagctggaaccactagattagttcctctgaatttctaaacccaccttcttgttggggtgacggtccatgatttttgatccagtt

SEQ ID NO: 103200 - DNA, 531 bp, Zea mays
  Clone ID: MRT4577_25624C.1
atgaagaagttcgatgattttcaattggttcctaccgccgaactacatcctattatgaaaccttgtccctttaggggatggggtttggactttgtagtggaaatttatcctttatcattgaaagggtatcaatttgtactagttgccacagattatttcaccaagtggacaaaagtcattgctttaaaaaacatgacacatagggagataagcctaaatgttataatgtttgctaggcaaaacaatttagctgtcagtgactatcaggacctaatgatggacaatattgatgaggtgaccgacaagaggttgatggctttaaaggaaattgaaaaggacaagatcgtagttgccaaaggttacaataagaaagtcaaggctaaatcattccatgttggagatctagtgtggaagacaatattgacattgagaagaagggaccagaagtttggtaagtggtccccaagctgggaagggccttatagaattatacaggtgatggtgatctctggtaatgcatatatgctatag

SEQ ID NO: 103201 - DNA, 144 bp, Zea mays
  Clone ID: MRT4577_25625C.1
cttccgggggagggcgtaaagaggcttcaccaacaggacaggcttgaaaagggtggtggggtccttattacttgcaagttcattaattggttccaaactttcaaaggtgaattggctggctacactttggtttcggctggttcc

SEQ ID NO: 103202 - DNA, 428 bp, Zea mays
  Clone ID: MRT4577_25626C.1
acaaggggcaaatggctacactagttttttttttattatgctcatgttctttcacaactggcgacacatttctgcatcgctctggtggattgcaacatacaattataagccctcccttggttgctaaaagctctactactataaactaccagctccatctatccttatgaacagcgatactgtcccctttctatctcacaaaaaatgagatggtcaaaacaaacaatgttgtacatgatgggaagattctggccttcttatctttccactcccaagagctatttctctgcttatccacatgctatactctacccatgggagaaaaggagggtcaaagacaataacatggaggcgtcttttcattcctgctctttggttttttctccttgggcgtgactgaattaattaactgcctcacttcctccttc

SEQ ID NO: 103203 - DNA, 1029 bp, Zea mays
  Clone ID: MRT4577_25627C.1
ggtacccccggaattccccggggaacccacgccgaaaatgtacgcctagctagctcggagcttgtccaagcagagctctgcacgtactgaacctgaacacacagtagagtagcgcaacggatctcgaaatggctgcgaggcttgcgctcctcatccttgccacgaccttcctcctctccgccgccgcggacgggggcagcaccaactgcccgtcgccgccaatgaccccgaccccgacgacgccacagcctcctccgtccgacgggggcgggggcgggggtggtaacggctccgccggcagctgcccgatcgacgcgctgaagctcgaggtgtgcgcgaacgtgctgaacctgctgaggctgaacatcggcgtgccagacgacgagcagtgctgcccgttgctgcaggggctcgccgacctcgacgccgccgtctgcctctgcctcgccatcagggccaacattctcggcatcgtgctcaacgtccccatcgacctcaccctcctgctcaactactgccacaaggaccgcgtcgccagcttcacctgcccggcgtgatgctgtgcatgcatgcaggcgtgcatgacagtacgtgtcatgcatgtacggagtacatgcgtatttctacacacagatcgggacctctatatatatactccatctggacaccgccgtaacgacccatcgataaaatcgcgtgtgctgcatgcgtattatttgttataaataaaatactgtttccaatttgcgcgtatgccggatgtattgcaatatttggattaggtatgtaattaagtaaacttccgtatgcgtgtgtaatggcggatctgtattaaaaaaaagaaaatggcatattatttgccaatctatcgtaaacatcatgtcctgtgaaataaatgatgcagcggtggatctagaaatagcttagggcttgtttggttttcacggaatcgttgcctagaaccgatttctagctggattgattgttgattgtctgatttatataagatttgatcagctgcaatgatag

SEQ ID NO: 103204 - DNA, 128 bp, Zea mays
  Clone ID: MRT4577_25628C.1
tatgactcgtgcatacccattctctagttttgacttaacgcatttatcattttctgagggttcttcactccaagtattaactaatataattaatctttcgatgctccaataaagcttaaatttccaac

SEQ ID NO: 103205 - DNA, 258 bp, Zea mays
  Clone ID: MRT4577_25629C.1
cgggaccaacaagcaccttaaacagtgttctccagcagcaacaatacaggaacaatttgcgccataatattcctcatcctgcttctcgtcgttctatcgagctcagcagatgcctccaccattccacatcgctaattagatgctactgtcgctgttctacatctcctatacctagcatctatgaccggctcagaacatgcaaacgcgcacgcctacccgttccagctagagcttgcagtctgcgcatgccacctacct

SEQ ID NO: 103206 - DNA, 196 bp, Zea mays
  Clone ID: MRT4577_2562C.1
gatgcaagtatacattcaatgttcttatgatagaggaaaggcatagctgcagatgggtttgatgttttatcttttcattcatgcatttcatcccatgcgcataaacaatttccaagtagcttgtgtatccaaacttggttcttttgttcactcagccaggttgtactgtttcattcagaattcggatttttcagcc

SEQ ID NO: 103207 - DNA, 294 bp, Zea mays
  Clone ID: MRT4577_25630C.1
acccgtccgcccacgcgtccgaaaaaaaaaaaaaaaaaaaaaaaaaattttttttttaaacaaaaaaaaaaaaagggcggggggtgtgtaggtctcacgttctaaaacaccccccctcccacgcgcaggctaacataaatttgaacgcccaattcaattcaccgtcacggagtgttaaagcccgggccttccaaaacccagacgggccaaactcatacgcttttcaacaaatgcccctttcaccaaaaggccctttccccaagaggccacaaccgaacagcccccccaccaatc

SEQ ID NO: 103208 - DNA, 327 bp, Zea mays
  Clone ID: MRT4577_25631C.1
gcgaaagtcgttgttcttgctgacacacgcatacttttgcttcgtaaggcgtttgggttggtcattgctcagctcttaacttactacactaacgcgcagccattctgggcgatctctgctctctaactgcaaacactctaatcatggcgagcactgagcccactggactaacatgcgctcttactgtctacgcacctgctgactcctttcgaaacactctcacgagcgaaccgaactcgatttgtccttgcttgctcatatcatgcctcacctttttgatgatacgtgacgtgcctacagtcttatgattagagtttaggcctgcac

SEQ ID NO: 103209 - DNA, 300 bp, Zea mays
  Clone ID: MRT4577_25632C.1
caaatacctgcctaaggtacaccccaactcatacatcaatcatgatcagcatcatataactatcacactgctacatcatacttattgatacaaccacgtccatgcatccattcgaaacaactgttccttataacttccctcaacctcctgatcacaaacacgctggcttacatacctacatccttgtataagattacacacacttcgctcacgcacactttcacaacttacatgaccttttgatgaattacacaacctttaactaacaacagacatatacaacctttatttaccaaacac

SEQ ID NO: 103210 - DNA, 735 bp, Zea mays
  Clone ID: MRT4577_25633C.1
tgggaccctcgaggccggccgggccgggaagtccattctcagctattcctctccgcttcaagatgacagaacaacagacgtgccaccgtctgctataaaaccctccgcctccgccgctggctcaccaaactccgttctctagattctatgtgtttgctgatcgccagaccccaagctccaaatgacttatgatcaaggcgagcaccccctcgcgtgagaccgttacgtctgtgtgggatcaggacatggttgtgtaccccgggttcaaggtcgacatcgaccttaatgatgaaactgtgacaactacatttgtgaagaggcatctcactggagagcttgagaataaagatgacccgaacattggaagaggaagctgatacgatggagttccccactagatgggtgaaaagctctgtctactgtggacacatcggaaaggagtgtgaatgatgtggggcctaggaatgcctacgagatccatgcgcatggcgagagcattctgttgagcgaaacctacttgattacttacaagaatgtgccgacatgtgataagaaactgtgtaggtacagtgaattacatccgcattgacctatgctttaataaatgatgtgtgagcagctggaacgtctcatgcaagcttcgtagttttcatcgccatatcaatctgctgtacgatgaactgactgtcgagagcaactacaacgtttgagatacctttcctgtaccttgcaagg

SEQ ID NO: 103211 - DNA, 338 bp, Zea mays
  Clone ID: MRT4577_25634C.1
ccggccgggacaccacctaactaacaacaccagcttctctaaagatcacaatgatgagagccctggcggtggtggtggccatgctggccaccgccttcttcgctgtgcccgctcgcgccgagcagtgcgggtcgcaggccggcggggcgctgtgccccaactgcctgtgctgcagccagttcgggtggtgcatgagtacctccgactactgcgccagcgcgagccaaagacagagcagaacctgctgggggagcgcccccaaccctccgaaaaacggcatggagacgtccatcatccccgtattcgctcctccacaagatgactgctgcacatgccac

SEQ ID NO: 103212 - DNA, 1341 bp, Zea mays
  Clone ID: MRT4577_25635C.1
atgccgctgaggggtcgatcacgctgccaaggtgacttctcgcagaatatgaatactttccatgctcagccatccttccctcgctcgtatgaccggaacacccaagaagtagcaggccagagaattagatctgatgcaaactcagtaatgcatcatgcagggaacgtcgacaacgtgaaagaagaaaatcctgatgattttatgactttggtggctaattgtttaggccttggacgagaaagaacaaaaaatcggaaacgatgtcgtgttccaacttcatcgaggaccctctcgaccacaaccccggataatattcccattggccttcaaaagaacccacaagaaccgcctatgtcagattacgctggtcgtgcacacattctttacccggtactggactcatccaaaaggtcactcgacattcctagctccacctccacactagcccaaaaaatggtcaagcatccctcatcaaggtggttcaacgactgccaaccacagcttcgattggacatgcctgtatgtcagaagatgttgatatgggcccgtatgatgctggtgaaccacgaagaccgaagtatgctacaaaaatctgatatctatcgcagtgtactagcttcactttactgttttcaagctgacccatcgttggtagctgccttcttgacatattggaatgttgatggacatacattggttaccagtcaaggggagatgggatatccactacatactatctctaacgcgatggggatccctatctcaggtcgactttatgaagaatttattcctccttgttttgacgttcatggtcacttggagactctttatactatttatgctagcttatgcccatcagagctgcagccaggcctaggattagtgagtcctaccgcttggttagaccacttttttgatgataaagctgattcttttggcagttctttattggatggctttgctaaccccaaagatccgttacttcagaagcttcgtttccatgtcgcggttcaaggtgaccgtcttgcagccattcttggtgccgagacattatcttaccgatctatatatccttcaacggtttaccgtgctgcatttataacagcttggctatgcacttattgcattcctgttgaagctggccaatacattcgtcctgggatccttcattcttttgtgataggatttttatgtcagctgcaatcgcaacaacagtcgctgcctctgcaggtcaccaagcttcctcgtattgtccgtgtatcaaagaccagggtcacatcctataatgacaaccagttgctggcatacctgatgaaagttggaggaaagcctttgatgtag

SEQ ID NO: 103213 - DNA, 525 bp, Zea mays
  Clone ID: MRT4577_25636C.1
ggttgggggggcctaaaggagagggaatttaaccaaaatactttccaggaaatgacctacattacaaagccttttccgcctggagggggggaggggaaagaaacctccttgacaaaaaaaaccgacgatattgctgcccccccaccaaaaaattcttccagaaaaaaaaaaaaggccccccccccccccgcaaagaaggcacggactctcatgagggggggacccccccaaggaggcatctcaaggaagacaaaaaggcttgtcagagggggaaaaaaaaaaaaatgctttaggggggggggggggccccccagggcgccccacacaagaaggagcgcccccccgcccccaagaaaaaaaatgggcccccccaaggggggtggggccggaaaaaaaaagggtaaaagaaaaaaaaccgcccagggggaagaaaaaaccaccggccaaaaaaaacgggccccaaacggggggggggacaacaaagggggaaggaaacccggggcccggcggggaaaaaaacccccc

SEQ ID NO: 103214 - DNA, 226 bp, Zea mays
  Clone ID: MRT4577_25637C.1
aaaaaaacaagaaaaaaaaaaaaaaaaaaatttcaatttcaaataaaaaaactacaaaaaaggggactgtataaaatacatacagacaataaaagtccggcgctgtcgctctttacacctcacgtttacctacatctgattccaacgctttatcctttctctaccttaacctaattcaattttactatcccgacaattacaacactttgcatattcttaacctttc

SEQ ID NO: 103215 - DNA, 279 bp, Zea mays
  Clone ID: MRT4577_25638C.1
ccatgaagctggtgtcccacctcactgcccagctcaacgagctcaaggagcagatgacggagcagcggaaacgcaggcaacgcctaggctttgtggatgtccagaactgcattagccgctgaggagagccaccgaaggccccaacaggggatgctcatcactggagactgcgactgggaagaacactgccccctccctcgggtatggtggcccgccagctggccagcctcgatcccactctgccagacaccctgacacgcacccaggctttgaagagca

SEQ ID NO: 103216 - DNA, 376 bp, Zea mays
  Clone ID: MRT4577_25639C.1
caccactccgcgctagctgatgacggttcagcggcacataggtgcgacgtacgacgacgacgacgtaggcgtcacacatggcatcctagttgtccgccggcgttccccggttccacgggctgcggggctacgccgcgcccaggtccgaggaggcagcgctgtcgtccgtgagggtgagcacgaagaggtcgacgtcgcagggcatgctgtgggactacatgggatccgccatcaacctgatcatggtgacgacgacgacgctgatgctgttcgcggagcggttcgggttggcgctgaccgggaaccgcaaggcgacggctgtgctgaagctggaggcgcgcgacttagggctgcacactggtgacgccgcctggtt

SEQ ID NO: 103217 - DNA, 351 bp, Zea mays
  Clone ID: MRT4577_2563C.1
ggaccctcgaggccggccggctggctggtgtgaagcgatcaagcaagcaaggtagagagagagggaagcttttgttgcattggcattggcagtgcctaatgagggggagggtccagtacagtaggtaggaccgtaggagcaaagtgaattcgttttagcaacgcgagagagagaggcccgatagtcagtcagtaagtcagtcaaccagtgcagtatcagttgttgagcgtagatggtgaaactaatgtagcagctcagttgtactcatcccaactacctgatgaatcatacacaattgtagagtggctgcaaaaaaaaaaaaaaataaaagaaaaatcaaaaatagcggtc

SEQ ID NO: 103218 - DNA, 475 bp, Zea mays
  Clone ID: MRT4577_25640C.1
ggccgctttttttttttttttttttctttggtttttttttttttttttttttttttttttttttttttttttttttaaaaagaaaataaaggcacgggggcataaaaggattatggcacaaatggacaagatccccggttcaccgggggaaaaaaaaaaacatatacttttccaaaaaaaaaaaggggggggaaagggaactttcatggggcaaaacaatcacggggcaggcagggcccatccacccacccagggttgtgggcccaacactgaatcaatttatcccggggttcccccgccagaaaaccccccacaacagggggggaaaaaccccctttcctaaagaacagggaaactcccctggccgccggccccaaatttctaagaaggggcggaggagtagtcccaaggaacattggtgttgacctggccgcatgaaacgagcttaaacctggacaggcgcccggcgggaggg

SEQ ID NO: 103219 - DNA, 252 bp, Zea mays
  Clone ID: MRT4577_25641C.1
attttgtcttaatgaccagtatggatttgctttccctttccgcaaaagactcgtatgtggctttttataacttttgcactgcagcatgagagcatcaactagtcaaaatcctcacagtggttttctacttttctcacaaatcacaagcttgcttgcatgatctatggtactagtttcatatgtttttagcactgcactatataggtgctagggcatagcaaagagaataggctgccaatgccttaagttgtc

SEQ ID NO: 103220 - DNA, 550 bp, Zea mays
  Clone ID: MRT4577_25642C.1
cggggcgccgtgagaggggaagggcaggcttcctagtggtttgtggcggggcggcagctgcagctggaatgccggcgacacatccccttttccggccagttgcacactgggatctaatacaatggctagcgatggtgatgcttcaccttcacggaagcgtatgttgttggagttgccttgtgatgaagaaggtgcaaatgtgagccaaaatgttggtgtgtgcgcatcatcagccacgacccacacctgccgctgccagagcttctcatgaacaaggtgaaaatctagaaggtggaagtaatgttgatggggatgattcttcaaaggaaaagcaatcaaagaagtccacttcagatgtttagcagtaattttaagaatattagagcatttgtgctagctgttaaggggtatccattgcaatgggaggagtttcaaaaatgtgctactgaatgtggtgtggacacaaaggttggactctctattgatgttgctactaggtgtcattcaacatattgtatgttgagggatgcgctacataccaggtctgcct

SEQ ID NO: 103221 - DNA, 332 bp, Zea mays
  Clone ID: MRT4577_25643C.1
ttgcttatagcgacacggggggaggaatgggcggtcgttttgtccaagcgacgggagctacactctgggcgtggaagatggacgtggacagtctccagagcacaccgtacacgtccgggacctgacatggtggtattgtggacttgcggagcatggacatcgctcgaccacatcaggaattctggagcatttcgcctcgcgccgcagtgaaggcaccagtgcgcatattccaagcagggcggacacgtggcatcagagaatcaacctgccacctagaatcatgaggaccatggaacgaccagctacagcaaggtcatgctgacagcaaatgc

SEQ ID NO: 103222 - DNA, 142 bp, Zea mays
  Clone ID: MRT4577_25644C.1
acgccaaatatcttgccctaccccagctcccattccaggcgtcatgcacggatcttggagtgagttcagttgataacctcactagggaagggcgttggttggttaattttagatcgcggcggtaggtctcacccactccccc

SEQ ID NO: 103223 - DNA, 830 bp, Zea mays
  unsure (1)..(830): unsure at all n locations
  Clone ID: MRT4577_25645C.1
gtgttcctcggcatctccctccctccttcctcggccttgggtctcacgccccctcgtcaaccgcggcggcggcggcggcgaacagccttcctctcccctcggcgtcgggtctcccgtcggccaggaccatggctggcggctttagagtgctgcatcttgtgaggccctttctgggtttcttaccggaagtacagagtgctgataggagaattccattcagagagaaactcatctacaccgttatttccctcttcattttcctagtgtgcagccagctcccgctctatggcatccattcaactactggagctgaccctttctactggttgcgtgctattcttgcatcaaaccgtggtactgttatggagctgggtatcactccaattgtgacatctggaatggtgatgcaacttctggtaggatcaaagatcattgaagttgacaacagtgtgagagaggatcgtgcacttctgaatggtgcacaaaagttgcttggtatcctgattgctattggagaagctgtggcatatgtcttgtctggaatgtatggcagtgtaagccaactaggaacagggaatgctattctcattatacttcagcttttctttgctggcatcattgtcatctgtctggatgaacttctccagaaaggatatgggtttgggttctggcatttctctattcatcgctaccaacatctgtgagaaatcatctggaaggcgtttagccccacaaccatcaacagcggacgtggtgctgaattttgaagggctggtcattggattggtccatctgntgattacagaaactgacaagtcgtgccctacgtg

SEQ ID NO: 103224 - DNA, 1484 bp, Zea mays
  Clone ID: MRT4577_25646C.1
atcgaggccggccgggcccaagtaaacgccagagaggagaggagaggagtggagagcagaggagagcagcagccagccagcagcagcagccgagagcccaaccccaactccacaagcaaagatgctgtcgtcttccacctccaccctccgcctccaccaactaacccgaccccaccggcgccacccgccggccccggccttgggggtcgccacccacctggcctccccgcggcggtggcgcggacacgccccgggggcgggggcgcccctccgcgcgcggccccagcgcatccgcgcggtggacgccgcccagccgttcgactacgagtcccgcgcggcggggctgctggaggagcggcagcggctgaagatcgccatcgtcgggttcggcaacttcgggcagttcctggcgcgcacgttcgcgcggcaggggcacacgctgctggcgcactcgcggacggaccacacggcgctggcgacgacgctgggggccaccttcttcgcggacccgcacgacctgtgcgagtgccacccggacgtggtgctcctggccacctccatcctgtcggccgaggccgtgctgcgctcgctccccgtgcaccggctccgccgcaacaccctcttcgcggacgtgctctccgtgaaggagttccccaggaacctgctcctgagctcgctgccgcccggcttcgacgtgatctgcacgcaccccatgttcgggccggagtcggcgcgcgacgggtgggacggcctgccgctggtgttcgagcgggtgcgcgtcggggactgccccgcgcgccgcgcccgcgccgacgcgttcctcggcgccttcgagcgcgaggggtgccggatggtggagatgtcctgcgccgagcacgacgcgcacgccgccgagacccagttcctgacgcacaccgtcgggcggatgctggccacgctggagctgcgctccacgcccgtcgacaccagggggtacgagacgctgatccgcctcgtggacaacacctgcagcgacagcttcgacctgtacaacggcctcttcatgtacaacaagaactccaccgagctgctcaaccgcctcgagtgggccatggactccgtcaagaagaggctcttcgacggcctccacgacgtgctccggaagcagctcttcgaggggtccccgcacgcccccgacgtctcctcctccaacgtccgcaagtagacacggccgccgccgggggggttcgtctcgcccccaatctcatcatcatctgttgttagtaataaattaaattccagttccaattctccttgccattgtatttgtagtaccagcatgtatctgtattctccatttctcctcccaactccctcctgtcagttcagttttacagttgagggatgaaatgtggcagcttggcattgcaatttgtgacaaacaaactgaataaataagcaatctttggcactgcaagtctgtaataataacaccaggacgagcg

SEQ ID NO: 103225 - DNA, 421 bp, Zea mays
  Clone ID: MRT4577_25647C.1
tggacatgattaatgtggttgatgactttgaagccaaatggttgttggttgatggtgaattaccgaaccacatttcttggtgttcccgcagtgtcctcagcgcttaacaaatggttgctccgttgtaaggaccagcgagcaatggataaggaatagaacaatcgttccaacaaatggctagcaagaccagtgaagcacggtgtggcgggcttggctggcggaaggggaagcattcaaaggagagatgtcgtccgtacctacctccttttcgtattcggtgcagccacaagggctcgtgaattccatgctctattaaattggaaaaattccttttcatctaagtagaaggatcctgtattttttactagaaattctgttctcttgaagggctagtttgggaacctaaaaaaaaaaaaaaaaa

SEQ ID NO: 103226 - DNA, 663 bp, Zea mays
  Clone ID: MRT4577_25648C.1
gtctgagaagacccctgtgctgtccagccaacttttccacctcagtcttggatgccgcccgtccgccgtctagatctccccaactcctccgtccccttgcttcctgtcgtcgacctcggtggccgccgcgagctgcgggtggttcatcgccgtcgacctcgcctctccgctccttctgcactgcctgttaccggcttcctgttgctctaccggtgcggcgcgggtcgtcagtgaagctccgactatccggattgactcggatcgacctctgctctcgtggggtcttcagcgcctcaagcatggttgcggccatgccattttggagtccgtctggcgatattagctggcaaggtttagggagggttttgtgctgtgctgtggaaagtttgatgagcggctgcgtggacatgtgacaagtacttggaaatagacagtgaagagaatttagcttaaaattggtacaggccatgaaccagggagcataagggaaaaaagggagataaggcagacagagcttgtatttcgtattatccctaataacttaagttcatttatggtagaaactggcaagttccaggtaaaaagtcaagtgtcctgctttattttgtaacctagaacgacttgtagaatctcctacttgttaactagagcattggtttgatt

SEQ ID NO: 103227 - DNA, 269 bp, Zea mays
  Clone ID: MRT4577_25649C.1
tgtacgcgagcgatcaggcggggacagaaaggcaacgttcaagcactgacaccaacggtggccaggcactagaaagcacaggacggttccgcagggagggagacagctagccccgggcagacatgcagaggacgaacaccagggggaaagggatcccgaggccacctgtaacagtcggcaacggacccaagaaaagtgtctgcgaaatcataacggatcacgacgaatggcacacccaaaatgggatcacggtgcccaaggtgaagaac

SEQ ID NO: 103228 - DNA, 432 bp, Zea mays
  unsure (1)..(432): unsure at all n locations
  Clone ID: MRT4577_2564C.1
tcggattttttttttcttttttttttttttgnttcgaagtataatatttattacaagggggggtgtactcaaagtgcataacttattacaaaagcaggaaggtagaaaccctccaaagcttatacataaacctagctagacctcctccagaactggaaacgctctccagcctggcgaacagatggagtgcttgtgatgacctacaacaacatgggttggaaaactctgagtacggagtgtgcttttggagggcttacccggctaggggagagattgtgaggggtgtgctggggtgggtgcggatcggggaagggggtgtggcgggagtgggcttaggggctgggggcggaggtggggggctgggggggcgggcttgcttgggggtgttggggcggggggggtggggtgtggggtgaggaggtgggggggggg

SEQ ID NO: 103229 - DNA, 872 bp, Zea mays
  unsure (1)..(872): unsure at all n locations
  Clone ID: MRT4577_25650C.1
gggtacctcgaggccggccgggggtaaatccgaactcccagcctgactcggagggagtcgagcagaagcagagtttgcagtctgagaagacccctgtgctgtccagccaacttttccacctcagtcttggatgccgcccgtccgccgtctagatctccccaactcctccgtccccttgcttcctgtcgtcgacctcggtggccgccgcgagctgcgggtggttcatcgccgtcgacctcgcctctccgctccttctgcactgcctgttaccggcttcctgttgctctaccggtgcggcgcgggtcgtcagtgaagctccgactatccggattggctcggatcgacctctgctctcgtgggtaagcgactcgagctttgcctcagttggaggttggaattcgctgctcgccttgtccttggcgaccttcctgtcccgtctgcgagcgttaaaattcgattttttttttctaacccggttacctgtggactcttgagctgcgtggtgtcctagttatggagtcgataatccatctaaaatcttgcctagggtcttcagcgcctcaagcatggttgcggccatgccattttggagtccgtctggcgatattagctggcaaggtttagggagggttttgtgctgtgctgtggaaagtttgatgagcggctgcgtggacatgtgacaagtacttggaaatagacagtgaagagaatttagcttanaattggtacaggccatgaaccagggagcataagggaaaaaagggagataaggcagacagagcttgtatttcgtattatccttaataaacttagttctttatggtagaaactggcaagntcccagtaaaaagtcaagtgtcctgctttatttt

SEQ ID NO: 103230 - DNA, 1342 bp, Zea mays
  Clone ID: MRT4577_25651C.1
caaacatatcagcatgtggaagcaatcacttaagcgcacctacagaatgaaatgcggagtccagtttccagataatattaaaagtacgctactctcactgtctcacaggggtgcacacaaaaaacgtttcaacagctatatgtccagcacactgattaatgcaatacatctcagtaagactacactacaccgtctgacaggtcgaaacagcacggccgagcggaactaaaacaagaattacaccatgaagccaaagcagctgaaggatgagcaggaatcataattactctacgaaggcattataagatattaccacaaaacaacagaacatcagaaaaagagtcgcttatatctaatatacgatgctaggttaaagatcatggtgtgctcggaaccggatctgtgacagaaatttgggagaccgcgtcttctttggctgttgctgtcaaaccccacaggtgcagttgcagctgcactgttcccaggagatgctgtcttcgccgtgtctttcttgctatccttccctccagacctgacgccatggccaccaccgttctgttggccactgattgagagccttctgtttggaggagtgccgtttgagacgctgccattcaactttgggccaatggccttcttcgaactggcaggccggtttggactcactcgcgatccgaatggcccttcatgatcagtgttcaattgctgctcaacgtagcgcttttgttcccgcattcttttcttctcttcttccctttcctgcctgagcataacatactcatccaacatagctagaagaggtacaccatcatacataaaagacagaccacggttctcctcccatgccctggtctttgccactagagtttcaacaagtgctggaatcttgttaacaaggatacgagctttttctgcacgcttcagattcaggtgggcacctcggctagagttatacctgttgtcatcccggttataatcttcaagccagctctcttcttcacacgcagacatccatctttctactttatcaaggatatcttttctactcaatgcttcttcctttgcttttgctatctgggcatccatatctgcaattagttctgatggttctatgttacctgcctcaatcagtgccaatattttctcatgagcagcagctgtgtctattacaatatgagcaccagcgtagatatcttccagctcattttgcttcttgaaagctatttctttcatcttgctgtacttcagctggtctaacctttgaacctcaacctcagcttgttcaattaaatctagagcaagagatccaggtgctgtcccacagatgctgacggacgctggg

SEQ ID NO: 103231 - DNA, 246 bp, Zea mays
  Clone ID: MRT4577_25652C.1
aaggcggcccccaactacaaccctttcctttaaccccaacccccaacccaggggggccccacaacaacggtgggggggggggccgaacccaagattaagttttccaagccgcggcttcattccccgcccttgcggaacctcaacccggccaaggccaagggcctggccgaaattggcggtcctgggcccaacggccagccttcctggaaccggtattccccgaccaagccgttccctccttgccgg

SEQ ID NO: 103232 - DNA, 2676 bp, Zea mays
  Clone ID: MRT4577_25653C.1
tttgggttggttgttttttttttttttttattggaagtacgctacgctcacattgatgcaaaactcaaggacgggaacagaaaaggttttaacagcttatacgtccagcacactgattaatgacaatacatctcagtaagactatactacaccgtctgacaagtcgaaacagcaccgcctaggggaactaaacaagaattacaccaggaagtgccaaagcagctgaaggggatcataattactctacgaagccattacaatatattaccagaaaacaatagaacaacagaaaaaggtccacttatatctaatatatgatgctaggttaaagatcatggtgtgctcggaaccagatcggtgacagaaatttgggaggcggcgtcttctttggctgttgctgtcaaacccacaggtgcagttgcagctgcactgttcccaggagatgctgtcttcgccgtgtctttcttgctatccttccctccagacctgacgccatggccaccaccgttctgttggccactgattgagagccttctgtttggaggagtgccgtttgagacgctgccattcaactttgggccaatggccttcttcgaactggcaggccggtttggactcactcgcgatccgaatggcccttcatgatcagtgttcaattgctgctcaacgtagcgcttttgttcccgcattcttttcttctcttcttccctttcctgcctgagcataacatactcatccaacatagctagaagagcggcgtcttctttggctgttgctgtcaaacccacaggtgcagttgcagctgcactgttcccaggagatgctgtcttcgccgagtctttcttgctatccttccccttcttctgcacgctccagattcaggtgggcacctcggctagagttatacctgttgtcatcccggttataatcttcaagccagctttcttcttcacacgcagacatccatctttctactttatcaaggatatcttttctactcaatgcttcttcctttgcttttgctatctgggcatccatatctgcaattagttctgatggttctatgttacctgcctcaatcagtgccaatattttctcatgagcagcagctgtgtctattacaatatgagcaccagcgtagatatcttccagctcattttgcttcttgaaagctatttctttcatcttgctgtacttcagctggtctaacctttgaacctcaacctcagcttgttcaattaaatctagagcaagagatccaggtgctgtgacttcatccacagatgctgatctgttgcaggtcacatgatcaaacatgcgcctttcttccttgggggcatccatgagatcccaaagatcatagagctgaccagcgagttcttgaagcttgcttagacgcaacttcttatcttcattaagtgtagctaccgtattgtcaagttttgacaatgtatcattactaatgctcttacagttgtcaccgatggagtcatctaaactgggatgaacttcaatcactgtgctgagaaaatccatccccaagacgggtacaaagatcatgtactatgcctacataatcaagaaccttctccaaccttattactcttctctttttcaagatccttgagctgagaccgaaaatcttcaagcctctcaagtgttaagtcatcctcattgacttggggtgttgtcatttgctcacccacctcctatggtgccagcgatttcaccacatatttgatcaatttgtgattgtacattaacaaactctctttttctttcatttttctgtttagtcaactgctcaagtgttggcgctatagcagctagctgctgcttgattgtccctgttgtcttctcaggagttcttgcaatagctttttctccgagagcagaaagaagcctagcaagttctatctttgagtcatccagcgcctggatcaggagatccctagagttagttgcttggtcaactttcctcttgtagacatcaaggcattcctgatccagctgataaaggaccttgtcacggtcctcctcactctctccaacttcatcccatataaactgcaatttttgcagcaaggatccgcatgtaatgtcaccggccaccactgaccagagcaaccagatgaggcggagaaggcgaaggaaagaaacggaggtggtgaatgcaggtccgcagcgtggttcaacgctccactccacgggagtcgataccggaggatgtcgccggtcgccggccgccaccgctgagagctctgagtctgggactgcagtggaggcagtactgctgccgctcccgcagagcctcgatcaggagatccctagagttagttgcttggtcaactttcctcttgtaaacatcaaggcattcctgatccagctgataaaggaccttgtcacgatcctcatcactctcgccaacttcatcccatatcaactgcaatttttgcagcaaggatccgcaagtaatgtcaccggccatcagtggccagagcaaccggaccacgcggagaaggcgaaggaaacggcggactggtgaatgcaggtccgcagcgtggttcaacgctccactctacgggagtcgataccggaggatgtcgccggtcgccggccgccaccgctgagagcgctaacctgggactgcagtggaggcagtaccggacgcgtggg

SEQ ID NO: 103233 - DNA, 398 bp, Zea mays
  Clone ID: MRT4577_25654C.1
gactgaataataagggggaacaagctgtgctcttgttattttctttaaaaaaaaaaaaaaaaaaaaaaaaaaaacctccccggccggccctccaaagggcaaatcccacccccctgggggccgtaccaaggggacccagccccgggcccaggctgggggaaaccagggccaaagcgggtccctgggggaaatgggaatccggccccaatcccccccaacctccaacccgaaaccttaaagggtaaacccgggggggcccaagggggggccaacctcccatcaatggcgtggcccccccggccccctttccagccgggaaaccgggcggcccacctgcttaaaggaatcggccaccccccgggggggggcggttggcggctggggcccccttccccttc

SEQ ID NO: 103234 - DNA, 714 bp, Zea mays
  Clone ID: MRT4577_25655C.1
cctcgaggccggccgggaagggtacagcctactagcatccgcgtccgcgtcgaggagcctagaaggacaggagagccgagggcgataagggaagaggggggacagagatgacggagaagtacacggaggggccgcgcgtgactgcgatgcacaaaatctccaagaagatccactggcgagggggcagctcggcttccacctgggactagaaagacgaatgctcatcgacaacggccggagcgaacgccaagacctaccgcatctgcagcggatagaaggccgcgcactccgccataagtggcggcaagtcggccgatctgatccaaaggataaacaagaggatgtctggtggaatgatcgcaggcgcaactgaacttctggatgctgatagaagcgatgaattaccacatcctcacctcgtggtatgtgcattgtctcgtcgtcgccctgggcatgctgatccgctgtgacactgccactaatttcatcgacaaatctcgtcatagcatcaccgaggcgaatatctcatatgatgtggatgtaaatgatagacatcccctgagatatgacatccagaggaggtatgcgaccttgacgaagagtggacaagggcatgacctcaaaaaaaaactgattgtgattgcaggactgtgaatactgtttgttcataggagctgctggaattcactcaccctgtgcaacatagctctgatg

SEQ ID NO: 103235 - DNA, 1987 bp, Zea mays
  Clone ID: MRT4577_25656C.1
aaaaaaaaaaaaaaaaaaaaaaaaatccagtgggaccctcgaggccggccgggccgggtcgggcccccgtggcagccgttcgatcaagcacagagctggtgcttactagtatcgggactagagacgcctcccggcgctcccactcgtcttctccctccctagtcgctccccaaatcggatctccaggccggcagaagttgagcggactgactggtcactgtagttcgatcgaatccgagtagggctgatacagttcgattcggcgggaggcatggcgtccgaaaagcacttcaagtacgtcatcctcggcggcggcgtcgcggcggggtacgcggcgcgggagttcgccaagcagggagttaagcctggggagcttgcaatcatctccaaggaggctgtggctccttacgagcgtcctgccctaagcaaaggttacctctttcctacgaatgctgcaagactcccaggattttatgtatgtgtgggaagtggtggagagaagctattgcctgagtggtactcagagaaaggcattgagctgatccttagtacagaaattgtcaaagctgatctttccaccaagactctgactagtgcagctggagcaaactttacatatgagatcttgctcattgctactggctcctcggtcataaagctcaccgattttggcacacaaggagctgattctaacaacattctatatctaagggaaattgatgatgctgacaagctggttgcagctatccaggcaaagaagggtggcaaggcagtggttgttggaggaggttatatcggcctcgaactgagtgcagccctgaagatcaatgactttgatgtcactatggtgtttcctgaaccttggtgcatgcctcgccctcttcactgccgatattgctgctttctatgaggcttactatactaacaaaggtgtaaagatcttgaagggcacgctagctgttggttttgatgctgatgccaatggtgatgtcactgcagttaagctaaaggatggcacagtacttgaagccgatattgttgttgtcggtgttggaggcagaccattgactactctcttcaagggtcaagttgctgaggagaagggtggaatcaagactgacgcttcctttgaaacaagcgttcctggagtatatgccattggtgatgtggctaccttccctttgaagatgtacaatgagttgaggagagtggaacatgttgaccattctagaaagtctgcagagcaggctgtaaaggcgatcaagggcaaagagtccggtgaaccagttccggagtatgactacctgccatacttctactcccgatcattcgacctggcgtggcaattctacggcgacaacgtgggcgaaaccatcctgtttggcgacagtgaccccacctccagcaagcccaagttcggctcgtactggatcaaggacggcaaggtcttgggcgccttcctggagggcgggtcaccggacgagaacaaggtcattgccaaggtggcgaaaacccagccgccggtcgctaacctcgaggagctcaagaaggatggcctccagttcgccagcaagatctgagacgctcccgttccatgtaaaattccgtgtcatcgtgaaggttcttctggagctctggtcatgattgagaaatgttctgctacagatgttatactacatacgtgactacactacatgatatattcggttttctgattgtgatatctgtacgtggctacactcacatgtgagatttgaataagtcctgcagcctcagggctcagctagcacagcaaaaaaaaaaaaaaaaaaaaaaaaaaaaaaaacgccgtggtaacaacacttttgagggccggtaccttttactgcgggcgagacgcccccacatgagatatttggttttcggagtgtgatatgtggacgggggtaccctcaccagtgagaatagaatacgacccgcagcctcagggctcagctcaaagaaaaga

SEQ ID NO: 103236 - DNA, 546 bp, Zea mays
  Clone ID: MRT4577_25657C.1
gttgttcacatgaaaaccggctgtaacacatactcagggggtccaaccgtataatccagcaccagatcactccattggttgctgcaggggcataaagacaaattccatgctcacggatcagtgacgctcttattttacgatgtcttggaatgatcaggctcatttgctggggacggtctgagacggaccgtgtccgcaccctacaatacgacgaccgttttaaggcctggagtccaatgggcctacatgcttcatggacaccgtggttatcagtgctgttgctgagctaatgcacacggttcttaagaggatcatggaaagcctgaacaacatcagttatgtctatgattgaattcggccaaggcagagggatctggctgtgggagacattgatgttaccaacgccatctggtccagctgccaagttcacaagatcaccaccttggtcggttctcatcttctggagccacatgctccttgctaacagtattgtagtgcggaccaattgacatgcattcattggtggtgtcacaaagagcatgttca

SEQ ID NO: 103237 - DNA, 214 bp, Zea mays
  Clone ID: MRT4577_25658C.1
aattcggtcgcccacgcgtcgtttctgtcccgggggcagtcgcggtggactggggcggcgggagagcgccatcggcagtcatcgaccgtgcccaacggcctacactgtcgttcgcgtcgcgacgcccggaacggctgcacggctctatgcttgtggaggcgttcgggcaacgtcacgcagaagtgccgtcgattcgcggaaagtggttcaagac

SEQ ID NO: 103238 - DNA, 271 bp, Zea mays
  Clone ID: MRT4577_25659C.1
tcgcatatagctaatgtaactcgaatccagaaacgactgtgtcggtgcccctaacagtgaaagggcatcacagaatcatggcggtgggcttgaccacaacgatgtctactgccgatcttcttatctcgctgatgagtatcatgatccatgttacagctcctgagaacaagcaggtgatactgatcgaccgaatagaagagctggcgacaacatgggattcactgatcattccagcagggatgtatctgtacttacgtcttaacatgggcaa

SEQ ID NO: 103239 - DNA, 464 bp, Zea mays
  unsure (1)..(464): unsure at all n locations
  Clone ID: MRT4577_2565C.1
gcgctttcatactttacccggnccccgcctcaccccgaaccggccttttttataggaaagcgggcggctacaacaccgccgccatgcctcgccgcagntcaggaaggtctgccccacgcccagctccccgtgctgctccagggaggaacccgccacagccagcacgccaggcctcttctccagctcctgttcgagatggcggtggctccatgcttggaggaattggggccaccattgctcaaggtatggcgttcggcacgggtagtgccatggcacacagggctgctgatgctgtattaggtccccggaccatccagcatgagactggcgcctcagaagctgctgctgctgcccctgcccctccagtgatgaatgctgatgcttgcagcatccattctaaggctttccaagattggctcaacaactatggcagcgagatcagcaagtgccagttctacctagac

SEQ ID NO: 103240 - DNA, 879 bp, Zea mays
  Clone ID: MRT4577_25660C.1
attgggtacctcgaggccggccgggaaaagatcgcccttgctcatggcggcagagatgttaggggaaagccaatggggatagactaccatgactttgtcggaattatgttactgctcattatcaattccaccattagcttcatagaggaaaacaatgccgggaatgctgctgctgcgcttatggcccgcctcgcaccaaaatccaaggttttacgtgatggaacctggagtgaaatggacgcatctttgttggtgcccggtgacataatcagcattaaacttggagacatcattccggcagatgcgcgtcttctcgagggagatccgctgaaaattgaccagtctgcacttacgggagaatcgctacctgtaaccaaacaacctggtgacgggatctactctggttcaacctgtaagcaaggtgaaatagaagcagttgttattgccactggaatccatactttcttcggaaaagcagctcatctggttgagtcaaccactcatgttggccactttcagaaggttctcacatcaattggaaacttctgcatttgctcaattgctgctggaatgactattgagttaatcgtgatgtacgctattcatgcaagagaataccgtcagattgttgataacctcctagtgcttcttatcggaggaattccaattgccatgcccacggttctctctgtcactatggctattggatcacacaaactagcacagcagggtgccattaccaagaggatgactgccatagaagaaatggcctggatggatgtcctttgcagtgacaaaacaggaactctgacactcaacaaactaagcgttgacaagaatttaattgaggttttttgctcaaggcatggagaaggatga

SEQ ID NO: 103241 - DNA, 412 bp, Zea mays
  unsure (1)..(412): unsure at all n locations
  Clone ID: MRT4577_25661C.1
ggaccggccggaagcccgggcgacccacgcgccgttcttcccaaacaancccccacnnncnncgaggcgaggagagcgagaaaaacagggcaccggcagcgacgatgacggggcgcggcaagggcggcaaaggaccgggcaagggcggagcaaagcgccaccggaaggtgcgacgagacaacatccagggcatcaccaagcccgcgatccgcaggctggcacggaggggcggcgagaagcgcaaaacggggcataactacgaggagacccgcggcgcccccaagaacttcctcgagaaacgacatccgcgacgccgacacctacaccgagcacgcacgccgcaagactgataccgccaaggacagcgactacgcgcccaagcgccagggccgaacccccaacggcatcggag

SEQ ID NO: 103242 - DNA, 1288 bp, Zea mays
  unsure (1)..(1288): unsure at all n locations
  Clone ID: MRT4577_25662C.1
ccggccgggaacctttcctccatcctcaacccatcccatcatcaccttcaaaatgctgtccaccctccgagtcgccagccgccgggctgcccgccctgcccagtacaacctggctgccactcgcgctgcctccaactgggccaacgtccctcaaggtcctcctgatgccattcttggtatcactaaagccttcaaggccgacaagttcgacaagaagatcaacctgggtgttggtgcctaccgtgacgatgctggcaagccctacgtgctcccttccgttcgtgaggccgagatgaaggtcgtcgagtccaagttgaacaaggagtacgccggcatcactggtgttcctgagttccctcccgccgccgccaagctggcctacggcgccaacagccccgccctggatcgcatcaccatcacccagaccatctctggtaccggtgctctccgtgtcggtgccgctttcctcgccaagttcttccctggcgaaaagaagatctccggccgccagccttcgtgggcaaaccacaaggccgtcttcaaccacgccggcctcgaggttgagcagtaccgctactacgacaagaagaccatcggccttgacttcgagggcttgattgctgatgtcaagtctgcccccaacggcagtgtcttccttttccacgcctgtgctcacaaccccactggtgttgaccctacccaggagcagtggaagcagatctctgacgtcgtcaaggagaagggtcacttcgccttcttcgacatggcttaccagggctttgccagtggtgacaccgacaaggatgctttcgctgttcgctacttcgttgagcagggccacaacattgctctttgccagtctttcgccaagaacatgggtctctatggtgagcgtgttggtgccttctccatggtatgtgccgatgccgacgagaagaagcgcgtcgactctcagctcaagattctcattcgacctctgtactccaaccctcccatccacggtgcccgcatcgccgccgagattctgaacagccccaccctctacaagcagtggctcggtgaggtcaaggagatggctgaccgcatcatcaccatgcgtgctctcctcaaggataaccttgagaagctcggctccaagcacgactggtctcacatcaccagccagatcggcatgttcgcctacactggtcttacttccgaggagatgactcgcctcgctgaggagttctccgtttatgnccaccaagacgnncgtatctctgttgctggtatcacctctgaaaacgtt

SEQ ID NO: 103243 - DNA, 260 bp, Zea mays
  Clone ID: MRT4577_25663C.1
ggtatgcccgacgcagctggatcttaagcggcgcccgggggggggtttgtaataacagatctaattttccggtgcgtgaccacatacacacatattacactgaatcgctgaagccgaaagttcagtactaccaggcacctacgggcaaggaagagaaaaaaaaaaccatactagggaggggtcacaagagggagcaggataccgggtaaaaacctcggatgcagtcaactttcatcatcatcttcttcttctgtggagga

SEQ ID NO: 103244 - DNA, 462 bp, Zea mays
  Clone ID: MRT4577_25664C.1
ggcctctccctgtcggcggcctgtccctgactccctgtccagctccagcggccgaacggcgggtgcgggctacggctctctccagaccacaatcccattctccttgtccgggcgtccggctgtccctgtccatgactccatgtccagcggagtggtgactgcggtgcgggcatgcaacactctccctcgctctagccagacaggaggcaggcagcaaagcaagcacatcacggaagtacatgcaccatcaaggcacggagcaaggcaggcagaggtaccaatgtagccagcagtccagcatccagcaaggcggcagaggtaccaaggtagccagcagtcaggggagcagcgacctgcgttgttgcttttggatagttcgtgttgcactgctgattttttgtaggggagcagcgacctgtgctgctggttgtatgaggattgtttcacgtttcgggtagtttg

SEQ ID NO: 103245 - DNA, 565 bp, Zea mays
  Clone ID: MRT4577_25665C.1
ctcgagttttttttttttttttttttttttttttttttttttttttggttttttttttttggggttttccttttcttttccccttttcttccgtttctttccccaaaaaccaaaaaaggaaaccaaagggaaaaaccgtacccaaatttttatttcaaaaggaaacaaccaaagggttggttttaaccatttcccccttgccaaaaactaattttctttttccctttcccccaattcccgccccccgggggatccccctattttaaaaccgccccccccccgggggagccccaaatttgggtccctttaagggggggtaaatgcccccctggcctaatcatgggcaaaacttgttcctgggggaaattggtatcccgtcccaattccccccaaaataccaaccggaaccaaaaaaggaaaaccctgggggccccaagggggggcccaacccccattaattgggttgggcccactgccccctttccaatggggaaacccggctggccccctccctttaagaatccccccccccccggggaaaggggggctggcgaatgggcccttt

SEQ ID NO: 103246 - DNA, 877 bp, Zea mays
  Clone ID: MRT4577_25666C.1
tttgccttgccgctgaccctgcaaagtcgatcgatactttacgtggcgaggtggtaccctttgtgtcggagggtgttgcaccgacaacccctgatgctctgcacgtgcatcatgctggggttttgggacctcaaggcgcttcgcggctcggagatgtgtccctggagggctttgacatggaccaaattttgaattcgggtcctaatgtactgtcggaggagactgttgatagcgcagggtttgacacaatgcttgaaggcacattgaaagagtttgccgagacattacgtggcgaggcggtaccttctgtgttagagggtgttacactggctgccctccatgctttatactcgcattatgtagaggccttgggatctcaagtctcttagtgatttggcaaggagttctttttggaccttcatttttgtttaatattaggttttttcccttatttatttatttatgatactttggtggttctttgtttatttcatgttacgtgtctttttatctttttcatttttatttatttgcatttttttctctttttttttatttcgtttttttactcttttttatttttcattttttttatttttattctttggcttctctgttttttatatatctatattttttttattctaatttttttttattttttctatatatatattttcttattttttttctattcgttttcttctttattattatcttttttttctctaatctttattttttatgtcttatattctttttttttgatcttattttttcatattaattttttcgtactatcttctttatatatttattctttattctttatttttcttttaatttcctttctcatcttttaatttttttatctttt

SEQ ID NO: 103247 - DNA, 622 bp, Zea mays
  unsure (1)..(622): unsure at all n locations
  Clone ID: MRT4577_25667C.1
ctggncgcaccactgggccgcgctgcttctccgtcacgctggttcgtcgtcgccgccggccagccgcaggagctcgccgtcgcgcgtttttgaagctctccaggaagggggcgcgcgcaggcgcagcatgagagcggccgtgaacacgccacctccgcgctgctactcgcggcggcgcgccagcgccacgctgctggaagcgcgttatgtgttcgaccacgtgccgcagcggcgcctgccgagcctggctgcggaactccgcgcgcggcccgcgtccgtggctgcccggaggcccgcgcggcgctcggccgcgtctgcggctgcccccacctgtggcgccgcttcagttactcgtttgtttagggcattgctgcagattccaacggcctattcttcaatttctcgcgtgcgtttagccccggctgcattcttgccagcaagatacaactttgaaggctatatcccccgtagctgctccagttcgcttcagatctatagccggtcatcgatgttaaatctaccaccatcttcagctttctcanncggtgtccttcccagctttcacctccttctgacgtagcncnncagcgttcagaagggaatttggttcgcttcttttcgc

SEQ ID NO: 103248 - DNA, 277 bp, Zea mays
  Clone ID: MRT4577_25668C.1
gcctgcacgcgcacgcgagcgtgggcccgctaccgcggccgccctcgtttttttttttttttttttttttttttttttttggtttgttttttttcatttcccattttttttttaatatatcttttccccaaaacacaataattcctaaatttaacatttcccaaaccgaaaaacaagaatttttggactatgacgcccccccccgggcactctagttagggtccagccggccccttttccgggcgacaaaggttaccacaaccccccggccccttgg

SEQ ID NO: 103249 - DNA, 219 bp, Zea mays
  Clone ID: MRT4577_25669C.1
ggtcaaagtaaacttgatggtttacagcacatcagccacgtgggaacgcacgctttcaagctatccgacttatcggatcaatcccggaagatgagacgataccacgtcggtcatcatggtccaccctgagggaaagtcagatgcatgcgcttggctcactgtatagacggggtaggggagaacaaacgtgacaacagaccgtgataaggcgattatggt

SEQ ID NO: 103250 - DNA, 580 bp, Zea mays
  Clone ID: MRT4577_2566C.1
atgcttgctttcaacagcatcaggcttttttgcaacattatttgcccgagccagacgggtagctagggtttctccacctcctcctccggcctcatggctggccgcaactcaggatggtctgccccacgcccagctccccgtgctgctacagtcaggaacccgccacagccagcacgccaggctcctcctccagctcctgttcgagatggtggtggctccatgtttggaggaattgggtccaccattgctcaaggtatggcgcatggcacagatagcgccatggcacacagggctgttgatgctgtattaggtccccggaccattcaacatgagactgttgcctcagaagctgctgctgctgcccctgcccctccagtgatgaatgctgatgcttgcagcatccattctaaggctttccaagattgtctcaacaactatggcagcgagatcagcaagtgccagttctacctagacatgctgtacgagtgccgccgtggtggtgtgtctgcctaagctgcctctgggattattcatggattttctttcggggatgttatctcattaataagataccggaaac

SEQ ID NO: 103251 - DNA, 331 bp, Zea mays
  Clone ID: MRT4577_25670C.1
tcggcccacgcgtacgcaaaggtaccgaatccttctgcgaggccccagcacctaatgccccaggacaacaaggcaccatggtttgagaggaagcggctagaggacctgctgtcgggctagaagacggcagtggcgggacgcccccggacgtcaggcggactgtcgctgcgggcgggccaactcgtcttcgtcgccgagtacatctgggccatggactacgtgcccgtgttcacgcatctacacaggcttctggtaacaggcattctttcgtttgctgctgcatgctcacctgcaagcgtagttagtgcttttcgaaagggatgcgtacttg

SEQ ID NO: 103252 - DNA, 371 bp, Zea mays
  Clone ID: MRT4577_25671C.1
gggctcggcccaatagaactgcatgttattattggaatagaaaaaatcgggtctggtacataccgagcccacggcccacgggtaatttcgttgcattgggggggggggggggaaagccccactaatcctgcagtttgcctagggggggggggggggccccgatccacaggggggcttactggctggacaggatttatggacgcattacattttaccgggacattacaaaggggttaggaccaaagtagaagatggactactaggccgggggtaggggtggggtttaaccgggagagggggggggggttgggggaggtggtggggggattggctttgttggtggttgggtggggtggggttgttggggtggg

SEQ ID NO: 103253 - DNA, 259 bp, Zea mays
  Clone ID: MRT4577_25672C.1
cccggcccgacccactcgtgcgcccgctcgttctcccactcgtcctcacactcttcatccaacgcgaccaatcgagggatcgctctaattgaaccgagctcgagccccagacaatggaaccagatacccacacaacatccatctacccaggccaaccaatgggcaactacaaaacaagactcaccacatacattaacgaccctccaaatcacccatcagacacaatacaatcacctacacacaaacaacacataccaat

SEQ ID NO: 103254 - DNA, 227 bp, Zea mays
  Clone ID: MRT4577_25673C.1
atggaaatagctgtggtggtttctacaatggtagctttatgcaggagtttagtacgctagagctgaagcacacttcatgaataaggttgaagccttacgaaccttggacggacgggatgtggcctgcacggaagccagatgcacccgaggttccagaagctccacgcgcgaccggtcggaggacgcagatggtacgtcgagggggaagctaagctcatggtataact

SEQ ID NO: 103255 - DNA, 675 bp, Zea mays
  Clone ID: MRT4577_25674C.1
cctcgaggccggccgggatcgccgtccttccccacgcgatccccatccccaagccttgcgccaccatcccgccttcaaagccgcgggtgtgcacaggggcgagtccatgccgtgcccgccacccccgccgtgatagccgcctacgcgtccgtcgcccctgcctgcccccacgatgcccacttcaagaacaacaaaaatcccaagaaccgcggaagcctgcccatcctctctctcccctcacagcgaagtcgtcgtctcctcccactcgatgccgcaacctcgtgagggcaagtgcacaggttccatgcccacgcccccgtcaatcacgcgatctccttgccgtgaatgtcgtccaatctctcctcgccgtcggcgttgcgcacccccacgctctcatccactccacgactcgcctgtcctccaagtaagtgggcacgtggcggatccggtgcagccgaccctgggaggagcgcatcgcggcctccacgccctcatccactcctacacgtgccggaggtggcgctggccaagttgtcggatgacgaggaaaacgacgacgcctactactacggcgccggtgacacgtcgtgttccacactgatgacttcgagcacggcggcgttgtctactcgctcctgttccttctttccctcctgctctgctggtgcgtgcccg

SEQ ID NO: 103256 - DNA, 137 bp, Zea mays
  Clone ID: MRT4577_25675C.1
gccgatcatccaaagacacgttggcgttaataacgattagaatgaacaaagggctcggaaaaagttccatttgatcgctcccctccggggaaaattgagtggaggattccaaaaaaacccccaaaacgaggcccatt

SEQ ID NO: 103257 - DNA, 280 bp, Zea mays
  Clone ID: MRT4577_25676C.1
gtggggacaagatggaggatgtccacagaggctgacctgtgggggaaaagaagtgctcaggtaaggttgtctcctctcctgtcctaaaaaaatccatgcttgcaggagagggttggtgcctgctcagtttctgtcgagggaatgggcgtctcctcggctcctcctgggccctctgcttcttggaggccgaccgctggagactgcggctcctgtgcttggatctttgacatctgtcagtcactggaggctagagaagttgactttaccttggctttctgtg

SEQ ID NO: 103258 - DNA, 237 bp, Zea mays
  Clone ID: MRT4577_25677C.1
gcactgtactcaagcgtgaggtacaactcccatggtggggcctcattttcgcatgtggcatggcattcctcttcacacttcccatcagcatcatcaccgcgaccaccaaccagtcgcctggcctgaatgtgatcaccgagtatgccatgggtctgattatgccgggctctcctatcgccgtcgtctgcttcaaagtctatggctacatgagcatgtcgcaggccgttgccttcctct

SEQ ID NO: 103259 - DNA, 123 bp, Zea mays
  Clone ID: MRT4577_25678C.1
cgccttggacagcggcaccagaacctctgcctccgcaggtgagttcgcctccaaacgcatctccttttccgcttctcgatccgttagggttttaaccggagctccatcgttaccgacttacgc

SEQ ID NO: 103260 - DNA, 227 bp, Zea mays
  Clone ID: MRT4577_25679C.1
gtgagcgcaccaagaaacatgaagtgccactcctgctaggagctgaccatgctgcagaaggttaaccaccaactcctgtagacattggacgggttctccatcgactctgtgacgggcaactcgtgcctagtgatcaactgcttgcacaactggatctcttgacctgacactggtgcaccgataccacgctcagcgcctaaactgaagagctcgccttccatgtggct

SEQ ID NO: 103261 - DNA, 223 bp, Zea mays
  Clone ID: MRT4577_2567C.1
ggcacgaggccttcgcctccctatgtcatgtagcttgaggctccggcgatcaagggctggcacgatgtacgctgcgaggaagaagatccagacggagaaggctcttgagccctacaagttcatggactccgttgcccaggcttcatgagatctggagagcggaaaccaggagctcatgagcgacctgaagggactgtgcatcaacaatgctattcagatggat

SEQ ID NO: 103262 - DNA, 530 bp, Zea mays
  Clone ID: MRT4577_25680C.1
gggggggggggggggttttttttatttttttttttttttttttttttttttttttttttttttttgacccacccctccctagttttagagcgcgagggggcgccccttttttttttttttacccaaaaaaaaaaaccccataacttaagggggggggggggccccaataacattgaacccaccgactatcaccagggccaaaaaaaaacccccacaaaaggaccaaccaaccacaaaaaaagtttaagggggcacacccgaccaactgacgaaaactttggggagcaactgggccaaccaaaaactgcagcacactcaaaactgacaacaaaccgcttaggccacctcctcgaacttggggccagggccccccctgccgggaggggggaactcttccaagccgccaaggccgcccaagttttaacccccgccccgggacaacttggcgaaaaagggggtgcaaaaggtttccaactccttcattttgggcttaaaactcctccccctccgggagcggggtggggtccaac

SEQ ID NO: 103263 - DNA, 250 bp, Zea mays
  unsure (1)..(250): unsure at all n locations
  Clone ID: MRT4577_25681C.1
cgaagctcggaatccggctcgagacgaacaaaactgaccatgtcaacggcggaacaggaggaggcggcgggggcacnagagagccgccggaggcacgggacaccacggcggaaacgccagcggcggnggagaacaaagcccaccgcccgggcgcgacagcgaacaagccgccaagcagccagagaagacgccgacagcncagctacagaaggcgacgcagaggggcgcgaccacgagcgcgaacggcggc

SEQ ID NO: 103264 - DNA, 323 bp, Zea mays
  Clone ID: MRT4577_25682C.1
ggaaccgggggggcccagatttaaaggaacggggataaggggtatgggaaaaaaaaaaaacacccggggggtcaccaccaaaaaaaacggccttatcacaaacaggaaaaagacgggcttagccctcgggtacaaagcaaaaggggggcagttcccttggaaagcacaaaaccttaaaccaaaatatttaaacgggttaaggaccaaaacaccataattggcggcggtttgaaactaaaacacgctggggggggaaaaacggcacgggggtgacttgaaaaaacccttgaaacctttggggaagcccccccggaacagcaagg

SEQ ID NO: 103265 - DNA, 227 bp, Zea mays
  Clone ID: MRT4577_25683C.1
gccagtagtggagatcgagtagcagcggtagctaggtgcagggccaagtggtgttggctggatgagatgagaggaggtgcatcagtgcatgcattaggtagtaggggtgttaggagtactgcgttttttttactgctgtactacagtctgctgttcctagatgctgttcactcgttcagttcagtgcatatatatgatgctccagctcttatcaactacaaataata

SEQ ID NO: 103266 - DNA, 464 bp, Zea mays
  Clone ID: MRT4577_25684C.1
atttcaaaattagccttcgtcacacttttgatactcttctcctctccctctacgaaatctctcaagaatccagatacagacgtgcactccaccgaaccccgcagcacacaaccaggcgaacaaggcacacgacagcggcattgacaaacccaacaaggcaccaaccagaccgtccacaaccgtgaaggaccccatccacctgaccaacctgcggaactctagctacttgaacaaagacagctacgaggatgaagctgacgacgacgaccgcaactatgtcttcgctgcctccgaatactatctccgctccacctctagaactcgctggtaaggttgacatggacctcaagaggagtcacagtatgacgcgacggacgtttcggtgcatacggaaatgctatgaacttgatgataccttgtaaagactgatcatcttgcagcccaaaagagatccccaatatcga
